United States Patent Application Publication US 2008/0229439 A1 - sequence listing, part 7

SEQ ID NO: 14455 - DNA, 893 bp, Oryza sativa
  Clone ID: TFbOSC874j.C1.o4.np
ttatttttgaacaggaaaaaggaattattgcgtcagcggctagggtttgcggtggaccgggtgcacggcggcggctcacggaaacgaacggccgagatcgatcctatccaaaacggacggccgagatcgaacggtccacggccagaccacgagagacgacgacgatgacgtcagcgacgacgtcaccaccggcggcggctcgggcgcgcatgctcaccggcgaacgacggcgtggcggcgcgaacggagagcacctacgggtagcggacggcacggcaaactcaccggtgaccaaagaagaagcggcggcgaccttcggcttgacgacgacggcggtgttccggcggtcgacagcaacggcggaggggcggacgaggacggcgacgcgacggcgaccacgatggcgaccttcccgagcgacgacgacgactggagcgacggcggcgcacggctggagcggcggcgacgacggcggcgcgaggtctcacggggctagggcgctacggacgacgagagacgaaggcaagggtggcgacgggggttggaaggcagcgtcggaggcccacggtgaccggcgacggcgaaggaaggtctagggttcagaggagagagatcgatctgaatcgaactcgaatccgcgaatttccaaacgaaattagccgacgattccataagagaaaagatagaggggattccgaagatcatttcccctctattgatttcaccggagaaggaaaggcgcggtggggcccacctgtcagcgggagagagagagaggagagcggcagctcggttgcgggccggcttgggccgaggagagagagaaaaagagaggggttttgggccgactttcggcccaaagcaaaaagagacttttaaaaacctttttcaat

SEQ ID NO: 14456 - DNA, 3645 bp, Oryza sativa
  Clone ID: TFbOSC874j.C1.o5.fg
atggaagggatcaagttgaaatttcagggatatagaagggatcagcttactacagaagaaagcttacgccagaagccaacttacagaggaagccagcttacggcgcaagccagcttacaggagaagcccgcttacggcgtaagccggcttacaacgcaagccagaaggtccaaggcttacgacgggcgatgtaggtgcctgaagcaccggcatggcaacttggacggctccgcggccgttgccaccaaatatcggaggcaaacgaaccttctgcacgaccctgaagtgtcgttttggatgtcctttgttttatggacatcacccatatgggcccttgatgccactaagaacatgtcggacataacaaagaaggaattcgccgagcttgccttggatggtagtaactacctcacttgggcattggacgttgagattaaactcgactccattggtctcgatcatactattgtgctgcccgaacttggcactgtggagtctacgaaggccgagaaagcaaaggcattgcatttcttgcgccaccatctccacccagacctgaagtctgagtatatgaccgagaaaaatccactggtattatggcaatccctgaaggatcgctttgaccagcaagggtcaattgtgctcccacaggtacaacatgactggatcaccctacacttccaagactacaagtctacggcggcgtataactctgccccccataggatcatttctcagttgcgtttttgtggccagaagatcactgacgctgagatgatcgagaaaaccttatctacctttcatcccaacaacatagtgctgcaacagcaatacaggaactcaaagtacccgaagtactctgatcttatctcagtcctgttagttgcagaaaggcagaatgaagttcttctaaagaatcattctgctagacccactgggtctatggcagtgcctgaagcacacgccaatgttgttggaaactcgcgtggccgtaaaagaggccatggtgagaagaaagggaaaggtaagggaagtatcaaattcaagggcaagagcaagggtaaacccagaggtaaaggcgaactcaagaaggttacaggtgaatcatctggggaaaagcaggataactgctatagatgtggaggcagagggcattggtcccgtaactgccatgtccccaagcacctggttgagctctaccaacaaagcatgaatgagaaaaagagccaacatgagtcccacttcaccattgagcctgaagctcagattgaaaagcatgatgacatgcttatcaatgttaaggatggtggggacgtccgtatggacgatgattggaacaaccttcttgaaaaagatgataacatatttggagacctgaaaccttatgggaatcccatggcagaagaggatatatgtctagtagacaatgccaccactaacacaatcttaagggaaactatgtatttccacaccttaactaagaaaactagaaatattatgaccattgccggaagcaatgctcatatagtaggcaccggaagtgctactctagttctccctatgggtacccatatctttgtaaaggatgctctattggatcctgattcaaagcgtaccctcttaagctttaaagatatccgtgcaaacggtttccatatagaaaccgagattgagcaagatgctgaatatctgctcataagaaaaatagatggatatcaaaagcaagtggtggaaaggctcccttcattgccatcgggtttgtactacacgtacataaaacccactgaggaatatgtggcgatgaagaccatatttagaaacccagagtcatttagagtttggtatgacaggctgggtcatcctgggttgggtatgatgaggagaatcatcagcaattctgctggccacaatgttgaaactaatgacttccctaatcctgaagattttatttgccctgcttgtgcaaaagggaagttgatcattaggccatccctcctgaagattagggatgagtcacctgttttcctggtaagaatacaaggtggaccatgtggacctgttgtccacaaggaaccatgcttttcaaagctaattgcccaaatcatcaagctaaaagcttgcttccctgatagccgcgtacaatccattcgaatggataatgctggtgagttcaggtcgaaggcttttgatgattattgtttagccatggccatgggcattaaggtagaatattcagtaccacatgtccacactcaaaatggcctagctgaatccttgatcaagaggatcaagttgattgcacagccactgttgcaggattggggagaaaggcatccagaagaatgccgagatataatatggaatgcaactgggatgcagtccttagatccacgcactagtgaagctgaactagaagttcagagaatcataaatttgcaaaatattgtaaataagttgccagatgccttcactgattacaagggagtgacaaggtcgcatatacctacagtaaatgcgccggaaagagtagaggtaacccagaaggttactgactctgctcttaccccccatcctaggaagatggggagacctccagttgaagaagctcaacctgaagttgagaaagccccagaagaggcaactcaacctgaagttgagatggtcccagaaggacaccatcctaaagatggagaacccagtgccttacgcgcgtaccttggctctggaagatcggaacactccaactcggtcgttatgggaaatcacgatgagctggaggaaataaatgaggagatttccactaattgttctgatacaggagagttacatcatagaaagaccactatcgtcgacattcactttgcctcaaagattgttgtcataatggatccagatccagaaccaaagtccatgattgagtgccagaagcgctcagattgggacaaatggaaagcagcaatagaggcaaagatgcggtcgctttataaaagagaggtttttgggcctgcagtcccaacacctccaagaatcatccctgtaggatgcaaatgggtcttcctccggaagaggaatggccaggtggtgaggtataaagcaaggctagtggcacaatggtccatgcagagacccggtattgactatgatgaaacttactctcctgtgatgagtggaatcacgttccgatacttgatctcaatggcaactaatatgaacttagatatgcagttgatggatgtagtgaccgcatacttgtatgggtcactagattcggaaatttatatgagggtccctgaaggactcaagattccgaatccgaaaggaaatcgcaacatgtatagtgttcgcctgcagcgatcattatatggattgaaacaatccggaaggatgtggttcaatcgattaagtaactatctcctgaagagagatatagtgcaaccccaaccagaagacattgggttggcgttaaaactatcctcaggtaccttcgaggtactcaagatcttgggttgtggttcccgaagaaccaagatccatccatggtgggatatgtggatgctggctatatgtctgatcctcataatgccatatcccagactgggtttatatttctttgtggtaatactgccatttcctggcggtctgtaa

SEQ ID NO: 14457 - DNA, 722 bp, Oryza sativa
  Clone ID: TFbOSC1572j.C1.o1.np
gaattcgagctcggtacccccgaatgcaccagaggatgtccggaccgacgccgataaacaagaaacgttcatgtctttttctgatgacgagctcaccaatcaactgatatgtgaagactacaccgactatgagaggctgtttgacacggcaatccgccacgaggatcaacgcaacacgacggctacgaagaggcaagctgcgcaacttactgcccatcaaggaggtaaccataagccagacttgactcaccgtcagaaggctggacctaccaccatgagtgttggtcaacaccgcacattcaaccacaccaacttgcaccatggctccagtggcagctagaatgaccatggaagtcagacgaaccgctgtacagctccacgctcaccgatggcaccggcacagacaggccagaccgcacaagccaataaggagacgggagcaaaaccaaagtcctgcttcaactgtggtgagcttggccacttcgatgacaaatgcccgaaacataggcgtgccggaccaaggtttatacaggctgacgtcaaccactcatatggggaagaggcacaagcaccaccacaggacctactggatacgattgctgataactcaatccctgcaacagaactatgtgattctggtgcaacgcattctttcatctccaagaaatttgtcgggatgcatgggttaataagagaggaacttaacacaccgatgcgggttc

SEQ ID NO: 14458 - DNA, 3810 bp, Oryza sativa
  Clone ID: TFbOSC401828j.C1.o34.fg
atgtcaggtaacgaaggtgagaagagtccccaggattttgctgactgtgtcagccaagagcaactacgaactctccaagaaaatactcaaaaggacatcacggaggccgttgcaaagtctgtccaagatgccttcgctaaaatcggcttcctgaaccacatggagaggttggacaagcggatatccacgctaactgatcgggtcgccgcgttggagacaccttccaatgaggaagtggtgagtggtgacgacgatgcttatcctgaagacacggtgtatgattccagtggctatattgacgcaccggccacaaggcaagcacggctacgacgtcgcctatgcacaaaccgcacaggtatgggtggcactcgccaccaacaaggtaataataataatcgtgtgcccgatgatccttatgctaaggttaagtttaaaataccatctttttcgggatattatgatgctgagaaataccttgattgggagatgatagtagaacaaaagtttaatgcccaccttgtacccgagcaacatagagttagacaagccagtagtgagttcaaggattttgctattatgtggtgggctgggttatctgatgagggggtgctacctactacttgggaagaacttaaggtagctatgcgcgataggtttgttcctccatcttatcatagagatttacgcaagaaactgatgcgtttggaacaaggggataaatctgtacaggattactatgagaaggaattacaggggtgcgaccatcagggcaagagcaaggcaagcacatacactccgcgcacgatgccatctgtgggactgcccaaggccgtctcttttcgggcgtcctcccagccagcgggcaagcgaccagctgcatccggagcttctgcgacaccaaaaccatctccaccacgaccagcagagtcaggtaaaggttcctcgcaggtacccgccaagagtgcctcatctgtcgcctcgacgggacgcattcagtgccaccgttgccaagggtttgggcatgtgcagaaagattgccctagtcaaccggcctatgttgctacagaagatggctacatcaccacctccgatgtggaagaggaagagggggaagaagaagttgaggatgaggatgttgaagtctttgctcgtgatgacacaacgaactacaggaccatcattgtgcagtgggtgctcagcacgcagattttcttcgtcatcaacaaccgtcgtgcacgtgtgatcattgatggaggtagctggaacaacttggtgagttctgatttggtcaagaagcttggcttgactacacgtacacatccacacccttaccatattcagtggttaaacgattccggaagagcaaatgtaacacaagtttgtagggtttcgttttccattggctcatatgcagattctgttgattgtgatgtggttcttatgcaagcttgttcacttttgctgggtcgtccttgggaacatgacaatgatgctacacaccatggtaggagtaataaatacacttttgtgcataatgggaagaaaattactttgctacctttgacccctgctgaaattgtagaagctgataaagagcgagctgctagtttgaaacttgatgaatctgaaaatcagcaagtggctaaatctgtttttccacctaaaaaagataagctttcacctagttctaaggttgagggaattaagttgaagggtggtgttatgcttgcaacgaaatgtgacattgctgaaatttcagatgatgatatgtgctatttcttgatatgcaaacaagccttggtttctttagatgatattgctagttcgatacctcctgttgttaataaccttttgcaggagtatgaggatgtctttccagctgagatacccccaggattgccacccatgagagggatagagcatcaaattgatttgattccaggagcatcattgccaaaccgtgctgccaagtctttggatgaacacatggatcatttacgtgctatttttaatgctctacgcgatgcacgtttgtttgctaaccttgaaaagtgcatcttttgcacggaacgagtctcttttcttggatatgttgttactccacagggaattgaggtggatgagtcaaaaattgaagccataaagagttggccggttccccaaaccatcacacaggtgaggagctttcttggtcttgcaggattctatcgccgtttcgtcaaagatttcagtaccttttctgcaccattgaacgagttgacgaagaaaggggtggtcttccattggggaaagacacaggagaagtcgtttgacactttgaaggacaagcttacacacgcaccattgctacaacttccaaactttggtaagacttttgagttagaatgtgatgctagtggagttggcattggaggtgtgttgatgcaagatggtaagcctgttgcatactttagcgagaagttgcatggtcctgttttgaattattccacgtatgataaggaattgtatgctcttgaagcgcatggaggagggttgatgggacattttggagctaagaagacggaagatgttttggccatgcatttcttttggccaaggatgagaaaggatgttgagaggttcgtggcacgttgcaccacttgtcagaaagctaagtctcgtttgaatccacatggtttgtatatgcctcttcctgtaccttctattccttgggcagatatttctatggactttgttttgagattgcctagaattaagagggggagggatagcatttttgtggtggtggatcgtttttctaaggtggcacatttcataccatgtcataaaagtgatgatgctgttcatattgctgatctgtttttccatgagattgttcgcttgcatggtatgccttctactattgtttcagatcgtgatgcaaaattcttaagtcatttctggcgcacgctatggaacaagttgggtacaaagctattgttttctacaacatgtcacccacaaatagatggacaaacggaggtagtcaaccacactttgggtaccatgttgagggctattttaaagaaaaatttgaagatgtgggaagaatgtttgcctcatgtggagtttgcatacaatcgggcaacacattctactaccaagatgactgaaaagtatagaattgctggtagtaaaggtaggcaagaggttaagcttgaaccgggtgatttagtttggttgcacttgagaaaggataggtttccagaattgagaaagtctaagttgatgcctcgtgctgatggtccttttaaaattgttgagaagattaatgataatgcatataaacttgagttgcctcccgagtttggggttagtcccacgtttaacatttcagatttgaagccatacttgggagaagaggatgagcttgagtcgaggatgacttcaattcaagagggggaggatgatgcggacatcactaactcggatacacacaacaatcctccaacggtcattcaaggaccgataacaagagctcgtgcgcgacaattaaatttagaggaacaatggggggggacaaggagacacttggagaaggacttagagccatggaggatcatcgaggacgtccaagtcaaggtggaggcccaaaccaagtcgacgtcgggtgcaattcggagtccaggaccagtctgcactaaaacgggcgcccaggtcgcatacgcactcagattggggcgttctttatatgtatggaaagctaagaagataacctttccaatggttttggtcccttgtccaaattctttccgagtcaatgggaattga

SEQ ID NO: 14459 - DNA, 1368 bp, Oryza sativa
  Clone ID: TFbOSC409825j.C1.o1.fg
atgtcaggtaacgaaggtgagaagagtccccaggattttgctgactgtgtcagccaagagcaactacgaactctccaacaaaatactcaaaaggacatcacggaggccgttgcaaagtctgtccaagatgccttcactaaaatcggtttcctgaaccacatggagaggttggacaagcggatatccacgctaactgatcgggtcgccgcgttggagacaccctccaatgaggaagtggtgagtggtgatgacgatgctcatcctgaagatacggtatattatgatgctgaaaaataccttgattgggagatgacagtagaacaaaagtttaatgcccaccttatacccgagcaacatagagttagacaagccagtagtgagttcaaggattttgctattatgtggtggactgggttatccgatgagggggtactacctactacttgggaagaacttaaggtagctatgcgcgataggtttgttcctccatcttattatagagatttacgcaagaaactgatgcgtttggagcaaggggataaatctatacaggattactatggtgagctacaaaagggtgtgagacgctgtggcatagtggagggggtcgaggatgctatttgtcgtttctattctggtttgagggaggaaattcagaacattgttgattataaggaatttaactctgtcaaccagttgtttcgatttgctatgcttgcagagaaggaattgcaggggcgtgaccatcagggcaagagcaaggcaagtacatacactccgcgcacgacgccatctgcgggactgcccaaggccgtctcttttcggacgtcctcccagccagcgggcaagcgaccagctgcatccggagcttctgcggcaccaaaaccatctccaccaccacgaccagcagagtcaggtaaaggttcctcgcaggtacccgccaagagtgcctcatctgtcgccttgacgggatgcattcagtgccaccgttgccaaggatttgggcatgtgcagaaagattgccctagtcaacgggcctatgttgctacggaagatggctacatcaccacctccgatgtggaagaggaagaggaggaagaagaagttgaggatgaggatggcgaagtctttggtcgtgatgacacaacggactacagaaccatcattgtgcagcgggtgctcagcacgcagatttttttcgtcatcaacaaccgtcgtgcacttgtgatcattgatggaggtagctgcaacaacttgtggttaaacgattctggaagagcaaaggtaacacaggtttgtagggtttcgttttccattggctcatatgcagattctgttgattgcaatgtggttcctatgcaagcttga

SEQ ID NO: 14460 - DNA, 1836 bp, Oryza sativa
  Clone ID: TFbOSC411208j.C1.o1.fg
atggaggggacaaggagacacttggagaaggacttagagccatggaggatcatcgaggacgtccaagtcaaggtggaggcccaaaccaattcgacctcgggtgcaattcggagtccaggaccagtctgcactaaaacggccgcccaggtcgcatacgtgctcgaattgggacgtaacgaaggtgagaagagtccccaggattttgctgactgtgtcagtcaagagcaactacgaactctccaagaaaatactcaaaagggtatcacggaggccgttgcaaagtctgtccaagatgccttcactaaaatcggtttcctgaaccacatggagaggttggacaagcggatatccacgctaactgatcgggttgccgcgttggagacaccttccaatgaggaagtgagtggtgacgacgatgctcatcctgaagacacggtgtatgattcgagtggctatattgacggaccagctacaaggcaagcacggctacgacgtcgcctaggcacaaaccgcacaggtatgggtggcactcgccaccaacaaggtaataataatcgtgtgcccgatgatccttatgctaagatgacagtagaacaaaagtttaatgcccaccttgtacctgagcaacatagagttagacaagtcagtagtgagttcaaggattttactatcatgtggtgggctgggttatctgatgagggggtactacctactacttgggaagaacttaaggtagctatgcgcgataggtttgttcctccatcttatcatagagacttacgcaagaaattgatgcgtttggaacaaggggataaatctgtacaggattactatggtgagctacaaaagggtgtcagacgctgtggcatagtggagggggtcgaggatgctatttgtcgtttttattctggtttgagggaggaaattcagaacattgttgattgtaaggaatttaactctgtcaaccagttgtttcagtttgctatacttgcagagaaggaattgcaggggcgtgagcagcagggcaagaacaaggcgagcatgtacactctgtgcacgacgccatctgtgggactgcccaaggccgtctcttttcgggcgctgtcccagccagtgagcaagcgaccagctgcattcggagcttctgcaacaccaaaaccatctccaccacgaccagcagagtcaggtaaaagttcttcgcaggtacccgccaagagtgcctcatctgttgcctcgacgggacgcattcagtgccaccgttgccaagggtttgggcatgtgcagaaagattgccctagtcaacgggcatatgttgttacagaagatggctacatcaccacctccgatgtggaagaggaagaggaggaagaagaagttgaggatgaggatggcgaagtctttggtcgtgatgacacaatggcctacaggaccatcattgtgcagcgggtgctcagcacgcagattttcttcatcatcaacaatcgtcgtgcacgtgtgatcattgatggaggtagctgcaacaacttggtgagttttgatttggtcaagaagcttggcttgaccacacgtacacatccacatccttaccatattcagtggttaaacgattctggaagagcaaaggtcgactctagaggatccccggggtaccgagctcgaattcgccctataatgagtcgtattacaattcactggccgtcgttttacaacgtcgtgactgggaaaaccctggcgttacccaacttaatcgcattgcagcacatccccctttcgccagctggcgtaatagcgaagaggcccgcaccgatcgcccttcccaacagttgcgcagcctga

SEQ ID NO: 14461 - DNA, 2202 bp, Oryza sativa
  Clone ID: TFbOSC420832j.C1.o1.fg
atggcgaagactatggaacatgaacggcgaggggcgagagatcgtgcgagtaccttgtcaagccagaggcctcttgggcgaagggtgcagggcgaagagtatataccggaggaagatgacttcgccacagcaagttcgcccccgcgagggccgaagaagcctttccgtcccatcaaccccagggaccgtaaggccgacgatcgcccgatggcccatcaggggcccatgagtccttattacattatgtacccatgtaaatgtccctttcataagggcaaccatgatgcggacatcactatctcggatacacacaacaatcctccaacggtcattcaaggaccgataacaagagctcgaacaatggaggggacaaggagacacttggagaaggacttagacccatggaggaccatcggggacgtccaagtcaaggtggaggcccaaaccaagtcaacgtcgggtgcaattcggagtccaggaccagtctacactaaaacgggcgcccagcattactatctgtcattggattgtgtaccactcatattcgtatatttggccttcctagctccacttattacttctggacagcacaggttcttgatccctgcaatcactgactacgccttccaggtatcctttgctttgctggtaacgaaggacatcacggaggccgttgcaaagtctgtccaagatgccttcactaaaatcggcttcctgaaccacatggagaggttggacaagcggatatccacgctaactgatcgggtcgccgcgttggagacaccttccaatgaggaagtggtgagtggtgatgacgatgctcatccggaagacacggtgtatgattccagtggctatattgacgcaccggctacaaggcaagcacagctacgacgtcgcctacgcacaaactgcataggtatgggtggcactcgccaccaacaaggtaataataataatcgtgtgtccgatgatccttatgctaaggttaagtttaaaataccatctttttcgggatattatgatgctgagaaataccttgattgggagatgacagtagaacaaaagtttaatgcccaccttgtacccgagcaacatagagttagacaagccagtagtgagttcaaggattttgctattatgtggtgggttgggttaactgctgagggggtactacctactacttgggaagaacttaaggtagctatgcgcaataggtttgttcctccatcttatcatagagatttgcgcaagaaactgatgcgtttggaacaaggggataaatctgtacaggattactatggtgagctacaaaagggtttgtttcggtttgctatgcttgcagagaaggaattacaggggcgcgaccatcagggcaagagcaaggcaagcacatacactccgcgcacgacgccatctgcggcactgcccaaggccgtctcttttcgggtgtcctcccagccagcgggcaagcgaccagctgcatccggagcttctgcggcaccaaaaccatctccaccaccacgaccagcagagtcaggtaaaggttccacgcaggtacccgccaagagtgcctcatctgtcgcctcgacgggacgcattcagtgccaccgttgccaagggtttgggcatgtgcagaaagattgccctagtcaacgggcctatgttgctacagaagatggctacatcaccacctccgacatggaagaggaagagggggaagaagaagttgaggatgaggatggcgaagtctttggtcgtgatgacacaacggactacaggaccaacattgtgcagtgggtgctcagcatgcaggtagctgcaacacacttggtgagttctgatttggtcgagaagcttggcttgactacacttacacatccacacccttaccatattcagtggttaaacgattccggaagagcaaagcaagtggctaaatctgtttttccacctaaaaaggataagatttcacctagttctaaggttgagggaattaagttgaagggtggtgttatgcttgcaactaaatgtgacattgctgaaatgtcagatgatgatatgtgctatttcttgatatgcaaacaagccttggtttctttagatgatattgctagttcgatacctcctgttgttactaaccttttgcagaagtatgaggatgtctttccagctgagatacccccaggattccgcctatga

SEQ ID NO: 14462 - DNA, 3870 bp, Oryza sativa
  Clone ID: TFbOSC900041j.C1.o10.fg
atggagaggttggacaagcggatatccacgctaactgatcgggtcgccgcgttggagacaccttccaatgaggaagtggttaagttaaaaataccatctttttcgggatattatgatgctgagaaataccttgattgggagatgacagtagaacaaaagtataatgcccaccttgtacccgaacaacatagagttagacaagccagtagtgagttcaaggattttgctattatgtggtgggctgggttatctgatgagggggtcctacctactacttgggaagaacttaaggtagctatgcgcgataggtttgttcctccatcttatcatagagatttacgcaagaaactgatgcgtttggaacaaggggataaatctgtacaggattactatggtgagctacaaaagggtgtgagacgctgtggcatagtggagggggtcgaggatgctatttgtcgtttttattctggtttgagggaggaaattcataacattgttgattgtaaggaatttaactctgtcaaccagttgtttcggtttgctatgcctgcagagaaggaattacaggggcgcgaccatcagggcaagagcaaggcaagcacatacactccgcgcacgacgccatctgcgggattgcccaaggccgtctcttttcgggcgtcctcccagccagcgggcaagcgaccagctgcatccggagcttctgcggcaccaaaaccatttccaccaccacgaccagcagagtcaggtaaaggttccacgcaggtacccgccaagagtgcctcatatgtcgcctcgacaggacgcattcagtgccaccgttgccaagggtttgggcatgtgcagaaagattgccctagtcaacgggcctatgttgctacagaagatggctacatcaccacctctgacatggaagaggaagaggaggaagaagaagttgaggatgaggatggcgaaatctttggtcgtgatgacacaacggactacagaaccatcattgtgcagcgggtgctcagcacgcagatttttttcgtcatcaacaaccgtcgtgcacgtgtgatcattgatggaggtagctgcaacaacttgtggttaaacgattccggaagagcaaaggtaacacaggtttgtagggtttcgttttccattggctcatatgcagattctgttgattgcgatgtggttcctatgcaagcttgttcacttttgttgggccgtccttgggaacatgataatgatgctacacaccatggtaggagtaataaatacacttttgtgcataatgggaagaaaattactttgctacctttgacccctgctgaaattgtagaagctgataaagagcgagctgctagtttgaaacttgatgaatctgaaaatcagcaagtggctaaatctgtttttccacctaaaaaggataagctttcacctagttctaaggttgagggaattaagttgaagggtggtgttatgattgcaacgaaatgtgaaattgctgaaatttcagatgatgatatgtgttatttcttgatatgcaaacaagccttggtttctttagatgatattgctagttcgatgcctcctgttgttactaaccttttgcaggagtatgaggatgtctttccagctgagatacccctaggattgccacccatgagagggatagagcatcaaattgatttgattccaggagcatcattgccaaaccgtgctgcttatcgaaccaacccagaggagactaaggaaattcagcggcaagttcaagaccttttggaccgctggtatgtacgtcaaagccttagtccctgtgtagttcctgtaattttggttcctaagaaagatggttcttggcgaatgtgtgttgattatagagccattaataatattactatccgatatcgtcatcctattcctaggtcagacgacatgcttgatgaattgtgtggctctataattttcacaaagattgacttgcgtagtggctatcaccaaattagaatgaaacttggagatgaatggaaaacagcttttaaaactaaatttggtttgtatgagtggttagtaatgccttttggtttgactaatgcacctagtacattcatgcgcttaatgaatgaggttttaaggccttttattggacgatttgtggtagtgtactttgatgacatattgatttatagcaagtctttcgatgaacacatggatcatttacgtgctgtttttaatgctctacacgatgcacgtttgtttgctaaccttgaaaactgcatcttttgcacggaacgagtctcttttcttggatatgtagttactccacagggaattgaggtggatgagtcgaaaattgaagccataaagagttggccggttccccaaaccatcacacagctgaggagctttcttggtcttgcaggattctaccgccgtttcgtcaaagatttcagtatttttgctgcaccattgaacgagttgacgaagaaaggggtggtcttccattggggaaagacacaggagcagtcatttgacactttgaaggacaagcttacacacgcaccattgctacaacttccaaactttggtaagacttttgagttagaatgtgatgctagtggagttggcattggaggtgtgttgatgcaagatggtaagcctgttgcatactttagcgagaagttgcatggtcctgttttgaattattccacgtatgataaggaattgtatgctcttgaagcgcatggaggagggttgatcggacattttggagctaagaagacgaaagatgttttggccatgcatttcttttggccaaggatgcgaaaggatgttgagagaactaagagggggagggatagtatttttgtggtggtggatcgtttttctaagatggcacatttcataccatatcataaaagtgatgatgctgttcatattgctgatctgtttttccatgagattgttcgcttgcatggtatgccttttactattgtttcagatcgtgatgcaaaattcttaagtcatttctggcgcacgctatggaacaagttgggtacaaagctattgttttctacaacatgtcaaccacaaacagatggacaaacggaggtagtcaactgcactttgggtaccatgttgagggctattttaaagaaaaatttgaagatgtgggaagaatgtttgcctcatgtggagtttgcatacaatcggacaatacattctactaccaaggtaagtccttttcaggtagtgtatggtttcaacccttgtgcttcaattgatattttgcctttacctactagtgagagggttcataatgatgataaggcacacgctgaatttattttgtcaatgcatgagtcaaccaagttcaacattgaaaagatgactgaaaagtatagaattgctggtagtaaagttgagaagattaatgataatgcatataaacttgagttgcctcccgagtttggggtcagtcccacgtttaacatttcagatttgaagccacacttgggagaagaggatgagcttgagtcgaggacgacttcaattcaagagggggaggatgatgcggacatcactacctcggatacacacaacaatcctccaacggtcattcaaggaccgataacaagagctcgtgcgcgacaattaaatttagaggtgagctcgttcctatgttcttctttgtatgaattcgagaatagattgctacctaatgattatattgtgctttggaacaatggaggggacaaggagacactaggagaaggacttacagccatggaggatcatcggggatgttcaagtcaaggtggaggcccaaaccaagtcgacgtctggtgcaattcggagttcaggaccaatctgcactaa

SEQ ID NO: 14463 - DNA, 4568 bp, Oryza sativa
  Clone ID: TFbOSC900370j.C1.o2.np
ccaagagcaactacgaactctccaacaaaatactcaaaaggacatcacggaggctgttgcaaagtctgtccaagatgccttcactaaaatcggcttcctaaaccacatggagaggttggacaagcggatatccactctaactgatcgggtcgccgtgttggagacaccttccaatgaggaagtggtgagtggtgacgacgatgctcatcctgaagacacggtgtatgattccagtggcatggctacgacgtcgtctacgcacaaaccgcacaggtatgggtggcactcgccaccaacaaggtaataataatgatcgtgtgcccgatgatccttatgctaaggttaagtttaaaataccatcttttttgggatatgatgatgctaaaaaataccttgattgggagatgacagtagaacaaaagtttaatgtccaccttgtacccgagcaacatagagttagacgagccagtagtgagttcaaggattttgctattatgtggtgggctgggttatctgatgagggggtactacctactacttgggaagaacttaaggtagctatgcgcgataggtttgttcctccatcttatcatagagatttacgtaagaaactgatgcgtttggaacaaggggataaatctgtacaggattactatggtgagctacagaagggtgtgagacgctgtggtatagtggagggggtcgaggatgctatttgtcgtttctacactagtttgagggaggaaattcagaacattgttgattataaggaatttaactctgtcaaccagttgtttcgatttgctatgcttgcagagaaggaattacaggggcgcgaccatcagggcaagagcaaggcaagcacatacactctgcgcacgaccgtctcttttcgggcgtcccagccagcgggcaagcgaccagcagcatccggagcttctgcggcaccaaaaccatctccaccaccacgaccagcagagtcaagtaaaggttcctcgcaggtacccgccaagagtgcctcatctgtcacctcgacgggacgcattcagtgccaccgttgccaaggatttgggcatgtgcaaaaagattgccctagtcaacgggcctatgttgctacagaagatggctacatcaccacctccgacatggaagaggaagaggaggaagaagaagttgaggacgaggatggcgaagtttttggtcgtgatgacacaacggactacagaaccatcattgtgcagcgggtgctcagcacgcaggtacagcagcatgacaggttgcaacgccataatttgttttagatttttttcgtcatcaacaactgtcgtgcacgtgtgatcattgatggatgtagctgcaacaacttggtgagttctgatttggtcaataagcttggcttgactacatgtacacatccacatccttaccatattcagtggttaaacgattccggaagagcaaaggtaacacaggtttgtagggtttcgttttccattggctcatatgcagattctgttgattgcgatgtggttcctatgcaagcttgttcacttttgctggggcgtccttgggaacatgataatgatgctacacatcatggtaggagtaataaatacacttttatgcataatgggaagaaaattactttgctacctttgacccctgctgaaattgtagaagctgataaagaacgagctgctagtttgaaagttgatgaatctgaaaatcagcaagtggctaaatctgtttttccacctaaaaaggataagctttcacctagttctaaggttgagggaattaagttgaagggtggtgttatgcttgcaacgaaatgtgacattggtgatatttcaaatgatgatatgtgctatttcttgatatgcaaacaagccttggtttctttagatgatattgctagttcgatacctcctgttgttactaaccttttgcaggagtatgaggatgtctttccagctgagatacccccaggattgccacccatgagagggatagagcatcaaattgatttgattccaggagcatcattgccaaaccgtgctgcttatcgaaccaacccagatgagactaaggaaattcagtggcaagttcaagacctttaggaccgcgggtatgtacgtcaaagccttagtccctgtccagttcctgtaattttggttcctaagaaagatggttcttggcgaatgtgtgttgattgtagagccattaataatattactatccgatattgtcatcctattcctaggttagacgacatgcttgatgagttgtgtggctatattattttcacaaagattgacttgcgtagtggctatcaccaaattagaatgaaacttggagatgaatggaaaacagcttttaaaactaaatttggtttgtatgagtggttagtaatgccttttggtttgactaatgcacctagtactttcatgagcttaatgaatgaggttttaaggccttttattggacgatttgtggtagtgtactttgatgacatattgatttacagcaagtctttggatgaacacatggatcatttacgtgctgtttttaatgctctacgcgatgcacgtttgtttgctaaccttgaaaagtgcatcttttgcatggaacgagtctcttttcttggatatgttgttactccacagggaattgaggtggatgagtcgaaaattgaagccatcaggagttggtcggttccccaaaccatcacacaggtgaggagctttcttggtcttgcaggattctaccaccgtttcgtcaaagattttagtacttttgctgcaccattgaacgagttgacgaagaaaggcgtggtcttccattggggaaagacacaggagaagtcctttgacattttgaaggagaagcttacgcatgcacctttgctacaacttccaaactttggtaagacttttgagttagaatgtgatgctactggagttggcattggaggtgtgttgatgcaagatggtaagcctgttgcatactttagcgagaagttgcatggtcctattttgaattattccacatatgataaggaattgtatgctcttgtacgttccttagaaacgtggcgtcattatttttggcctaaagaatttgttattcactccgatcacgaatcgcttcaatatcttcgctctcaaaataatttgaatcgtagacatgcaaaatgggttgaatttattgaatcttttccttatgttatcaaacacaagaaagggaaagataatgtgattgcagatgctttgtctaggcgctatactttcttatcccaacttgaatgtcggatttttggacttgaatcaattaaagaacaatatgcacttgatcctgattttaatgaagtgatgataaattgtaaagagggacgtacttggaacaaatttgtgatcaatggtgggtttgtttatagagctaaccgtctatgcattccagttggttccgttcgtcttttgttgatacaggaagcgcatggaggagagttgatgggacattttggagctaagaagacggaagatgttttggccatgtatttcttttggccaaggatgagaaaggatgttgacaggttcatggcacgttgcaccacttgtcagaaagctaagtctcatttgaatccacatggtttgtatatgcctcttcctgtaccttctattccttgggcagatatttctatggactttgttttgggattgtctagaactaagagggggagggatagtatttttgtagtggtggatcatttttctaagatggcacatttcataccatgtcataaaagtgatgatgctgttcatattgctgatctatttttccatgagattgttcgcttgcatggtatgccttctattgtttcagatcgtgatgcaaaattcttaagtcatttctggcgcacgctatggaacaagttgggtacaaagctattgttttctacaacatgtcacccacaaacagatggacaaacggaggtagtcaaccgcactttaggtaccatgttgagggctattttgaagaaaaatttgaagatgtgggaagaatgtttgcctcatatggagtttgcatacaatcgggcaacacattctactaccaaggtaagttcttttcaggtagtgtatggtttcaaccctcgtgctccaattgatatgttgcctttacctactagtgagagggttcataatgatgctaaggcacgcgctgaatttattttgaaaatgcatgagtcaaccaagttcaacattgaaaagatgactgaaaagtatagaattgctggtagtaaaagtaggcaagaggttaagcttgaaccgggtgatttagtttggttgcacttgagaaatgatagatttccggaattgagaaagtctaagttgatgcctcgtgctgatggcccttttaaaattgttgagaagattaatgataatgcatataaacttgagttgcctcccgagtttggggttagtcccacgtttaacatttcagatttgaagccatacttgggagaagagtatgagcttgagtcgaggacgacatcaattcaagagggggag

SEQ ID NO: 14464 - DNA, 531 bp, Oryza sativa
  Clone ID: TFbOSC401057j.C1.o6.gm
atggccggtgccacgggttggcgggcgatcaagtttttgggtagcgcttcaagcgcgactgctcctgttctttgcgactactgctgctgcatcgatgcctttaccatcatgtcaacaaagattggagacaaggaggtgaacgacatcaacagaggagaaggcgagggcaaagacaactggggcaaaaagatcgagggagattctagcgccaatttggtgcagaagaagaaccctcatgcatcccacaacaacaacaagaaagtcaaacctgacgtcaaacccaatgctacaaccaattttaagaagaaagacaagggaaaggcaaagggcgactactttgtgtgtggtaagcctgggcattgggccaaggattgtcttgagcacaaagacaaaaagtctgcaaacatgtctattagcgagggcggaggaacatcggggtatggtcaggagaggttcctccttgttgttgggaaacggatcgacgccgacgagcacggaaacggcggttaccagagaactacgatacaatga

SEQ ID NO: 14465 - DNA, 5385 bp, Oryza sativa
  Clone ID: TFbOSC400839j.C1.o11.np
agctagtgtggcacttgattgatcatctccacaccgggtcattgcttgttactcttggaggttgccgcctcctagacggcttgtggaggagttgcccggtgacctctccgagaagattgtggaggaggcccggcgccggctttgctatcaccggcacgcccttgacggagattgatcaccgcaacctccaactcaatgcccaagcaatgaatgttttgttcaactctttgagccaagaggagtttgatagagtgagccaccttgagaccgcatatgagatttggaacaagttggcaagttggcgaagatccatgagggcacaagcgagtacaaggatgccaagcttcatttcctcaagatccaatatgagacattctccatgttgcctcatgagagtgtgaatgacatgtatgggaggctcaatgtcattgtgaatgatctcaaggggcttggggcaaactacaccgatcttgaggttgcccaaaagatgcttagggctctaccggggaagtatgagacccttgtcaccatgctcatcaactccgacatgtcaaggatgacacccgcaagcctcttggggaagatcaacaccaatgacatgtacaagttgaagaagaaggagatggaggaagcctcaccttccaagaagtgcattgctctccaagccgaagttgaagacaagggcaagggcaaagagagaggaaggggctccaactccagtaggagaagaaatagaagacccaacaagactctctccaacttgaagtgctttgagtgtggtgagaagggacactttacttccaagtgcccttccaaggatgatggagacaagtcatccaagaagaagagtggaggctataagctcatgaagaagctcaagaaggaaggcaagaagattgaggcattcatcggggaatgggactcaaatgaggagagctccgcctcatccgggtccgaggaagaaggtggtgaggatgcaagctccaagaagaagaagatggccgttgttgccatcaaggaggctctatcactcttcgctccactttgtctcatggcaaagggctcctctaaggtaacatctcttagtgatagtgagagtgatgatgattgtgatgatgtttcctatgatgagcttgtgagtatgtttgaggagctccatgcttatagtgagaaggagattgtcaagttcaaggccctaaaaaaggatcatgcttctttagaggtcttgtatgaggaactaaagacctctcatgagagactcactatttctcatgagaagcttaaggaagctcatgacaacctcctttccactactcaacatggagctctcattgatgttggcatatcttgtgatttgcttgatgatagtgctacttgccatattgctcatgttgcatcatctagcatttctacctcttgtgatggtcttgtggatatgcctagctctagctctagctcttgtatttctatttgtgatgcctcacttgttgttgagaacaatgagcttaaggagcaagtggccaagctcaacaagagtttggagaggtgcttcaagggaagactcatgatggtagcattgttgctagatatgtgggttcccctatactcggtggtgaactaccgcaccggtgggagccattgggtgcttgatagtggatgcactcaacacatgaccggtgatagggctatgttcaccacatttgaagtaggagggaatgaacaagagaaagtgacttttggagacaatagcaaaggaaaggtaattgggttagttgcaaaaacttcattgggttggctttagcataggaggctagcccatgttggcatgaatcaattgagcaaactttcaaaacgtgatctagttgtgggcttgaaagatgtgaagtttgagaaagataagctttgtagtgcttgtcaagccggcaagcaagttgcatgttctcatcctactaagagtatcatgtccacatctagaccattggagctcttgcatatggatttgtttggcccaacaacctataagagcatcggtgtggagaggaaaaatcgtacattgattgagatggcaaggactatgcttgatgaatatggtgtttccgattccttttgggcggaagccataaacaccgcttgccatgcaaccaattggctttatttgcatcgtctcttgaaaaagacttcctatgagctaattgttgggaggaagccaaatgttgcctattttcgagtttttggttgcaagtgttatatttaccgaaagggtgttagactaaccaaatttgaaagtcggtgtgatgaagggtttcttctaggttatgcttcaaatagcaaggcataccgggtctacaacaagaataaaggtattgtggaagaaatcgtcgatattcaatttgatgaaactaatggctcccaagaggggcacgagaatttggatgatgtaggtgatgaaggcttgatgagagctatgaagaacatgtctattggagatgtcaagcctattgaagtggaagacaagccatccacctccactcaagataagccatctacttccgctacgccaagtcaagctcaagttgaggtggaggaggagaaagcacaagatccacctatgcctccaaggatacacaccgctctttccaaggatcacccaattgaccaagtgttgggtgacataagtaagggtgttcaaactcgatctcgtgtcgcttcgatttgtgaacattactcgtttgtttcttgtcttgagccaaaacatgtaaatgaagctctttgtgatccggatggatgaatgctatgcatgaagagctcaacaactttgcaagaaacaaggtgtggactttggttgaaagacctagagaccacaatgtcatagggacaaagtgggtctttagaaacaaacaagatgagaacgggttggtggtgagaaacaaggcaaggttggtggcacaaggtttcacacaagttgaaggtttggacttcggtgaaacttttgcccccgtggcaagacttgaggctattcgcatccttcttgcatttgcatcatgttttgatataaaactatttcaaatggatgtgaaaagtgcttttctaaatggtgaaattgccgaacttgtctttgttgaacaacctcccggttttgaagatcctaaaaatcctaaccatgtttataaactctcaaaagctctttatggtctaaaacaagctcctagggcttgatatgaaagattgagagattttcttttgtcaaaggatttcaaaattggaaaagttgacaccacccttttcacaaaaatcattggtgatgatttctttgtgtgtcaaatttatgttgatgacatcatattcggttctactaatgaggtattttgcaaggaatttggtgatatgatgtctagggaatttgagatgtccatgattggagagttgagcttcttccttggacttcaaatcaaccaactcaaggatgggacgtttgtgagccaaaccaagtacatcaaggatttactgaagaggtttggcttggaggatgcgaagcccatcaagacacctatggcaaccaacgggcatctcgaccttgatgagggaggtaaactggtagatttaaagctttatcgttccatgattggtagtttgctttaccttatcgcatctaggccggatagcatgtttagtgtttgcatgtgtgcacggtttcaagccgctcctaaggaatgtcacttggtggccgtgaaaaggattctaagatatttaaagcattcctctactattggcttgtggtacccaaaaggtgctaagtttaagcttgttggctattccgattcggattataccggttgcaaagtggatagaaagagcacatccggtagttgccaaatgcttagtagatcccttgtgtcatggtcatccaagaaacaaaactccgtagccctctctaccgctgaggcggaatatgtttcggcggaatctagattcttagttttggccaaaatgagatttatccccaaaataagattgagaaggaatttgagaaaagtttcaaaacaaagttgcggcggtctgaccgggcggcatgctcgcggtctgactggctgtggccgtcggtctgaccggccatcggtccgcggtctgactgcccctgactggccgatgatgcctccccgcactcgccatggtcgttgtgcgcccactccggatcccgtgagtgagcctgaggaatcgagcggagaggattacgctcaaagtgatgaagaggttgaagcaaatattgagggggctagtgaggaggcaagtggagatgatgacagtggaagtggagaggatgaggatgaaggaagtgatgatatgcacgttgatccctccatctagtttgatgtgaacatgaggaatccatcgcagtataccatcttgaggcatcatgatcagtttttaaggcctcgggacaccccggatccccgttttcacaccgctttccagaagttgtgggtggctggggactataatgagatgaagtggatgtccgataccctccagtgttctatctctcggaggcaattctggcggctcctcaatattcgcctagactttggatatgatttgcatgaggagcacactcacaatccgctctccatagactatctctctcagttttatgaagatggagtgcggtacacacatgggaaggttgccggattgaggactatccccagtgtggttaacaggattgtgagagccactatcctccctcgccttggcaacaatgatgacattagaggggtggcttggcacatcatcgatacgatcattcagggtcgtcagttcgacattgtgtctctcatgatgcaggagattgccatctccaaggggacattcactcagggaatctattatgccccttacatcatgaggttgattcaagacaagcttggggctgctggcaaaatttgaagaagcacaagcagtacaagccccgccttcagcttggagctccacatgcttaggatggtgccctcttctcatcttggagctagctcaagctcagcacctcctcctcctcatgggtatgatccaaatgctttcttccatccacagtatacttactttggaattcaacccaatgaatatttcaacccggtacttggggctattaataccctaagtaaaagtattcaacgcttgtctaccgggcatgaagcatgacatgaggatgttcgtggcttgcgcacggatgttggagacttgaatgcttccatggggagattgcacactagagtgggtacattggattctcaagtccaaatgttggagagctcccaagcatttgtgtatcatcgtcgtcgtgatgctcctcatccttccacttcggcgcgtcctccttctcctccacaa

SEQ ID NO: 14466 - DNA, 1482 bp, Oryza sativa
  Clone ID: TFbOSC21755j.C1.o8.gm
atggtgagggagagaaaggtgcgggagagccccctgggcgcacggggatctggcggctcggtgcgaaagctgaacggcggcagttacaagcccggccgtcctccaggcgcggtgatcctccaccgccggccgacctcatccccatcctttctcccgccgtctggtcgccgctatttgaggtgcgccgggcggtggctcggtggagcggttgagcgacggctgtcggctaggagcagcgacagagttggaagctcggtgcagaaggtgaacggcgacggtgacaagccggccgtcctccattcgtggcaatccatcaccatcggccaacctcatccccgtcttctctcttgccgtctggtcgtcgccattcgagatgtgtcgcccgggaaagagatccaggaggggagcactttgtggggtgatttatccttgattctaaaatgggaggatagctggcaccagcgtggtggtgcgtgggagtacggcgaggagaatgcacgaggaggacaaggtcgagctggtgcgattgactacttcctctacatcgacgcgcgctacttcgcgagagttctttcgacttctcagcatcttcttccgctgcacagcgcgtcgagtgctcttgcaccatccaattttaacttgcggtctattcttgagaaagagaagttgactggaacaaacttcatggattggtatcgcaacctgagaattgttctcaggcaagagcacaaagagtttgtgcttacacagccttttccagctgacttgcccaacaatgctcctgttgctaaacgtagggagcatgaaaggcgatgcaatgaataccttgatataagctgtctcatgcttgctactatgtcccctgagtttcaaaggcaatatgaggcattggatgctcatacaataatcacgagactacgtaacatgtttgaggaccaagcaagagctaagaggtttaatacctcaaagtccttgtttgcgtgcaggcttgcagaaggtaatccagtgagcccacatgtgatcaaaatgattggttacaccgagagtctggataagcttggctttcccctaagccgagagttggctactgatttgattctccagtcgctccctcccagctttgagccgttcataatgaatttcaacatgaacaacctgaacaggaccttggcagaattgcatgggatgctaaagactaccgaggaaagcattaagaaaaactccaaccatgtgatggttatgcataagcacaagcccaacaacaagaaaagtggtcaaaagagaaagctaaactctgatgagatcacgagtactagcaactctaagaccaaggttcaaaagacagggctcgctaaggatgcagagtgcttcttttgcaaggagacaggtcattggaagagaaactgtaagaaatacctagagcagctcaagcagaagcagcaggatggaaagagttccacctcaggggctgaaaagaagtag

SEQ ID NO: 14467 - DNA, 1768 bp, Oryza sativa
  Clone ID: TFbOSC28635j.C1.o1.fg
gatagatgtcggacatctatgtgcggagattattggtttacttgacaagatcatggcagctcctgcatcatccaattttaacttgcggtctattcttgagaaagagaagttgactggaataaacttcatggattggtatcgcaacctgagaactgttctcaggcaagagcacaaagagtttgtgcttacagagccttttccagctaacttgcccaacaatgctcctgctgctcaacgtagggagcatgaaaagcgatgcaatgattatcttgatacaagctatctcatgcttgctactatgtcccctgagcttcaaaggaaatatgatgcattggatgctcatacgataatcacgagactacgtaacatgtttgaggaccaagcaagagctgagaggtttaatacctcaaagtccttggttgcgtgcaggctagcagaaggtaatccaatgagcccacatgtgatcaaaatgattggttacgccgagagtctggataagcttggttttccccttagccgagagttggttactgatttgattctccagtcgctacctcccagctttgagccgttcataatgaatttcaatatgaacaacctgaacaggaccttggcagaattgcatgggatgctaaagactgctgaggaaagcattaagaaaaactccaaccatgtgatagttgtgcataagcgcaagcccaacaacaagaaaagttgtcaaaagagaaagctaaactctgatgagatcacgagtactagcaactctaagaccaaggttcaaaagacagggcccgctaaggatgcagagtgcttcttttgcaaggagacaggtcattggaagagaaactgtaagaaatacctagagcagttcaagcagaagcagcaggatggaaagagttccacctcagtctataacattaatgcaaaaaggcaacgtcctaatgatttgaatcccacttttatttggcattgtcgcttgggtcatataaatgagaaacgcatggagaagcttcatagagatggacttctacactcttttgattttaaatcatttgagacatgcgaatcttgtttacttggcaaaatgacaaaggcacctttcacgggtcaaagtgaaagggcaagtgaactattgggactagtacatactgatgtatgtggaccaatgagctcaactgccaaaggtggttttgggtactttattacctttaccgctgactttagtagatatggttatgtctacttaatgaggcataagtctgagtactttgaaaagttcaaggaatttcagaatgaggtacaaaatcatttgggcaagacaatcaagtatctacgatttgatcgtggtggaaagtacttgagcctagaatttggcaatcatctaaaggaatgtgcaattgttccacaactcactccgccaggaacgcctcagtggaatggggtgtctgaacggaggaatcgtacattgttggacatggtacgatcaatgatgagccaaactgatctgccgctaagcttttggggttacgctctagagacagttgcgttcacactaaacagggttccatcaaaatcagtggataagacaccatatgagatatggactgggaagcgtcccagtttgtctttcctaaagatttggggctgtgtggtctatgtaaaacgtttgcaatcagacaaactcacacctaaatcagataaatgcttctttgtgggatatcctaaggaaacgaaaggatattatttttataatcgggaagagggcaaa

SEQ ID NO: 14468 - DNA, 3552 bp, Oryza sativa
  Clone ID: TFbOSC28818j.C1.o1.fg
atggagatccaatatgagcatacttcgtatagggatccaaataggagtcttacgggccttggaggcccgagtgatggatcctatatattcgtgaggggtgtgaccggtggaggcattgcatcaccgcgtcgagtggtaacgatatatgatctaatacttgcttggttcctggtttatgcgatagaaatgtttgatttatgctatcgtagcttacgcttatcccaacagtggatagatgtcggacatctatgtgcggagattattggtttacttgacaagatcatggcagctcctgcatcatccaattttaacttgcggtctattcttgagaaagagaagttgactggaataaacttcatggattggtatcgcaacctgagaactgttctcaggcaagagcacaaagagtttgtgcttacagagcctttacaagctaacttgcccaacaatgctcctgctgctcaacgtagggagcatgaaaagcgatgcaatgattatcttgatacaagctatctcatgcttgctactatgtcccctgagcttcaaagaaaatatgatgcattggatgctcatacgataatcacgagactacgtaacatgtttgaggaccaagcaagagctgagaggtttaatacctcaaagtccttggttgcgtgcaggctagcagaaggtaatccaatgagcccacatgtgatcaaaatgattggttacgccgagagtctggataagcttggttttccccttagccgagagttggttactgatttgattctccagtcgctacctcccagctttgagccgttcataatgaatttcaatatgaacaacctgaacaggaccttggcagaattgcatgggatgctaaagactgctgaggaaagcattaagaaaaactccaaccatgtgatagttgtgcataagcgcaagcccaacaacaagaaaagttgtcaaaagagaaagctaaactctgatgagatcacgagtactagcaactctaagaccaaggttcaaaagacagggcccgctaaggatgcagagtgcttcttttgcaaggagacaggtcattggaagagaaactgtaagaaatacctagagcagttcaagcagaagcagcaggatggaaagagttccacctcagtctataacattaatgcaaaaaggcaacgtcctaatgatttgaatcccacttttatttggcattgtcgcttgggtcatataaatgagaaacgcatgcagaagcttcatagagatggacttctacactcttttgattttaaatcatttgagacatgcgaatcttgtttacttggcaaaatgacaaaggcacctttcacgggtcaaagtgaaagggcaagtgaactattgggactagtacatactgatgtatgtggaccaatgagctcaactgccaaaggtggttttgggtactttattaccttcaccgctgactttagtagatatggttatgtctacttaatgaggcataagtttgagtactttgaaaagttcaaggaatttcagaatgaggtacaaaatcatttgggcaagacaatcaagtatctacgatttgatcgtggtggaaagtacttgagcctagaatttggggatcatctaaaggaatgtgcaattgttccacaactcactccgccaggaacgcctcagtggaatggggtgtctgaacgaaggaatcgtacattgttggacatggtacgatcaatgatgagccaaactgatctgccgctaagcttttggggttacgctctagagacagttgcgttcacactaaacagggttccatcaaaatcagtggataagacaccatatgagatatggactggaaagcgtcccagtttgtctttcttaaagatttggggctgtgtggtctatgtaaaacgtttgcaatcagacaaactcacacctaaatcagataaatgcttctttgtgggatatcctaaggaaacgaaaggatattatttttataatcgggaagagggcaaagtgtttgtcgcccgacacggtgttttcttggaaaaagagtttatttcaagacaggatagtgggagcatggtgcaacttgaagaaattcaagaaacaccggaaaacgcttcaacgtccacacaaccacaagctgagcaagatgttgttcaacaggttgaacaagttgttgttgaaccagttgtggaagcaccggcttcacgaagatccgataggatacgacgtacacctgcgagtttggaactattggttgatccacctaatggtgtaaaagccattgagtgcaaatgggtctttaagaaaaagacagatgtagatggaaattttaacatctacaaggcacgattggtggcgaaaggtttcagacaaattcaaggtgttgattatgatgaaactttctcaccagtcgccatgctaaaatctattcggattgttttagcgattgctgcctatttcgattatgagatatggcaaatggatatcaaaatagctatccacaatggaaatctcgatgaggatgtgtacatgacacaacccaagggatttgttgatccacaatcagctaaaaagatatgcaaattgcagaaatccatttatgggttgaagcaagcatctcggagttggaatattcgtcttgacaaagtagtcaaggcgttgggctttgtcaaaaacgaagaagaggcttgtgtatacaagaagattagtgggagcgcactggtgtttctaatcctatatgtagatgacatattattgattgggaacgatattcttatgcttgaatccgttaagacatcgttgaaaaatagtttttcaatgaaggacttaggggaagcaacatatattctgggcataaggatctatagagatagatcaaagaggctaattggattaagccagagtacatacattgaaagattcatcatgtatgctatgctatgtacacgtccagatgtttcatattcacttagtgcaacaagccgataccaatcagatccatgtgagagtcactggatagctgtaaagaatatcctgaagtacttgagaagaactaaggatatgttcctagtcaatggaggacaggaagagctcgttgtaaatggttacaccgacgcaagcttccaaactgacaaagatgattttagatcacagtctggatttgtgttctgcctgaatggaggcgctgtgagttggaagagttccaagcaagatacagtgtctaattatacaacagaagccgaatacattgcctcttctgaagcagcaaaggaggctgtttggataaagaaattcatttctcgactaggtgtggtgactagtgcttctagcccaatggacctctattgcgataatagtggtgccattgcgcaagccaaggagcctagatcgcatcaaaagtccaaacacattttacggcggtatcacctcattcgcgagatagtgggtagaggagatgtgaagatatgcaaaatacatacggatttgaatgttgcagatccgttgacaaagccactccctcagcctaagcatgaggcacacactagggcaatgggtatatga

SEQ ID NO: 14469 - DNA, 1707 bp, Oryza sativa
  Clone ID: TFbOSC2957j.C1.o1.fg
atggagatccaatatgagcatacttcgtatagggatccaaataggagtcttacgggccttggaggcccgagtgatggatcctatatattcgtgaggggtgtgaccggtggaggcattgcatcaccgcgtcgagtggtaacgatatatgatctaatacttgcttggttcctggtttatgcgatagaaatgtttgatttatgctatcgtagcttacgcttatcccaacagtggatagatgtcggacatctatgtgcggagattattggtttacttgacaagatcatggcagctcctgcatcatccaattttaacttgcggtctattcttgagaaagagaagttgactggaataaacttcatggattggtatcgcaacctgagaactgttctcaggcaagagcacaaagagtttgtgcttacagagccttttccagctaacttgcccaacaatgctcctgctgctcaacgtagggagcatgaaaagcgatgcaatgattatcttgatacaagctatctcatgcttgctactatgtcccctgagcttcaaaggaaatatgatgcattggatgctcatacgataatcacgagactacgtaacatgtttgaggaccaagcaagagctgagaggtttaatacctcaaagtccttggttgcgtgcaggctagcagaaggtaatccaatgagcccacatgtgatcaaaatgattggttacgccgagagtctggataagcttggttttccccttagccgagagttggttactgatttgattctccagtcgctacctcccagctttgagccgttcataatgaatttcaatatgaacaacctgaacaggaccttggcagaattgcatgggatgctaaagactgctgaggaaagcattaagaaaaactccaaccatgtgatagttgtgcataagcgcaagcccaacaacaagaaaagttgtcaaaagagaaagctaaactctgatgagatcacgagtactagcaactctaagaccaaggttcaaaagacagggcccgctaaggatgcagagtgcttcttttgcaaggagacaggtcattggaagagaaactgtaagaaatacctagagcagttcaagcagaagcagcaggatggaaagagttccacctcagtctataacattaatgcaaaaaggcaacgtcctaatgatttgaatcccacttttatttggcattgtcgcttgggtcatataaatgagaaacgcatggagaagcttcatagagatggacttctacactcttttgattttaaatcatttgagacatgcgaatcttgtttacttggcaaaatgacaaaggcacctttcacgggtcaaagtgaaagggcaagtgaactattgggactagtacatactgatgtatgtggaccaatgagctcaactgccaaaggtggttttgggtactttattacctttaccgctgactttagtagatatggttatgtctacttaatgaggcataagtctgagtactttgaaaagttcaaggaatttcagaatgaggtacaaaatcatttgggcaagacaatcaagtatctacgatttgatcgtggtggaaagtacttgagcctagaatttggcaatcatctaaaggaatgtgcaattgttccacaactcactccgccaggaacgcctcagtggaatggggtgtctgaacggaggaatcgtacattgttggacatg

SEQ ID NO: 14470 - DNA, 1008 bp, Oryza sativa
  Clone ID: TFbOSC33768j.C1.o1.fg
atggtcttcctcgtatggttgaagatgatggatgatactctgacaactggaagcatcaggagtacagagggggaaaagagacgtttagcagaggcttcacttgcctacaactgtgagaggatagatgtcggacatctatatgcggagattattggtttacttgacaagatcatggcagctcctgcaccatacaattttatcttgcagtctattcttgagaaagagaagttgactggaacaaacttcatggattggtattgcaacctgagaattgttctcaggcaagagcacaaagagtttatgcttacacaaccttttccagctgacttgcccaacaatgctcctgttgctcaacgtagggagcatgaaaggcgatgcaatgaataccttgatataagctgtctcatgcttgctactatgtcccctgagcttcaaaggcaatatgaggcattggatgctcatatgataatcacgggactacgtaacatgtttgaggaccaagcaagagctgagtggtttaatacctcaaagtccttgtttgcgtgcaggcttgtagaagaattgcatgggatgctaaagactgtcgaggaaagcattaagaaaaactccaaccatgtgatggttatgcataagcgcaagcccaacaacaagaagagtggtcaaaagagaaagctaaactctgatgagatcacgagtacaagcagctctaagaccaaggttcaaaagacagggcccgctaaggatgcagagtgcttcttttgcaaggagacaggtcattggaagagaaactgtaagaaatacctacagcagctcaagcagaagcagcaggatggaaagagttccacctcaggtattaatgttatagaaattaatcttgctacttcctttactgattcttgggtatttgataccgggtcagttgctcacatatgcaaatcgttgcaagggctgaaaagaagtaggagcttagtgtcacaccctgaagttcctttcccaagcctaaattga

SEQ ID NO: 14471 - DNA, 2643 bp, Oryza sativa
  Clone ID: TFbOSC400763j.C1.o50.fg
atggcgacggtgacgtcgggcgacggcatcgggcaaagcagcgtcggcagcaggcagcgggcgtcggcgatgggagcaggtggcgggcatcgattatggaagtgcatggccatgccaaaggtgattgaggagtcaatcacaagttatataatctatcaacagaagttgactgaaacaaacttcatggattggtatcgcaaccttagaattgttctcagtcaagagcacaaagagtttgtgcttagagagccttttccagctaacttgcccaacaatgcttctgctgctcaacaaagggagcatgaaaagcgatgcaatgattatcttgatataagctgtctcatgcttgctactatgtcccctgaacttcaaaggcaatatgaggcattggatgctcatacgataatcacgggactacgtaacatgtttgaggaccaagcaagagctgagaggtttaatacctcaaagtccttgtttgcgtgcaggcttgcagaagataaatgtgggcaaaagtctgccgcaaagacttatagtatcttagagtttgtgagagataatggtcgtgttcggatcaaatcaactggcacgctaatacatccgaaggcgaggaccttggcagaattgcatgggatgctaaagactgccgaggaaagcattaagaaaaactccaaccatgtgatggttatgcataagcgcaagcccaacaacaagaagagtggtcaaaagagaaagctaaactctgatgagatcacgagtactagcaactttaagaccaaggttcaaaagacagggcccgctaaggatgcggagtgcttcttttgcaaggagacagggcattggaagagaaactgtaagaaatacctagagcagctcaagcagaagcagcaggatggaaagagttccacctcaggtattaatgttatagaaattaatcttgctacttcctctactgattcttgggtatttgataccgggtcagttgctcacatatgcaaatcgttgcaggggctgaaaagaagtaggagcttagcaagagacgaagtggatattcgcgtgggcaatggaccaagagttgctgctgttacgatatggtatgtctacttaatgaggcataagtctgagtcctttgaaaagttcaaggaatttcagaatgaggtacaaaatcatttgggcaagacaatcaagtatctacgatctgatcgtggtggagagtacttgagcctagaatttggcaatcatctaaaggaatatggaattgttccacaactcactccgccaggaacgcctcagtggaatggggtgtctgaacggaggaatcgtacattgttggacatggtgcgatcaatgatgagccaaactgatctgccactaagcttttggggttacgctctagagacagctgcattcacactaaacagggttccatcaaaatcagtagataagacaccatatgagatatggactgggaagcgtcccagtttgtctttcctaaagatttggggttgtgagttgtggaagcaccggcttcacgaaggtccaataggatatggcatacacctgcgagcgattgctgcctatttcgattatgagatatggcaaatggatgtcaaaacagctttcctcaatggaaatctcgatgaggatgtgtacatgacacaacccaagggatttgttgatccacaatcagctaaaaagatatgcaaattgcagaaatccatttatgggttgaagcaagcatctcggagttggaatattcgttttgacaaagtagtcaaggcgttgggctttgtcaaaaatgaagaggagtcttgtgtatacaagaagattagtgggagcgcactggtgttgaagaggttcaacatgcaagattctaagaaaggtttcttaccaatgtcacatggcattaatcttggcaagaatcagtgtcctcaaacgactgatgagcgaaacaagatgagtgtgattccatatgcctcggcaatcggatccatcatgtatgctatgctatgtacacgtctagatgtttcatatgcacttagtgcaacaagccgataccaatcagatccaggtgagagtcactggatagctgtaaagaatatcctaaagtacttgagaagaactaaggatatgttcctagtctatgcaggacaggaagagctcgttgtaaatggttacactgacgcaagcttccaaaccgacaaagatgattttagatcgcagtctggatttgtgttctgcctaaatggaggcgctgtgagttggaagagttccaagcaagatacagtggctgattctacaacagaagccgaatatattgccgcttctgaagcagcaaaggaggctgtttggataaagaaattcgtttctcaactaggtgtgatgactagtgcttctagccctatggacctctattgcaataatagtggtgccattgcacaagccaaggagcctagatcgcatcaaaagtccaaacacattttacggcggtatcacctcattcgcgagatagtgggtagaggagatgtgaagatatgcaaaatacatacagatttgaatgttgcagatccgttgacaaagccactccctcagcctaagcatgaggcacacactagggcaatgggtataagatacattcatgattga

SEQ ID NO: 14472 - DNA, 1980 bp, Oryza sativa
  Clone ID: TFbOSC400770j.C1.o42.fg
atggcacctcctgtaccatccaattttaacttgcggtctatttttgagaaagagaagttgactggaacaaacttcatggattggtatcgcaacctgagaattgttctcaggcaagagcacaaagagtttgtacttacacagccttttccagctgacttacccaacaatgctcctgctgctcaacgtagggagcatgaaaggcgatgcaatgaataccttgatataagctgtctcatgcttgctactatgtcccctgagcttcaaaggcaatatgaggcattggatgcccatacgataatcacgggactacgtaacatgtttgaggaccaagcaagagctgagaggtttgcagaaggtaatccagtgagcccacatgtgatcaaaatgattggttacaccgagagtctggataagcttggttttccctttagccgagagttggctactgatttaattctccagtcgctccctcccagctttgagctgttcataatgaatgtcaacatgaataacctgaacaggaccttgacagaattgcatgggatgttaaagactgccgaggaaagcattaagaaaaactccaaccatgtgatggttatgcataagcgcaagcccaacaacaagaagagttgtcaaaaaagaaagctaaactctgatgagatcacgagtactagcaactctaagaccaaggttcaaaagacagggcccgctaaggatgcagagtgcttcttttgcaaggagacaggtcattggaagagaaactgtaagaaatacctagagcagctcaagcagaagcagcaggatggaaagagttccatcttaggtattaatgttatagaaattagtcttgctacttactctactgattcttgggtatttgataccggatatggttatgtctacttaatgaggcataagtctgagtcctttgaaaagttcaaggaatttcagaatgaggtacaaaattatttgggcaagacaatcaagtatctacgatctgatcgtggtggagagtacttgagccttgaatttggcaatcatctaaaggagtgtggaattatttcacaactcactccgccaggaacgcctcagtggaatggagtgtctgaacggagtaatcgtacattgttgaacatgttgtggaagcactggcttcacgaaggtccgaaaggatacggcgtacacctgcgagacaaagttgaacctactacctatgacgaagcaatggtgggaccagactctgagaaatggcttgaagccatgaaatccgaaatagaatccatgcatgtcaatcaagtttggaacttggttaatccacctgatggtgtaaaagccattgagtgcaaatgggtctttaagaaaaagacagatgtagatggaaatgttcacatttacaagacacgattggtggtgaaaggtttcagacaaattcaagatgtttcatatgcacttagtgcaacaagccgataccaatcagatccaggtgaaagtcactggatagctgtaaagaatatcctgaaatacttgagaagaactaatgatacgttcctagtctatggaggagaggaagagctcgttgtaaatggcgctatgagttggaagagttctaagcaagatacagtggctgattctacaagagaagccgaatacattgtcgcttctgaagcagcaaaggaggctgtttggataaagaaatttgtttctcaactaggtgtgatgactagtgcttctggccctatggacctctattgcgataatagtggtgccattgtgcaaaccaaggagcctagatcgcatcaaaagtccaaacacattttacaacggtatcacctcattcgtgagatagtaggtagaggagatgtgaagatatgcaaaatacatacggatttgaatgtcgcagatcagttgacaaagccactacctcagccaaagcatgaggcacacactagggcaatgggaataagatacattcatgattga

SEQ ID NO: 14473 - DNA, 3968 bp, Oryza sativa
  Clone ID: TFbOSC400770j.C1.o70.np
atcatggcagctcctgtaccatccaattttaacttgcggtctattcttgagaaagagaagttgaatggaacaaactttatggattggtatcgcaacctaagaattgttctcaggcaagagcacaaatagtttgtgcttgcacagccttttccagctgacttgcccaacaatgctcctgctgctcagcgtagggagcatgaaaagcgatgcaatgattattttgatataagctgtctcatgcttgctactatatcccctgagcttcgaaggcaatatgagacattggatgctcatacgataatcacgggactacataacatgtttgaggaccaagcaagagctgagaggtttaatacctcaaattccatgtttgtgtgcaggcttgcagaaggtaatccagtgagcccacatgtgatcaaaaatgattggttacaccgagagtctggaaaaacttggttttccccttagccgagagttggctactggtttgattctccagtcgcttcctcctagctttgagccattcatcttgaatttcaacatggacaacctgaataggaccttggccgaattgcatgggatgctaaagactgcagatgaaagcattaagaaaaactcaaccatgtgatggttatgcataagcgcaaacccaataacaagaagagtggtcaaaagagaaagctaaactctgatgagatcacgagtactagcaactctaaggtcaaggttcaaaagatagggcccgctgaggatgcagagtgtttcttttgcaaggaaacaggtcattggaagagaaattgtaagaaataccttgagcagctagcagatctcgcattccaaggtttatcaacacctatcaacaactactctcggcgcctcgctaccctctttcctgaggtttttacttatcatccggcggaatttggcacctgacgcggggctgcatcggtttagttcgatctccggcgaaggggtaagtcctacgttccgccggccctggtgaatctattggctacgttggtgttgttcaagccttcaaggctgcatcgcttcgatctcttggatcgctctggtttggttggtatatttgcctacctgatatctcaattctatctctaattgcattgtgtttagagacgcatcggtttagttggaactatctcggttaggtccgatcttctgtcttagctgatatatctctacaatcacaatgttgttcttaatagcttatacattgtgaatcttgatggatgttcagtctataacattaatgcgaaaagacaacgtcctaatgatttgaatcccacttttatttggcattgtcacttgagtcatataaaagagaaacgcatggagaagcttcataaagatgaagatggatttctatactcttttgattttgaatcatttgagacatgtgaatcgtgtttacttgacaaaacgacaaaggcacctttcacggatcaaagtgaaagggcaagtgaactattggcactagtacatactgatgtatgtggaccaatgagtcaactaccagaggtggttttgggtactttattacctttaccgattactttagtagatatggttatgtctacttaatgaggcataagtctgagtcctttgaaaagttcaaggaatttcataatgaggtacaaaatcatttggtcaagacaatcaagtatctacgatctgatcgtggtggagagtacttgagccttgaatttggcaatcatctaaaggagtgtggaattgttccacaactcactccgctaggaacgcctcaatggaatgggttgtctgaacggaggaatcgtatgttgttggacatggtgcgatcaatgatgagccaaactgatctcccgctaagcttttggggttacgctttagagacagctgcgttcacactaaacaggattccatcaaaatcagtggataagacaccatattagatatggacagggaagcgtcctagtttgtctttcctaaagatttggggctgtgaggcctatgtaaaacgtttgcaatcggacaaactcacacctaaatcagataaatgcctctttgtggggtatcctaaggaaacgaaaggatattatttttataatcgggaagaaggcaaagtgtttgtcgcccgacacggtgttttcttggaaaaagagtttatttcaagaaaggatagtgggagcatggtgcgacttgaagaaattcaggaaacaccggaaaacgcttcaacgtccacacaaccacaacaaggtgagcaagatgttggtcaacaggttgaacaagtggttgttcaaccagctgtggaagcaccggcttcacgaagatccgaaaggaaacggcgtacacctgcaacgtatgcgttgttaactacaagacaacgtgatatattgttgttagacaacgatgaacctactacctatgaggaagcaatggtgggaccagactctgagaaatggcttggagccatgaaatccgaaatagaatccatgcatgtcaatcaagtttgcaaattggttgatccacctgatggtgtaaaagccattgagtgtaaatgggtctttaagaaaaagacagatgtagatagaaatgttcacatctataaggcacgattggtggtgaaaggtttcagacaaattcaaggtgttgattatgatgaaactttctcgccagtcaccatgctaaaatctgttcggattgttttagcgattgatgcctatttcgattatgagatatggcaaatggatgtcaaaacagctttcctcaatggaaatctctatgaggatgtgtacatgacacaacccaagggatttgttgatccacaatcagctaaaaagatatgcgagttgcagaaatccatttatgggttgaagcaagtatctcggagctggaatattcgttttgacgaagtagtcaaggcattgggctttgtcaaaaacgaagaagagccttgtgtatacaagaagattagtgggagcgcactggtgtttctaatattatatgtagatgacatattgctgattgggaatgatattcctatgcttgaatccgtcaagacatcgttgaaaaatagtttttcaatgaaggacttaggggaagcagcatatattctgggcataaggatctatagagatacatcaaagaggctaattggattaagccagagtacgtacattgacaaggtgttgaagaggttcaacatgcaagattctaagaaaggtttcttaccgatgtcacatggcattaatcttggcaagaatcagtgtcctcaaacaagatgagtgtgattccatacgcttcggcaattggatccatcatatatgccatgttatgtacacgtccagatgtttcatatgcacttagtgcaacaagccgataccaatcagctctaggtgagagtcactggatagctataaagaatatcctgaagtacttgagaagaactaaggatatgttcctagtctatggaggacaggaagagctcgttgtaaatggttacactgatgcaagcttccaaaccgaccaaagatgattttagatcgtaatctggatttgtgttatgcctgaatggtggcgttgtgagttggaagagttccaagcaagatacagtcgctgattctacaacataagccgaatacattgcctcttctgaagtagcaaaggaggctgtttggataaagaaatttgtttctcaattgggtgtgatgactagtgcttccagccctatggacctctattgcgataatagtggtgccattgcgcaagccaaggagcctagatcgcatcaaaagtccaaacacattttacggcggtatcacctcatacgcgagatagtgggtagaggatttgtgaagatatgcaaaatacatacagatttgaatgttgcagatccgttgacaaagccactccctcagcctaagcatgaggcacacaatagggcaatgggtataagatacgtgcatgat

SEQ ID NO: 14474 - DNA, 2991 bp, Oryza sativa
  Clone ID: TFbOSC401355j.C1.o12.fg
atggtcaccgccggcgaccaccggcgcggcggagcggcacccgagagagcggagggaagggggaaggcgaaagggcggtcttcggctcaccccgggtcgacggcgacgacgggaacggcggccgaagcggaggaaggcggcggcgcgattcgggacggcgagggcgacggtgctccggcggtcggcgagcgaatcggaggagcggacggggtcgacgacgacgcggcgaagccgaaggaggtgacgccgagtggggaggaggtccggagcgacgacggcggcgaaccggagctcggcggcgacggcggagagaaggtgcgacggatagatgtcggacatctatatgcggagattattggtttacttgacaagattatggcagctcatgcaccatccaattttaacttgcggtctattcttgagaaagagaagttgactggaacaaacttcatggattggtatcgcaacctgagaattgttctcaggcaagagcacaaagagtttctgcttatacagccttttccagctgacttgcccaacaatgctcctgctgctcaacgtaggaagcatgaaaggcgatgcaatgattaccttgatataagctgtctcatgcttgctactatgtcccctgagcttcaaagccaatatgaggcattggatgctcatacgataatcacgggactacgtaacatgtttgaggaccaagcaagagctgagaggtttaatacctcaaagttcttgtttgcgtacaggcttgcacaaggtaatccagtgagcccacatgtgatcaaaatgattggttacaccgagagtctggataagcttggttttccccttagccgagagttggctactgatttgattctccagtcgctccctcccagctttgagccgttcattatgaatttcaacatgaacaacctgaacaggaccttggcagaattgcatgggatgctaaagactgccgaggaaagcattaagaaaaactccaactatgtgatggttatgcataagctcaagcccaacaacaagaagagtggtcaaaagagaaagctaaactctgatgagatcacgagtactagcaactgtaagaccaaggttcaaaagacagggcccgctaaggatgcagagtgcttcttttgcaaggagacaggtcattggaagagaaactgtaagaaatacctagagcagctcaagcagaagcagcaggatggaaagagttccacctcagctttgtgtaagaacgttatctctgcttcttgtttgcaagcagagggttatggttttagatctgtggacaatggttgttcagtctattataatgacattttctatttccatgcacccatgatgaatggcttatacattgtgaatcttgatggatgttcagtctataacattaatgcaaaaagacaacgtcctaatgatttgaatcccacttttatttggcattgtcgcttgggtcatataaatgagaaacgcatggagaagcttcatagagatggacttctacactcatttgattttgaatcatttgagacatgtgaatcttgtttacttggcaaaatgacaaaggcacctttcacgggtcaaagtgaaagggcaagtgaactattggcactagtacatactgatgtatgtggaccaatgagctcaactgccagaagtggttttgggtactttattacctttaccgatgactttagtagatatggttatgtctacttaatgaggcataagtctgagtcctttgaaaagttcaaggaatttcagaatgaggtacaaaatcatttgggcaagacaatcaagtatctacgatctgatcatggtggagagtacctgagacttgaatttgagtttatttcaagaaaggatagtgggagcatggtgcgacttgaagaaattcatgaaacaccagaaaacgcttcaacgtccacacaaccacaacaagctgagcaagatgttgttcaacaggttgaacaagttgttgttgaaccagttgtggaagcaccggcttcacgaaggtccgaaaggatacggcgtacacctgcgaggtatgcattgttaactacaggacaacgtgatatattgttgttagacaacgatgaacctactacctatgaggaagcaatgaaatccattcatgggttgaagcaagcatctcggagttggaatattcgttttgatgaagtagtcaaggtgttaggctttttcaaaaacgaacaagagccttgtgtatacaagaagattagtggaagcgcactggtgtttctaatcctatatgtagatgacatattattgattgggaatgatattcctattcttgaatccgttaagacattgttgaaaaatagtttttcaatgaaagacttaggggaagcagcatatattctgggcataaggatctatagagatagatcaaagaggctaattggattaagccagagtacatacattgacaaggtgttgaagaggttcaacatgcaagattctaagaaaggtttcttaccgatgtcacatgacattaatcttggcaagaatcagtgtcctcaaacgactgatgagcgaaacaagatgagtgtgattccatatgcctcggcaatcggatccatcatgtatgctatgctatgtacatgtccagatgtttcatatgcacttagtgcaacaaaccgataccaatcagatccaggtgagagtcactggatagctgtaaagaatatcttgaagtacttgagaagaactgaggatatgttcctagtctatggaggacaggaagagctcgttgtaaatggttacactgatgcaagcttccaaaccgacaaagatgattttagatcgcggtctggatttgtgttctgcctcaatggaggcgttgtgagttggaagagttccaagcaagatacagtggctgattctacaacagaagccgaatatattgccgcctctgaagcagcaaaggatgctgtttggataaagaaatttgtttcttaa

SEQ ID NO: 14475 - DNA, 4164 bp, Oryza sativa
  Clone ID: TFbOSC401416j.C1.o1.fg
atggagatccaatatgagcttacttcggatagggatccgaataggagtcctatgggccttggaggcccgagtgatggatcctatatattcgtgaggggtgtgaccggcggaggcattgcatcactactcactaaggctgagcgcgattgtgttcatcggatagtcagatgtccactggaaccgcacgccaatgagaaaaacgagccaatgagattgactcggtttcggcttaattcaattacgccgttaaggatagatgtcggacatctatatgcggagattattggtttacttgacaagatcatggcagctcctgcaccatccaaatttatcttgcggtctattcttgagaaagagaagttgactggaacaaacttcatggattggtatcgcaacctgagaattgttcttaggcaagagcacaaagagtttgtgcatacacagccttttccagctgacttgccaaacaatgctcctgctgctcaacgtagggagcatgaaaggcgatgcaatgaataccttgatataagctgtctcatgcttcctactatgtcccctgagcttcaaaggaaatatgaggcattggatgctcatatgataatcacgggactacgtaacatgtttgaggaccaagcaagagctgagaggtttaatacctcaaagtccttgtttgcgtgcaggcttgcagaaggtaatccagtgagcccacatgtgatcaaaatgattggttacaccgagagtctgcataagcttggctttccccttagccgagagttggctactgatttgattctccagtcgcttcctcccagctttgagccgttcataatgaattccaacatgaataacctgaacaggaccttgccagaattgcatgggatgctaaagactgccgagaaaagcattaagaaaaactccaaccatgtgatggttatgcataagcgcaagcccaacaacaagaaaagtggtcaaaagagaaagctaaactctgatgagatcacgagtactagcaactctaagaccaaggttcaaaagacagggcccgctaaggatgcagagtgcttcttttgcaaggagacgggtcattggaagagaaactgtaagaaatacctagagcagctcaagcagaagcagcaagatggaaagagttccacctcaggtattaatgttatagaaattaatcttgctacttcctctactgattcttgggtatttgataccgggtcagttgctcacatatgcaaatcgttgcaggggctgaaaagaagtaggagcttagcaagaggcaaagtggacattcgcgtgggcaatggagcaagagttgctgctgttgcggtcggcactatgccattatctttaccgtcaggattagttttggagttaaataattgttattgcattccagctttgtgtaagaacgttatctctgcttcttgttggcaagcagagggttatgattttagatctgtggacaatggttgttcagtctattataatgacattttctattgccatgcacccatgatgaatggcttatacattgtgaatcttgatggttgtttagtctataacattaatgcaaaaaggcaacgtcctaatgatttgaatcccacttttatttggcattgtcgcttgggtcatataaatgagaaacgcatggagaagcttcatagagatggacttctacactcgtttgattttgaatcatttgagacatgtgaatcttgtttacttagcaaaatgacgaaggcacctttcacgggtcaaagtgaaagggcaagtgaactattgggactagtacatactgatgtatgtggaccaatgagctcaactgccagaggtggttttgggtactttattacctttaccgatgactttagtagatatggttatgtctacttaatgaggcataagtctgagtcctttgaaaagttcaaggaatttcaaaatgaggtacaaaatcatttggacaagacaatcaagtatgtacgatctgatcgtggtggagagtacttgagccttgaatttggcaatcatctaaaggagtgtggaattgttctacaactcactccgccaggaacgcctcggtggaatggggtgtctgaacggaggaatcgtacattgttggacatggtgcgatcaatgatgagccaaactgacctgccgctaagcttttgggattacgctctagagacagctgcgttcacactaaacagggttccatcaaaatcagtggataagacaccatatgagatatggactgggaagcgtcccagtttttctttcctaaagatttggggctgtgagttctatgtaaaacgtttgcaatcggacaaactcacacctaaatcagataaatgcttctttgtggggtatcctaaggaaatgaaaggatattatttttataaccgggatgagagcaaagtgtttgtcgcccgacacagtgttttcttggaaaaagagtttatttcaagaaaggatagtgggaccatggtgcaacttgaagaaattcaggaaacaacggaaaacgcttcaacgtccacacaaccacaagctaagcaagatgttgttcaacaggttgaacaagttgttgttgaactagttgtggaagcaccggcttcacgaaggtccgaaaggatatggtgtacaactgcgaggtatgcgttgttaactacaggacaacgtgatatattgttgttagacaacgatgaacctactacctatgagaaagcaatggtgggaccagactctgagaaatggcttggagccatgaaatccgaaatagaatacatgcatgtcaatcaagtttggaacttggttgatccacctgatggtgtaaaagccattgagtgcaaatgggtctttaagaaaaagacagatgtagatggaaatgttcacatctacaaggcacgattggtggcgaaaggtttcagacaaattcaaggtgttgattatgatgaaactttctcgccagtcgccatgctaaaatctattcgaattgttttagcaattgctgcctatttcgattataagatatggcaaatggatgtcaaaacagctttcctcaatggaaatctcgatgaggatgtgtacatgacacaacccaagggttttgttgatccacaatcagctaaaaagatatgcaaattgcagaaatccatttatgggttgaagcaagcatctcggagttggaatattcgttttgacgaagtagtcaaggcgttgggctttgtcaaaaacaaagaagagccttgtgtatacaagaagattagtgggagcgcactggtgtttctaatcctatatgtagatgacatattattgattgggaacgatattcctatgcttgaatccgttaagacatcgttgaaaaatagtttttcaatgaaggacttaggggaaacagcatatattctgggcataaggatctatagagatacatcaaagaggctaattggattaagccagagtacatacattgacaagaatcagtgtcctcaaacgactgatgagcgaaacaagatgagtgtgattccatatgcctcggcaatcggatccatcattgcaacaagccgataccaatcagatccaggtgagagtcgctggatagctgtaaagaatatcctggagtacttgagaagaagtaaggatatgttcctagtctatggaggacaggaagagcgcgttgtaaatggttacaccgacgcaagcttccaaaccgacaaagatgattttagatcgcagtctggatttgtgttctgcctgaatggaggcgctgtgagttggaagagttccaagcaagatatagtggttgattctacaacagaagccgaatacattgccgcttctgaagcagcaaagaaggctgtttggataaagaaattcgtttctcaactaggtgtgatgactagtgcttctagccctatggacctctattgcgataatagtagtgccattgcgcaagccaaggagcctagatcgcatcaaaagtccaaacacattttacggcggtatcacctcattcgcgagatagtggatagaggagatgtgaagatatgcaaaatacatacggatttgaatgttgcagatccgttgacaaaaccactccctcagcctaagcatgaggcacacactagggcaatgggtataagatacgttcatgattga

SEQ ID NO: 14476 - DNA, 986 bp, Oryza sativa
  Clone ID: TFbOSC401555j.C1.o4.gm
atgtcccctgagcttcaaaggcaatatgaggcattggatgctcatacgataatcacgggactacgtaacatgtttgaggaccaagcaagggctgagaggtttaatacctcaaagtccttgtttgcgtgcaggcttgcagaaggtaatccagtgagcccacatgtgatcaaaataattggttacaccgagagtctggataagcttggctttccccttagccaagagttggctactgatttgattctccagtcgctccctcccagttttgagccattcataatgaatttcaacatgaacaacctgaacaggaccttggcagaattgcatgggatgctaaagactgccgaggaaagcattaagaaaaactccaaccatgtgatggttatgcataagcgcaagcccaacaacaggaagagtggtcaaaagagaaagctaaactctgatgagatcacgagtacaagcaactctaagaccaaggttcaaaagacagtgcccgctaaggatgcagagtgtttcttttgcaaggagacaggtcattggaagagaaactgtaagaaatacctagagcagctcaagcagaagcagcaggatggaaagagttccacctcaggggctgaaaagaaatatggttatgtctacttgatgaggcataagtctgagtcctttgaaaagttcaaggaatttcaaaatgagatacaaaatcatttgggcaagacaatcaagtatctacgatctgatcgtggtggagagtacttgagccttgaatttggcaatcatctaaaggagtgtggaattgttccacaactcactccgccaggaacgcctcagtggaatggggtgtctgaacggaggaatcgtacattgttggacatggaaacaccagaaaacgctccaacgtccacacaaccacaagctgagcaagatgttgttcaacaggttgaacaagctgttgttgaaccagttgtggaagcaccggcttcacgaag

SEQ ID NO: 14477 - DNA, 3288 bp, Oryza sativa
  Clone ID: TFbOSC401834j.C1.o18.fg
atgccaaaggtgattgaggagtcaatcacaagttactatcaacagatcatggcagctcctgcaccatccaattttaacttgcggtctattcttgagaaagagaagttcactggaacaaacttcatggattggtatcgcaacctgagaattgttctcaggcaagagcacaaagagtttgtgcttacagagtcttttccagctaacttgcccaacaatgctcctgctgctcaacgtagggagcatgaaaagcgatgcaatgattatcttgatataagccgtctcattcttgctactatgtcccctgagcttcaaaggcaatatgaggcattggatgctcatacgataatcacgggactacgtaacatgtttgagggccaagcaagagctgagaggtttaatatctcaaagtccttgtttgcgtgcaggctagtagaaggtaatccagtgagcccacatgtgatcaaaatgattggttacaccgagagtctggataagcttggctttccccttagccgagagttggctactgatttgattctccaatcgctccctcctagctttgagccgttcataatgaatttcaacatgaacaacctgaatagggccttggtagaattgcctgggatgctaaagactgccgaggaaagcattaagaaaaactccaaccatgtgatggttatgcataagcgcaagcccaacaacaagaaaagtggtcaaaagagaaagctaaactctgatgagatcacgagtactagcaattctaagaccaaggttcaaaagacagggcccgctaaggatgcagagtgcttcttttgcaaggagacaggtcattggaagagaaactgtaagaaatacgtagagcagctcaagcagaagcagcaagatggaaagaattccacctcagagggttatggttttagatctgtggacaatggttgtccagtctattataatgacattttctacttccatgcacccatgatgaatggcttatacattgtgaatcttgatggatattcagtctatgacattaatgcaaaaaggcaacgtcctaatgatttgaatcccacttttatttggcattgttgcttgggtcatataaatgagaaacgcatggagaagcttcatagagatggacttctacactcttttgattttgaatcatttgagacatgcgaatcttgtttacttggcaaaatgacaaaggcacctttcacgggtcaaagtgaaagggcaagtgaactattgggactaatacatactgatgtatgtggaccaatgagctcaactgacagaggtggttttgggtactttattacctttatcgatgactttagtagatatggttatgtctacttaatgaggcataagtctgagtcttttgaaaagttcaaggaatttcagaatgaggtacaaaatcatttgggcaagacaatcaagtatctacgatctgatcgtggtggagagtacttgagcctagaatttggcaatcatctaaaggaatgtggaattgttccacaactcactccgccaggaatgcctcagtggaatggggtgtctgaacggaggaatcgtacattgttggacatggtgcgatcaatgatgagccaaactgatctgccgctaagcttttggggttacgctctagagacagctgcattcacactaagcagggttccatcaaaatcagtggataagacaccatatgagatatggactgggaagcgtcccagtttgtctttcctaaagatttggggctgtgaggtctatgtaaaacgtttgcaatcggacaaactcacacctaaatcagataaatgcttctttgtggggtatcctaaggaaacgaaaggatattatttttataatcaggaagagggcaaagtgtttgtcgcccgacacggtgttttcttggaaaaagagtttatttcaagaaaggatagtgggagcatgttgtggaagcaccggcttcatgaaggtccgataggatacggcgtacacctgcgagacaatgatgaacctactacctttgaggaagcaatggtgggaccagactctgagaaatggtttggagccatgaaatccgaaatagaatccatgcatgtcaatcaagtttggaacttggttgatccacctgatggtgtaaaagccattgagtgcaaatgggtctttaagaaaaagacagatgtagatggaaatgttcacatctacaaggcacggttggtggcgaaaggtttcatctacaaggcacggttggtggcgaaaggtttcagacaaattcaaggtgttgattatgatgaaactttctcgccagtcgccatgctaaaatctattcggattgttttagcgattgctgcctatttcgattatgagatatggcaaatggatgtcaaaacagctttccttaatggaaatcccgatgaggatgtgtacatgacacaacccaagggttttgttgatccacaatcagctaaaaagatatgcaaattgcagaaatccatttatgggttgaagcaagcatctcggagttggaatattcgttttgacgaagtactcaaggcgttgggctttgtcaaaaacgaagaagagccttgtgtatacaagaagattagtgggagcgcactggtatttctaatcctatatgtagatgacatattattgattgggaacgatattcctatgcttgaatccgttaagacatcattgaaaaacagtttttcaatgaaggacttaggggaagcagcatatattctgggcataaggatctatagagatagatcaaagaggctaattggattaagccagagtacatacattgacaaggtgttgaagaggttcaacatgcaagattctaagaaaggtttcttaccgatgtcacatggcattaatcttggcaagaatcagtgtcctcaaacgactgatgagcgaaacaagatgagtgtgattccatatgcctcggcaatcggatccatcatgtatgctatgctatgtacacgtccagatgtttcatatgcacttagtgcaacaagccaataccaattagatccaggtgagagtcactggatagttgtaaagaatatcctgaagtacttgagaagaactaaggatatgttcctagtctatggaggactggaagagctcgttgtaaatggttacactgacgcacgcttccaaaccgacaaagatgattttagatcgcagtctggatttatgttctgcctgaatggaggcgctgtgagttggaagagttccaaacaagatacagtggctgattctacaacagaagcctaa

SEQ ID NO: 14478 - DNA, 2039 bp, Oryza sativa
  Clone ID: TFbOSC417977j.C1.o3.fg
atggcgtacggcacgacgagctcggcgaaccggcggagctcccttaaagcatccatggagaaccaagaaattgcagagattgtagcagttgttgcgtgcgagcagggtgtgtttcgatcgatgcgtattgcgtcgtacgagcaagctgaagctggtgacgttggcgagcgaggcgccggcagagctggaccgagttccgccggaggaagctggtccggcgagacgcagcagcctcttcgcctccaccgccgccgccgtggctccgtcctctccgtctccgccgcgtcggacggcgagcagtggcttcctcccacgtccacggtttgcctcctccatgtcgatcttgggttgatgtttgcggcccaatcccaatggattagcccgacttggattgaaaacccagcccacattcggttaagcctggaatgggttgaatccaggcctaccacggcctttcaccctcaccccggcccaggaaaaagaataacatctacgctgttgcggcgactgcggagacggcggcgacggaacgctctctcctccggctgtccgtccccctccctcgtggggtcgcgcctccctccagaggcacggcccgacgacagaagcgggatggcgtatgcgaaggaccaagcaagagctgagaggtttaatacctcaaagtctttgtttgcgtgcaggcttggagaaggtaatccagtgagcccacatgtgatcaaaatgattggttacaccgagagtctggataagcttggttttccccttagccgagagttggctactgatttaattctccagtcgctccctcccagctttgagctgttcataatgaatttcaacatgaacaacctgaacaggaccttggcagaattgcatgggatgctaaagactgccgaggaaagcattaagaaaaactccaaccatgtgatggttatgcataagcgcaagcccaacaacaagaagagtggtcaaaagagaaagctaaactttgatgagatcacgagtactagcaactctaagaccaaggttcaaaagacagggcgcgctaaggatgcagagtgcttcttttgcaaggagacaggtcattggaagagaaactgtaagaaatatctagagcagctcaagcagaagcagcaggatggaaagagttccaccttaggtattaatgttatagaaattaatcttgctacatcctctactgattcttgggtatttgataccagaggtggttttgggtattttattacctttaccgatgactttagtagatatggttatgtctacttaatgaggcataagtctgagtcctttgaaaagttcaaggaatttcagagtgaggtacaaaatcatttgggcaagacaatcaagtatatacgatctgatcgtggtggagagtacttgagccttgaatttggcaatcatataaaggagtgtggaattgttccacaactcactccgccaggaacgcctcagtggaatggggtgtctgaacggaggaatcgtacattgttggacatggtgcgatcaatgatgagccaaactgatctaccgttaagcttttggggttacgctctagagacagctgcattcacactaaacagagttccatcaaaatcagtggataagtcaccatatgagatatggatagggaagtgtcccagtttgtctttcctaaagatttggggttgtgaggtgtatgtaaaacgtttgcaatcggacaaactcacacctaaatcagataaatgcttctttgtggggtatcctaaggaaacgaaaggatattatttttataatcgggaagagggcaaagtgtttgtcgcccgacacggtgttttcttggaaaaagagtttatttcaagaaaggatagtgggagcatggtgcgacttgaagaaattcaggaaacaccggaaaacgcttcaacatgcacacaaccacaacaagctgagcaagatgttgttcaagaacaagttgttgttgaaccagttgtggaagcaccagcttcacgaaggtttgaaaggatacggcgtacacctgcgag

SEQ ID NO: 14479 - DNA, 3552 bp, Oryza sativa
  Clone ID: TFbOSC900184j.C1.o14.fg
atggagatccaatatgagcatacttcgtatagggatccaaataggagtcttacgggccttggaggcccgagtgatggatcctatatattcgtgaggggtgtgaccggtggaggcattgcatcaccgcgtcgagtggtaacgatatatgatctaatacttgcttggttcctggtttatgcgatagaaatgtttgatttatgctatcgtagcttacgcttatcccaacagtggatagatgtcggacatctatgtgcggagattattggtttacttgacaagatcatggcagctcctgcatcatccaattttaacttgcggtctattcttgagaaagagaagttgactggaataaacttcatggattggtatcgcaacctgagaactgttctcaggcaagagcacaaagagtttgtgcttacagagccttttccagctaacttgcccaacaatgctcctgctgctcaacgtagggagcatgaaaagcgatgcaatgattatcttgatacaagctatctcatgcttgctactatgtcccctgagcttcaaaggaaatatgatgcattggatgctcatacgataatcacgagactacgtaacatgtttgaggaccaagcaagagctgagaggtttaatacctcaaagtccttggttgcgtgcaggctagcagaaggtaatccaatgagcccacatgtgatcaaaatgattggttacgccgagagtctggataagcttggttttccccttagccgagagttggttactgatttgattctccagtcgctacctcccagctttgagccgttcataatgaatttcaatatgaacaacctgaacaggaccttggcagaattgcatgggatgctaaagactgctgaggaaagcattaagaaaaactccaaccatgtgatagttgtgcataagcgcaagcccaacaacaagaaaagttgtcaaaagagaaagctaaactctgatgagatcacgagtactagcaactctaagaccaaggttcaaaagacagggcccgctaaggatgcagagtgcttcttttgcaaggagacaggtcattggaagagaaactgtaagaaatacctagagcagttcaagcagaagcagcaggatggaaagagttccacctcagtctataacattaatgcaaaaaggcaacgtcctaatgatttgaatcccacttttatttggcattgtcgcttgggtcatataaatgagaaacgcatggagaagcttcatagagatggacttctacactcttttgattttaaatcatttgagacatgcgaatcttgtttacttggcaaaatgacaaaggcacctttcacgggtcaaagtgaaagggcaagtgaactattgggactagtacatactgatgtatgtggaccaatgagctcaactgccaaaggtggttttgggtactttattacctttaccgctgactttagtagatatggttatgtctacttaatgaggcataagtctgagtactttgaaaagttcaaggaatttcagaatgaggtacaaaatcatttgggcaagacaatcaagtatctacgatttgatcgtggtggaaagtacttgagcctagaatttggcaatcatctaaaggaatgtgcaattgttccacaactcactccgccaggaacgcctcagtggaatggggtgtctgaacggaggaatcgtacattgttggacatggtacgatcaatgatgagccaaactgatctgccgctaagcttttggggttacgctctagagacagttgcgttcacactaaacagggttccatcaaaatcagtggataagacaccatatgagatatggactgggaagcgtcccagtttgtctttcctaaagatttggggctgtgtggtctatgtaaaacgtttgcaatcagacaaactcacacctaaatcagataaatgcttctttgtgggatatcctaaggaaacgaaaggatattatttttataatcgggaagagggcaaagtgtttgtcgcccgacacggtgttttcttggaaaaagagtttatttcaagacaggatagtgggagcatggtgcaacttgaagaaattcaagaaacaccggaaaacgcttcaacgtccacacaaccacaagctgagcaagatgttgttcaacaggttgaacaagttgttgttgaaccagttgtggaagcaccggcttcacgaagatccgataggatacgacgtacacctgcgagtttggaactattggttgatccacctaatggtgtaaaagccattgagtgcaaatgggtctttaagaaaaagacagatgtagatggaaattttaacatctacaaggcacgattggtggcgaaaggtttcagacaaattcaaggtgttgattatgatgaaactttctcaccagtcgccatgctaaaatctattcggattgttttagcgattgctgcctatttcgattatgagatatggcaaatggatatcaaaatagctatccacaatggaaatctcgatgaggatgtgtacatgacacaacccaagggatttgttgatccacaatcagctaaaaagatatgcaaattgcagaaatccatttatgggttgaagcaagcatctcggagttggaatattcgtcttgacaaagtagtcaaggcgttgggctttgtcaaaaacgaagaagaggcttgtgtatacaagaagattagtgggagcgcactggtgtttctaatcctatatgtagatgacatattattgattgggaacgatattcttatgcttgaatccgttaagacatcgttgaaaaatagtttttcaatgaaggacttaggggaagcaacatatattctgggcataaggatctatagagatagatcaaagaggctaattggattaagccagagtacatacattgaaagattcatcatgtatgctatgctatgtacacgtccagatgtttcatattcacttagtgcaacaagccgataccaatcagatccatgtgagagtcactggatagctgtaaagaatatcctgaagtacttgagaagaactaaggatatgttcctagtcaatggaggacaggaagagctcgttgtaaatggttacaccgacgcaagcttccaaactgacaaagatgattttagatcacagtctggatttgtgttctgcctgaatggaggcgctgtgagttggaagagttccaagcaagatacagtgtctaattatacaacagaagccgaatacattgcctcttctgaagcagcaaaggaggctgtttggataaagaaattcatttctcgactaggtgtggtgactagtgcttctagcccaatggacctctattgcgataatagtggtgccattgcgcaagccaaggagcctagatcgcatcaaaagtccaaacacattttacggcggtatcacctcattcgcgagatagtgggtagaggagatgtgaagatatgcaaaatacatacggatttgaatgttgcagatccgttgacaaagccactccctcagcctaagcatgaggcacacactagggcaatgggtatatga

SEQ ID NO: 14480 - DNA, 6147 bp, Oryza sativa
  Clone ID: TFbOSC900190j.C1.o9.fg
atgccgcgctacaagcccgagtacttgtttggtaccgaaggatttgtccaagagttgcgtacgatgtccttcctcatagggtttggaattgcccttttgtatgccctgatccctcatgaccgtgatgaagagaagtgccgagtcaaagtcaccttgaacaacaatcgtgaagatattccatctgtgatgttcgaggctggaggaggaagctacattcatgcttgtcaggaggtggcaaggatcgccataggagagctccgagaaagctacaatgatcggttggccgacaccgagtatcgctaccatcctcgtcaaccccaaggaagtgatcgtggcagctaccttgaaccagctgggatcgagaacgacgctaccagaaggcatttggttgagatgctgtgggctatggatgaaacccgcactaagattgtgatagccgctcatgatcgtgaagattggaatcggggaaagatctgcaagctagaagacaagatggtgctcactcgcagcaacgggaagggccccaacagcaacaacaacaataacaacaacgccgagaatcccacactcgcccaggtcttggcccaacaagcacagttgatgaatctgatgatgcagcaactccaaaatcagcagaaccaagggaataatcatgcgcctcctcagaacatgttggcagagtttcttcgcgtgaggccacctgttttctctagcaccactaatccggtcgaagctggtgattggctgcacaccatagaaaagaagttggatctgctccagtgcacagaccaggagaaggtctccttcgcgtcacaccagctgcatggccctgcttcggagtggtgggatcacttccgcctcaacaggactacccctgaacctatctcttggcttgaattcaccactgctttccgaaagacgcatataccatcgggattggtgtctctcaagaacaaggagttcaggtcgctcacacagggttctcgcacagtcacggagtacctgcacgagtttaatcgtctagagaagttcttggaagaacttaatgatgagctctcttaccccctcatgactggagattatcatgatttccagaagctagtggataaagctattcgtcaggaggacaaatacaatcgcatggagcagaattttgcgggaaatcatgggatggaggtagaggagcttagacgtcctttgatggttagtactccgagtaaccaagcactctcctcacaacgtagcccctcgatcagaatagagatccaaggtgtacccttcctggccaaccttattctgttagaatctaaagatcttgatgtcatcctagggatggactggttagccagatataaaggtctgatagattgtgccaatagaaaagtaaccctcaccagcaatgaaggtcaagttgtaactgttcatgcattgccttctgaacctctaaggtcaagtctaaaccaaatgactttggaagagattcctatagtccaggagtaccccgatgtgttccctgatgatttgcctggtgccaccgttttctccaagatagatcttcgatcagggtatcaccagttgaggatcaaagaggaagatatacctaagacggcttttactactcggtacgggctgtttgaatgcacagttatgtcttttagacttaccaatgcccctgctttcttcatgaacttgatgaacaaggtgtttatggaatacctggataagttcgtggttgtctttattgatgatattctcatatattctcaaaccaaagaagagcatgaaaaacatcttcgtcttgcattagagaagctgcgagaacatcagttgtatgccaagtttagcaaatgtgaattctggttgtctgaagtgaagttccttggtcacgtcatctcagcaggaggagttgccattgatcctagtaacgtggaatccgtaaccaactggaaacaaccaaagatagtttcagagattcgcagtttcctaggcctcgcaggatattatcggaggtttatagagaatttttccaagattgctaagcccatgacacgattacttcaaaagcatgtaaagtacaagtggtcagaagaatgtgagcagagttttcaagagttgaagaatcgcttaatatcagctcttattttgattttgcctgatccaaagaagggttttcaagtgtattgcgatgcatccaagcttgggttaggttgtgttctgatgcaagatgggaaggtggttgcctatgcatctcgtcagttacgtccgcatgagaagaactaccctactcatgatcttgagttagctgcagtggttcatgcgttgaagatttggcgtcactaccttttcggcacccgtacagaggtgtatacggatcacaaaagtttgaagtatatctttacccaaccagatctgaacatgagacagcggagatggttggaatggattaaggattatgacctgggaattcattgtcacccgggaaaggctaatgtcgtagcagatgcccttagcaggaaaggcttttgtaatgctatggaaggccgacagttgcctttggaattgtgcaaggaatttgaaaggttgaatctgggaatcgtcagtaaaggctttgttgcagctttagaagcgaagcctactctcattgatcaagtcagagaagcccaaatcaatgatcctgatattctcgagatcaagaagaatatgagaagaggtaaagctatcggtttcttggaggatgagcaaggaactgtatggttgggtgagagaatctgtgtcctagacaacaaagatttgaaagacgcaattctaaaggaagcccatgatactttatactccattcaccctggtagtattaagatgtaccaggatctcaaggaaagattttggtgggcaagtatgaagcgtgaaattgcagaatacgtagcagtatgtgatgtttgtcagcgagtcaaggcggaacatcagaaacccgcaggtttgctgcagcctttgaagattcttgaatggaagtgggaggaaatcggtatggatttcattactagactacccagaacgtcgtcaggccatgactctatttgggtaatagtcgacagacttaccaaagcggctcatttcattccagtgagagccacctattccgggagtcgtttggcggaattgtatatggcaaggattgtgtgtttgcatggtgttcctaagaagatcgtatccgatcggggaagtcagtttacctcaaaattttggaagaagcttcaggaggagatgggttccacgctgaatttcagtactgcttatcattcgcagacggatggacagaccgaaagagtaaatcagatattggaagacatgttgagagcttgtgttttagacttcggtggaagttgggataagaatttgccttacgcagaattctcatacaacaatagttaccaagctagtctacagatggctccttatgaagcactgatagatgtcggacatctatatgcggagattattggtttacttgacaagatcatggcagcttctgcaccatctaattttaacttgcggtctattcttgagaaagagaagttgactggaacaagcttcatggattggtatcgcaacctgagaattgttctcaggcaagagcacaaagagtttgtgcttacacaaccttttctagctgacttgcccaacaattctcctgctgctcaacgtatggagcatgaaaggcgatgcaaggaataccttgatataagctgtctcatgcttgctactatgtcccctgagcttgaaaggcaatatgaggcattggatgctcatacgataatcacgggactacgtaacatgtttgaggaccaagcaagagctgagaggtttaatacctcaaagtccatgtttgcatgcaggcttgcagaaggtaatccagtgagcccacatgtgatcaaaataattggttacaccgagagtctggataagcttggctttccccttagccaagagttggctactgatttgattctccagtcgctccctcccagctttgagccgttcataatgaatttcaacatgaacaacctaaacaggaccttggcagaattgcatgggatgctaaagactgccgaggaaagcattaagaaaaactccaaccatgtgatggttatgcataagcgcaagcccaacaacaagaagagtggtcaaaagagaaagctaaactctgatgagatcatgagtactagcaactctaagaccaaggttcaaaagacagggcccgctaaggatgcagagtgcttcttttgcaaggagacaggtcattggaagagaaactgtaagaaatacctagagcagctcaagcagaagcagaaggatggaaagagttccacctcaggtattaatgttatagaaattaatattgctacttcctctactgattattgggtatttgataccagaggtggttttgggtactttattacctttaccgacgactctagtagatatggttatgtctacttaatgaggcataagtctgagtcctttgaaaatttcaaggaatttcagaatgaggtacaaaatcatttgggcaagacaatcaagtatctacgatctgatcgtggtggagagtgcttgagccttgaatttggcaatcatctaaaggagtatggaattgttccacaactcactccaccaggaacacctcagtggaatggggtgtctgaacggaggaatcgtacattgttggatatgttgtggaagcaccggcttcacgaaggtccgataggatacggcgtacacctgcgagacaacgatgaacctactacctatgaggaagaaatggtgggaccagactctgagaaatggcttggagccatgaaatccgaaacagaatctatgcatgtcaatcaaatttggaactctgttgatccacctgatggtgtaaaagccattgagtgcaaatgggtctttaagaaaaagatagatgtagatggaaatgttcacatctacaaggcacgattggtggcaaaaggtttcagacaaattcaagcgattgctgcctatttcgattatgagatatggcaaatggaagtcaaaacagctttcctcaatggaaatctcaatgaggatgtgtacatgacacaacccaagggatttgttgatccacaatcagctaaaaagatatgcaaattgcagaaatccatttatgggttgaagcaagcatctcggagttggaatattcgttttgacgaagtagtccaggcgttgggcttcttcaaaaacgaagaagagccttgcgtatacaagaagattagtgggagcgcactggtgtttctaatcctatatgtagatgacatattattgattgggaatgatattcctatacttgaatccgttaagacatcgttgaaaaatagtttttcaatgaaggacttaggggaagccgcatatattctgggcataaggatctatagagatagatcaaagaggctaattggattaagccagagtacatacattgacaaggtgttgaagatgttaaacatgcaagattctaagaaaggtttcttaccaatgccacatggcattaatcttggcaagaatcagtgtcctcaaacgactgatgagcgaaacaagatgagtgtgattccatatgcctcggcaatcggatccattattgattcctcgacaagggtttctacacatataccacgctacaagcctgagtacttgttcggtaccgaaggatttgtccaggagttgcgtacgatgtctttcctcataggatttgggattgcccctttgtatgcccagatccctcatgatcgtgatgaagagaagtgccgggtcaaagtcactttgaacagtaatcctgaagatataccatcagggatgttcgaggctggaggtggaagctacattcatgcttgtcaggaggtggcaaggatcaccataggagagctccgcgaaagctacaacgatcggttggccgacaccgagtatcgctaccatcctcgtcaaccccaggggagtgaccgtggtagctaccttgaacctgcggggatcgagaacgatgctaccacgaggcatttggttgagatgctgtgggctatgaatgaaactgtcgcgaccggaaaaattgccttttcccgaacgctagtgtattaa

SEQ ID NO: 14481 - DNA, 3977 bp, Oryza sativa
  Clone ID: TFbOSC900201j.C1.o17.np
atcatggcagctcctgcaccatccagttttaacttgcggtctattcttgagaaagagaagttgactggaacaaacttcatggattggtatcgcaacctgagaattgttcagacaagagcacaaagagtttgtgcttacacagccttttccaactgacttgcccaataatgctcctgctgctcaacatagggagcatgaaaagcgatgcaatgattatcttgatataagctgtctcatgcttgctactatgactcctgagcttcaaaggcaatatgaggcattggatgctcatacgataatcacgggattacgtaacatgtttgaggagcatgcaagagctgagaggtttaatacctcaaagtccttgtttgcgtgcaggcttacagaaggtaatccagtgagcccatatgtgatcaaaatgattggttacaccgagagtctagataagcttggttttccccttagccgagagttggctactgatttgattctccagttgctccctcccagctttgagccattcataatgaatttcaacatgaacaacctgaacaggaccttggcagaattgcatgggatgctaaagactgctgaggaaagcattaagaaaaactccaaccatgtgatggttatacataacgcaagcccaacaacaagaaaagtggtcaaaagataaagctaaactctgatgagatcacgagtactagcaactctaagaccaaggttcaaaagacagggcccactaaggatgcagagtgcttcttttgcaaggagacaggtcattggaagagaaactgtaagaaatacctagagcagctcaagcagaagcagcaggatggaaagagttccatctcaggtattaatgttatagaaattaatcttgctactttctctactgattcttaggtatttgatacctggtcagttgctcacatatgcaaatcattgcaggggctaaaaagaagtaggaacttagcaagaggcgaagtggacattcgcgtgggcaatggagcaagagttgctgctgttgcggtcggctctatgctattatctttaccgtcaggattagttttggagttaaataattgttattgcattccagctttgtgcaagaacgttatctctgcttcttgtttgcaagcagagggttatggttttagatctgtggacaatggttgtttagtctattataatgacattttctattcccatgcacccattatgaatggcttatacattgtgaatcttgatggatgttcagtctataacattaatgcaaaaaggcaacgtcctaatgatttgaatcccacttttatttggcattgtcgcttgggtcatataaatgagaaacacatagagaagcttcatagagatggacttctacactggtttgattttgaatcatttgacatgcgaatcttgtttacttagcaaaatgacaaaggcacctttcacgggtcaaagtgaaagggcaagtgaactattaggactagtacatactgatgtatgtggaccaatgagctcaactgctagaggtggttttgggtactttattacctttaccgatgactttagtagatatggttatgtctacttaatgaggcataagtctgagtcctttgaaaagttcaaggaatttcagaatgaggtacaaaatcatttgggcaagacaatcaagtatatatgatctgatcgtggtggagagtacttgagccttgaatttggtaatcatgtaaaggagtgtggaattgttccacaactcactccgccaggaacgcctcagtggaatggggtgtctgaacggaggaatcgtacattgttggacatggtgcgatcaatgatgagccaaactgatctgccgctaagcttttggggttacgctctagagacagctgcgttcacactaaacagggttccatcaaaatcagtggataagacaccatatgagatatggacagacaagcgtcccagtttgtctttcctaaagatttggggctgtgaggtctatgtaaaacgtttgcaatcgaacaaactcacacctaaatcagataaatgcttctttgtggggtatcccaaggaaacggaaggatattatttttataattgggaagagggcaaagtgtttgtcgcctgacacggtgttttcttggaaaaagagtttatttcaagaaaggttagtgggagcatggtttgacttgaagaaattcaggaaacaccggaaaacgcttcaacgtccacacaaccacaacaagctgagcaagatgttgttcaacaggttgaacaagttgttgttgaaccagttgtggaagcaccggcttcacgaaggtccgaaaggatacgacgtacacctacgaggtatgcggtgttaactacaggacaacgtgatatactgttgttagacaacgatgaacctactacctatgaggaagcaatggtgggaccagactctgagaaatggcttggagccatgaaatccgaaatagaatccatgcatgtcaatcaagtttggaacttagttgatcaacctgatggtgtaaaagccattgagtgcaaatgggtctttaagaagaagacagatgtagatggaaatgttcacatctacaaggcacgattggtggcgaaatgtttcagacaaattcaaggtgttgattatgatgaaactttctcgccagtcgccatgctaaaatctattcggattgttttagcgattgctgcctatttcgatttgagatatggcaaatggatgtcaaaacagctttcctcaatggaaatctcgatgaggatgtgtacatgacacaacccaagagatttgttgatccacaatcagctaaaaggatatgcaaattgcagaaatccatttatgggttgaagcaagcatctcggagttggaatattcgttttgacgaagtagtcaaggtgttgggctttgtcaaaaacgaagaagagccttgtgtatacaagaagattagtggagcgcactggtgtttataatcctatatgtagatgacatattatagattgggaatgatattcctatgcatgaatctgttaagacatcgttgaaaaatagtttttcaatgaacgacttaggggaagcagcatatattctgggcataaggatctatagagatagatcaaagagactaattggattaagccagagtacatacattgacaaggtgttgaagaggttcaacatgcaatattctaagaaaggtttcttaccaatgttacatggcattaatcttggtaagaatcagtgtcctcaaacgactgatgagggaaacaagatgagtgcgattccatatgcctcagcaatcggatccattatatatgctatgctatgtacacgtccagatgtttcatatgcacttagtgcaacaaactgataccaatcagatccaggtgagagtcactggatagctttaaagaatatccttaagtacttgagaagaactaaggatattttcctagtctatggaggacaggaagagctcgttgtaaatggttacacttacgcaaccttccaaaccgacaaagatgattttagatcgcagtctggatttgtgttctgcctgaatggaggcgctgtaagttggaagagttccaagcaagatacagtggctgattctacaacagaagccgaatacattgccacttctgaagcagcaaaggaggctgtttggataatgaaattcgtttctcaactaggtgtgatgactagtgtttctagccctatggacctctattgcgataatagtggtgccattgcgcaagccaaggagcctagatcgcatcaaaaatctaaatacattttacggcggtatcacctcattcgcgagatagtgggtagaggagatgtgaagatatgcaaaatacatacggatttgaatgttgcagatccattgacaaagccactccctcagcctaagcatgaggcacacactagggcaatgggtataagatacgttcatgat

SEQ ID NO: 14482 - DNA, 3980 bp, Oryza sativa
  Clone ID: TFbOSC900297j.C1.o10.np
atcatggcagctcctgcaccatccaattttaacttgtggtctattcttgagaaagagaagttgactagaacaaacttcatggattggtatcgtaacctaagaattgttctcaggtaagagcacaaaaagtttgtgcttacacagccttttccagctgactttcccaacaatgctcctgccgctcaacgtagggagcatgaaaggcgatgcaatgaataccttgatataagctgtctgatgcttgctactatgtcccctgagcttcaaaggcaatatgaggcattggatgctcatacgataatcacgggactacgtaacatgtttgaggaccaagcaagggctgagaggtttaatacctcaaagtccttgtttgcgtgcaggcttgcagaaggtaatccagtgagcccacatgtgatcaaaataattggttacaccgagagtctggataagcttggctttccccttagccaagagttggctactgatttgattctccagtcgctccctcccagttttgagccattcataatgaatttcaacatgaacaacctgaacaggaccttggcagaattgcatgggatgctaaagactgccgaggaaagcattaagaaaaactccaaccatgtgatggttatgcataagcgcaagcccaacaacaggaagagtggtcaaaagagaaagctaaactctgatgagatcacgagtacaagcaactctaagaccaaggttcaaaagacagtgcccgctaaggatgcagagtgtttcttttgcaaggagacaggtcattggaagagaaactgtaagaaatacctagagcagctcaagcagaagcagcaggatggaaagagttccacctcaggtattaatgttatagaaattaatcttgctacttcctctactgattcttgggtatttgataccgggtcagttgctcatatatgcaaatcgttgtaggggctgaaaagaagtaggagcttagcaagaggcgaagtggacattcgcgtgggcaatggagcaagagttgctgctgttgcggtcgacactatgccattatctttaccgttaggattagttttggagttaaataattgttattgcattccagctttgtgtaagaacgttatctctgcttcttgtttgcaagcagagggttatggttttagatctatggacaatggttgttcagtctattataatgacattttctatttccatgcacccatgatgaatggcttatacattgtgaatcttgatggatgttcagtctataacattaatgcaaaatggcaacgtcctaatgatttgaatcccacttttatttggcattgtcgcttgggtcatataaatgagaaacgcatggagaagcttcatagagatggacttctacactcgtttgattttgaatcatttgagacatgtgaatcttgttaacttggcaaaattacaaaggcacctttcacgggtcaaagtgaaagggcaagtgaactattgggaccagtacatactgatgtatgtggaccaatgagctcaactgccagaggtggttttgggtactttattacctttaccgatgactttagtagatatggttatgtctacttgatgaggcataagtctgagtcctttgaaaagttcaaggaatttcaaaatgagatacaaaatcatttgggcaagacaatcaagtatctacgatctgatcgtggtggagagtacttgagccttgaatttggcaatcatctaaaggagtgtggaattgttccacaactcactccgccaggaacgcctcagtggaatggggtgtctgaacggaggaatcgtacattgttggacatggtgcgattaatgatgagccaaactgatctgccgctaagcttttggggttacgctctagagacagctgcgttcacactaaatagggttccatcaaaatcagtggataagacaacatatgagatatggacagggaagcgtcccattttgtctttcctaaagatttggggctgtgaggtctatgtaaaacgtttgcaatcagacaaactcacacctaaatcagataaatgcttctttgtggggtatcctaaggaaacgaaaggatattatttttatcatcgggaagagggcaaagtgtttgtcgcccgacacagtgttttcttggaaaaaaagtttatttcaagaaaggatagtgtgagcatggtgtgacttgaagaaattcaggaaacaccagaaaacgctccaacgtccacacaaccacaagctgagcaagatgttgttcaacaggttgaacaagctgttgttgaaccagttgtggaagcaccggcttcacgaaggtccgaaaagatacggcgtacacctgcgaggtatgcgttgttaactacagtacaatgtgatatattgttgttagacaacgatgaacctactacctatgagaaagcaatggtgggaccagactctgagaaatggcttggaaccatgaaatccgaaatagaatccatgcatgtcaatcaagtttgaaaattggttgatccacctgatgatgtaaaagccattgagtgcaaatgggtctttaagaaaaagacagatgtagatggaaatgttcacatctacaaggcacgattggtgacgaaaagtttcaaacaaattcaaggtgttgattatgatgaaactttctcgccagtcgccatgttaaaatctatttggattgttttagcgattgctggctatttcgattatgagatatggcaaatggatgtcaaaacagctttcctcaatggaaatctctatgaggatgtgtacatgacacaacccaagggatttgttgatccacaatcagctaaaaagatatgcaaattgcataaatccatttatgggttgaagcaagcatctcggagttggaatattcgttttgacgaagtagtcaaggcgttaggctttgtaaaaaatgaagaagagccttgtgtatacaagaaggttagtgggagcgcattggtgtttctaatcctatatgtagatgacatattattgattgggaatgatattcctatgcttgaatccgttaagacatcgttgaaaaatagtttttcaatgaaggacttaggggaagtagtatatattctgggcataaggatctatagagataaatcaaagaggctaattggattaagccagagtacatacattgacaaggtgttgaagaggttcaacatgcaagattctaagaaaggtttcttaccgatgtcacatggcattaatcttggcaagaatcagtgtcctcagacgactgatgagtgaaacaagatgagtgtgatcccatatgcctcggcaatcggatccattatgtatgctatgctatgtacacgtccaaatgtttcatatgcacttagtgcaacaagccgataccaatcagatccaggtgagagtcactagataactgtaaaaaatatcctgaagtatttgagaagaactaaggatatgttcctagtctatggaggataggaagagctcgttgtaaatggttacactgacgcaagcttccaaaccgacaaagatgattttagatcgcagtctggatttgtgttctgcctgaatagaggcgctgtgagttggaagagttccaagcaagatacagtggctgattctacaacagaagccgaatacattgccgcttctgaagcagcaaaggaggttgtttggataaagaaattcgtttctcaactaggtgtgatgactagtgcttctagccctatggacctctattgcgataatagtggtgccattgcgcaagccaagggcctagatcgcatcaaaagtccaaacacattttacggcggtatcacctcattcgcgagatagtgggtagaggagatgtgaagatacacaaaatacatacggatttgaatgttgcagatccgttgacaaagccactccctcagcctaagcatgaggcacaaactagggcaatgggtgtaatatacattcatgat

SEQ ID NO: 14483 - DNA, 2247 bp, Oryza sativa
  Clone ID: TFbOSC23004j.C1.o7.fg
atgtcggctccgacgccgcgagtctcgcgatcgccgcgtcatcaatcccgctcgcctcctctgcgccgtggtcgtcgtcggcctggcgacgcctggcacttgggtccagtcaggcgcgtggtcaaggaggtggggggctcagccaactattcgatcctcacgaagacgaactacagtgattggtccctcttgatgagggcgatgctccaggtgcgtggcctctgggaagctgtcgacacgggtgacgtcaacttccaggaggacaggatggcgttggaggccgtcctcaaggtggtccccgctgatctgctgccggtgctctctgtcaaggagacggcgaaagacgcctgggatgccatcaagacgatgcgcgtcggcgtcgaccgcgtccgcaagtcgaaagcgcaggagctgcgcaagcagttcaatgcgatcgagttcaaggaaggggagtccgtggaggaattctccgtccggctgagtgggcttgtcaacaaccttgccgtacttgggatccagcttgaggaatcaaagaagctgacggggcgtctgaggaacgccgaggagcgccgtcccaagaagaagtccggcgatgagggcgacaaactgtatatcacggaagaacaatgggccgctcgcgccaaggaacggcagtccggcgagggatcgtcgcgcaagaaggcgggtaacaaccgccgacaccgcgatgggcgaaagaaaaccgagggcactgccgatggcgagcgcggtgcgcgttacacgcgcgatcaagggcgtgacaagtgcaagaactgtggccgcctcggtcactgggcgaaggactgctgccagcccaagaaacaagtcgcggcacacgtcgcacaaggtgaggaggaagatgatgagctggcgctgctgatggctcacgcggttgagctggcgccacctccaccatcgctcccaccttcaactgaaccgctcaacctcgttgagcccaaggtgttcacacacctgcactgcgatgtcgacgctggtgtttggcatctcgacaccggcgcgactaaccacatgactggcgtgcatgacatcttctccgagctcgacacggtggtgcgcggcaaggtctgttttggcgacggctcggtggtcgccattgagggccaaggcaaaatcatctttgagtgcaggaacagtgaacatcgggcgctcataggggtgtactacatccccaagctcaacgcgaacctcgtcagcctcaggcagctggatgaaaatggctgcgacatctgcatcttccatggcgtctgcacgatccgcgacgctgcgcgacagctcctcgctcgcgtgcggtgtacgcgtattcggctgtacctgatcaagatcaccgtcgctcggcctgtgtgcctctcagcacgcacgcaggaggccgcgtggctgtggcatgctcgcttcggccacctccacttcgacgcgctacggcgcctcactcaacaagacatggttcgcggccttccacagatcgaccaagttgagcagctgtgcgactgctgcgtcatctccaagcaacgacgttcgccgttccccgggcagtctctgttccgggaggaggaccgcttggagctcattcatggcgatctttgcggtcccatctcgcccgcgacgcccggcggcaagaaacactttctgctgcttgtcgacgatgcaagctgctatatgtggctcactcttctacagaacaagggggaggcggctgcggcaatcaagcactttcaagcccgcagcgaggctgagtccggctgccatctcaagctcctccaccccgacaacgggggtgagttcacctccgccgagttcgccagctactgcaccgagagcggtgtcaagcgccagctcaccccgccgtattccccccagcaaaacggtgtggtcgagcgtcgcaaccaaacgatcttggcgatggcacagtgtctgctaagggccaagtcagtgccggcatgctattggggggaggcagtcatgacggttgtctttttgctcaatcacgcgccgaccaagtgcctggtggacaagacaccctatgaggcttggttaggtcgcaagccggccgtcggtcacctacgcaccttcgggtgtctcgtgtactcaaggacgttcagccacacatcaccaagctccaggaacgcggcaagcccatggtcttcctcggctacgttgagggaactaaagcctacaaggtgttcgacccgaagtcgggtcgcgttcaagtga

SEQ ID NO: 14484 - DNA, 2625 bp, Oryza sativa
  Clone ID: TFbOSC101575j.C1.o1.fg
atgtcgggtcaaacggggaatggcaaggatggtgataagggagctacgtttccttatgactatccctccacatctgcatcttatgtgagcacctatagcggcaaagctccgtacttcaatggtacggactatgccgcttggaaacataagatgaagatgcatttgaaatctattaaccctttgatttggagaatagtcgaaaaaggctatgttttgcagaatcccgtggaacccaccaaggaggacgacaagaacgagcacaagaacgctcaagccgctaatgcaattcttagcgccttgagtggaagtgatttcaaccgtgtggacggcattgagagtgccaaagtgatttgggacacgcttcggagtttgcatgaagttacggatagtgttagcgagttcaaggtggagattctcaaggggcagtttgagcggtttgtgatgttggatggtgagagcccaagcgacatgtatgatcgattaagcaagatcgttaatgagatcaaggtacttggctctaaggacatgaccaatgaggttgtggtcaagaagatggttcgggcaatcactccaaggaactctaccttggtgaccatcattcgtgagcgtccggactacaagactctcacacctcatgacttgctcgggcgtatccttgcccatgacatgcttgagcaagagtccaaggaggtcatccaatacatcaaccaaacctcaaccacaagcattaagaaggaagacttggcattgaaggcgaaggaagaagaagaagagagtcgcaagagcaagagcaagagcaaggcggagatcgatgatgaagagatggctctcttcgtcaagaagttcgacaagttcatgaagcaaagcggcttcttcaaggaaagttcgtccaagtattcctccaacaagtcaagtggaagacactccgcaagggtgtgctatgtgtgcaaagagcccgagcacttcattgacgattgcccccacatcaaggattgcccccacttcaaggaagacaagaagaagcttgagaagaacgagaagcacaagcatagcaagcatgatcgctatggccaagctcaccttggggtgatcttcggctccgacttcgagtcaagctcaagtgatgaagaaggagttgccacattcgccgtcaagccttcatcaccaccgagactcttcaactactcaagtgatgaggatgctcccatttgcctcatggcaaaggagcctaaggtaccctctcccctcaagtcatttaatgttgatcttgttagtgatgaggaggaagatgttgaggatgaggttatggatgacgagttgttcaaatccatagccaaggaatccataccacacttgagtgagttgcttgggagaattgagaatcaatatgcaaaccttgagaggcaagaggaattgctcattcgtgagaaagagcggtctcatgaactcaagagtgaacttgctaaggagagagagaaaaatgaggctttggtacggctttacaagcaaaccaaagagtctcatactaatcttgaggtggcgaacgctcaacttcaagagagagtggatggcttggacaaagcttacctctctcttgaagagaagttcgaaaccttaaagaatagtgtctctctccctagcgaggcatcgtgctccaaaattgtcccaagcaacgaaccatgtgtgaggtgcaaagatattgatattgaagcttgtagtactaactctacttctttgagtgctttacaaaagcaaaatgagaagcttatgggactccttcataatggcctacttaagtgccatatgggtagtaaggcgctaaaggagtacctaggctatcaaagggacaacttcaaccatgaaggtcttgggtatgtttctccacctaaaggaaaggtggacaagagtgtgatgatcaagaatccccaaggtcttagcaactttgttaaggccaaatgtatccttcctaatgattatgcttctcattgttcttttgatacatcttatgttcttaggaaaaatgctaatggtcgtgctgttgctaaaagggatgactcatccgtagtctttaagggtgttctcgagggcaagctttatcttgtggattttttctcaactaaagccaaacatgagacatgcttagtggctaagtccaacatgaggtggctttggcatcggaggctaacccatgtcggtatgaggaatcttcacaagcttctaaagcacgatcacatccttggactaacaaatgttcaatttgagaaagatagggtgtgtagtgcatgtcaagccgggaaacaaattggagcacatcaccccgtcaagaacgtaatgattactacaagaccgttggagcttcttcacatggacctcttcgggccaattgcttatctaagcattggaggtgacaaatatggtcttgttattgttgatgacttttcacgtttcacgtgggtgttcttcttgcatgacaagagtgagacacaagccatcttcaagaagtttgaaagaagagcccaaaacgagttcgacctcaagatcaagaacattcgaagcgacaacggcaaggagttcaagaacacgtgcatcgagagtttccttgatgaagaaggcatcaagcattag

SEQ ID NO: 14485 - DNA, 3933 bp, Oryza sativa
  Clone ID: TFbOSC400991j.C1.o12.fg
atgtcgggtcaaacggggaatggcaaggatggtgataagggagctacgtttccttatgactatccctccacatctgcatcttatgtgagcacctatagcggcaaagctccgtacttcaatggtacggactatgccgcttggaaacataagatgaagatgcatttgaaatctattaaccctttgatttggagaatagtcgaaaaaggctatgttttgcagaatcccgtggaacccaccaaggaggacgacaagaacgagcacaagaacgctcaagccgctaatgcaattcttagcgccttgagtggaagtgatttcaaccgtgtggacggcattgagagtgccaaagtgatttgggacacgcttcggagtttgcatgaagttacggatagtgttagcgagttcaaggtggagattctcaaggggcagtttgagcggtttgtgatgttggatggtgagagcccaagcgacatgtatgatcgattaagcaagatcgttaatgagatcaaggtacttggctctaaggacatgaccaatgaggttgtggtcaagaagatggttcgggcaatcactccaaggaactctaccttggtgaccatcattcgtgagcgtccggactacaagactctcacacctcatgacttgctcgggcgtatccttgcccatgacatgcttgagcaagagtccaaggaggtcatccaatacatcaaccaaacctcaaccacaagcattaagaaggaagacttggcattgaaggcgaaggaagaagaagaagagagtcgcaagagcaagagcaagagcaaggcggagatcgatgatgaagagatggctctcttcgtcaagaagttcgacaagttcatgaagcaaagcggcttcttcaaggaaagttcgtccaagtattcctccaacaagtcaagtggaagacactccgcaagggtgtgctatgtgtgcaaagagcccgagcacttcattgacgattgcccccacatcaaggattgcccccacttcaaggaagacaagaagaagcttgagaagaacgagaagcacaagcatagcaagcatgatcgctatggccaagctcaccttggggtgatcttcggctccgacttcgagtcaagctcaagtgatgaagaaggagttgccacattcgccgtcaagccttcatcaccaccgagactcttcaactactcaagtgatgaggatgctcccatttgcctcatggcaaaggagcctaaggtaccctctcccctcaagtcatttaatgttgatcttgttagtgatgaggaggaagatgttgaggatgaggttatggatgacgagttgttcaaatccatagccaaggaatccataccacacttgagtgagttgcttgggagaattgagaatcaatatgcaaaccttgagaggcaagaggaattgctcattcgtgagaaagagcggtctcatgaactcaagagtgaacttgctaaggagagagagaaaaatgaggctttggtacggctttacaagcaaaccaaagagtctcatactaatcttgaggtggcgaacgctcaacttcaagagagagtggatggcttggacaaagcttacctctctcttgaagagaagttcgaaaccttaaagaatagtgtctctctccctagcgaggcatcgtgctccaaaattgtcccaagcaacgaaccatgtgtgaggtgcaaagatattgatattgaagcttgtagtactaactctacttctttgagtgctttacaaaagcaaaatgagaagcttatgggactccttcataatggcctacttaagtgccatatgggtagtaaggcgctaaaggagtacctaggctatcaaagggacaacttcaaccatgaaggtcttgggtatgtttctccacctaaaggaaaggtggacaagagtgtgatgatcaagaatccccaaggtcttagcaactttgttaaggccaaatgtatccttcctaatgattatgcttctcattgttcttttgatacatcttatgttcttaggaaaaatgctaatggtcgtgctgttgctaaaagggatgactcatccgtagtctttaagggtgttctcgagggcaagctttatcttgtggattttttctcaactaaagccaaacatgagacatgcttagtggctaagtccaacatgaggtggctttggcatcggaggctaacccatgtcggtatgaggaatcttcacaagcttctaaagcacgatcacatccttggactaacaaatgttcaatttgagaaagatagggtgtgtagtgcatgtcaagccgggaaacaaattggagcacatcaccccgtcaagaacgtaatgattactacaagaccgttggagcttcttcacatggacctcttcgggccaattgcttatctaagcattggaggtgacaaatatggtcttgttattgttgatgacttttcacgtttcacgtgggtgttcttcttgcatgacaagagtgagacacaagccatcttcaagaagtttgaaagaagagcccaaaacgagttcgacctcaagatcaagaacattcgaagcgacaacggcaaggagttcaagaacactaagtgctacattcttaataagaaggctagatcctcaaagtttgctcctaaagtggatgaggggttcttgcttgggtataggtcaaatgagtgcgcataccgtgttttcaacaaaacctccggtattgttgagatcgcgcgtgatgtgacatttgatgaaattaacggctctcaagtagagcaagttgactcacatgtgttaggtgaaggggaggaccctaacgaaacaatcaaaagggtggaagaagctcttaatgatccggattgggggatggcgatgcaagaggagttgaacaacttcacccggaatgaagtgtggactttggtggagcgacctcggcaaaatgtgattggcacaaagtggatctttcgcaacaagcaagacgaggccagggtcgtgataaggaacaaggcgaaattagtggcgcaagggttcacccaaatcgatggattagatttcggtgaaacttttgcgccggtagctagacttgagtcaattcgcatattgcttgcttttgctactaacctcaattttaagctatttcaaatcgatgtcaaaagcgtcttcctcaacgggcctatcaacgagttggtatacgtggagcaaccactgggcttcgaggatccaaaatatcccatcaacgtgtacaagctccacaaggcactctacggtcttaagcaagcccctagagcttggtatgagtgtcttcacaattttcttgtgaaaaacggctttgagatcgggaaagccgattcaactctttttactaaaagatatgataatgatatttttgtgtgccaaatatatgtcgatgacattatatttggttctactaacaagtcttttaatgaagagtttagtaggatgatgaccaagcgttttgagatgtccatgatgggtgaattgaagttcttcctcggccttcaaatcaagcaactcaaggaaggaactttcatttgccaaacaaagtatttaaaggacatgctcaagaagtttggaatggagaatgcgaagccaatccacactcccatgccatcaaatggccacctcgacctcaacgagcaaggtaaagacgtcgaccaaaaggtataccgttccatcattggctcactcctttacctttgtgcatctaggcccgatattatgcttagtgtgtgcatgtgtgcaagatttcaagccgctctgaaggagtgtcaccttgtggccatgaagagaattcttagatatgtgcacacacctaatcttggtctttggtatcctaagggagcgagttttgatctcattggttatgccgatgcggattatgccgggtgcaaagtggataggaaaagcacattgggtacttgctaa

SEQ ID NO: 14486 - DNA, 3729 bp, Oryza sativa
  Clone ID: TFbOSC900312j.C1.o14.fg
atgtcgggtcaaacggggaatggcaaggatggtgataagggagctacgtttccttatgactatccctccacatctgcatcttatgtgagcacctatagcggcaaagctccgtacttcaatggtacggactatgccgcttggaaacataagatgaagatgcatttgaaatctattaaccctttgatttggagaatagtcgaaaaaggctatgttttgcagaatcccgtggaacccaccaaggaggacgacaagaacgagcacaagaacgctcaagccgctaatgcaattcttagcgccttgagtggaagtgatttcaaccgtgtggacggcattgagagtgccaaagtgatttgggacacgcttcggagtttgcatgaagttacggatagtgttagcgagttcaaggtggagattctcaaggggcagtttgagcggtttgtgatgttggatggtgagagcccaagcgacatgtatgatcgattaagcaagatcgttaatgagatcaaggtacttggctctaaggacatgaccaatgaggttgtggtcaagaagatggttcgggcaatcactccaaggaactctaccttggtgaccatcattcgtgagcgtccggactacaagactctcacacctcatgacttgctcgggcgtatccttgcccatgacatgcttgagcaagagtccaaggaggtcatccaatacatcaaccaaacctcaaccacaagcattaagaaggaagacttggcattgaaggcgaaggaagaagaagaagagagtcgcaagagcaagagcaagagcaaggcggagatcgatgatgaagagatggctctcttcgtcaagaagttcgacaagttcatgaagcaaagcggcttcttcaaggaaagttcgtccaagtattcctccaacaagtcaagtggaagacactccgcaagggtgtgctatgtgtgcaaagagcccgagcacttcattgacgattgcccccacatcaaggattgcccccacttcaaggaagacaagaagaagcttgagaagaacgagaagcacaagcatagcaagcatgatcgctatggccaagctcaccttggggtgatcttcggctccgacttcgagtcaagctcaagtgatgaagaaggagttgccacattcgccgtcaagccttcatcaccaccgagactcttcaactactcaagtgatgaggatgctcccatttgcctcatggcaaaggagcctaaggtaccctctcccctcaagtcatttaatgttgatcttgttagtgatgaggaggaagatgttgaggatgaggttatggatgacgagttgttcaaatccatagccaaggaatccataccacacttgagtgagttgcttgggagaattgagaatcaatatgcaaaccttgagaggcaagaggaattgctcattcgtgagaaagagcggtctcatgaactcaagagtgaacttgctaaggagagagagaaaaatgaggctttggtacggctttacaagcaaaccaaagagtctcatactaatcttgaggtggcgaacgctcaacttcaagagagagtggatggcttggacaaagcttacctctctcttgaagagaagttcgaaaccttaaagaatagtgtctctctccctagcgaggcatcgtgctccaaaattgtcccaagcaacgaaccatgtgtgaggtgcaaagatattgatattgaagcttgtagtactaactctacttctttgagtgctttacaaaagcaaaatgagaagcttatgggactccttcataatggcctacttaagtgccatatgggtagtaaggcgctaaaggagtacctaggctatcaaagggacaacttcaaccatgaaggtcttgggtatgtttctccacctaaaggaaaggtggacaagagtgtgatgatcaagaatccccaaggtcttagcaactttgttaaggccaaatgtatccttcctaatgattatgcttctcattgttcttttgatacatcttatgttcttaggaaaaatgctaatggtcgtgctgttgctaaaagggatgactcatccgtagtctttaagggtgttctcgagggcaagctttatcttgtggattttttctcaactaaagccaaacatgagacatgcttagtggctaagtccaacatgaggtggctttggcatcggaggctaacccatgtcggtatgaggaatcttcacaagcttctaaagcacgatcacatccttggactaacaaatgttcaatttgagaaagataggagtgagacacaagccatcttcaagaagtttgaaagaagagcccaaaacgagttcgacctcaagatcaagaacattcgaagcgacaacggcaaggagttcaagaacactaagtgctacattcttaataagaaggctagatcctcaaagtttgctcctaaagtggatgaggggttcttgcttgggtataggtcaaatgagtgcgcataccgtgttttcaacaaaacctccggtattgttgagatcgcgcgtgatgtgacatttgatgaaattaacggctctcaagtagagcaagttgactcacatgtgttaggtgaaggggaggaccctaacgaaacaatcaaaagggtggaagaagctcttaatgatccggattgggggatggcgatgcaagaggagttgaacaacttcacccggaatgaagtgtggactttggtggagcgacctcggcaaaatgtgattggcacaaagtggatctttcgcaacaagcaagacgaggccagggtcgtgataaggaacaaggcgaaattagtggcgcaagggttcacccaaatcgatggattagatttcggtgaaacttttgcgccggtagctagacttgagtcaattcgcatattgcttgcttttgctactaacctcaattttaagctatttcaaatcgatgtcaaaagcgtcttcctcaacgggcctatcaacgagttggtatacgtggagcaaccactgggcttcgaggatccaaaatatcccatcaacgtgtacaagctccacaaggcactctacggtcttaagcaagcccctagagcttggtatgagtgtcttcacaattttcttgtgaaaaacggctttgagatcgggaaagccgattcaactctttttactaaaagatatgataatgatatttttgtgtgccaaatatatgtcgatgacattatatttggttctactaacaagtcttttaatgaagagtttagtaggatgatgaccaagcgttttgagatgtccatgatgggtgaattgaagttcttcctcggccttcaaatcaagcaactcaaggaaggaactttcatttgccaaacaaagtatttaaaggacatgctcaagaagtttggaatggagaatgcgaagccaatccacactcccatgccatcaaatggccacctcgacctcaacgagcaaggtaaagacgtcgaccaaaaggtataccgttccatcattggctcactcctttacctttgtgcatctaggcccgatattatgcttagtgtgtgcatgtgtgcaagatttcaagccgctctgaaggagtgtcaccttgtggccatgaagagaattcttagatatgtgcacacacctaatcttggtctttggtatcctaagggagcgagttttgatctcattggttatgccgatgcggattatgccgggtgcaaagtggataggaaaagcacattgggtacttgctaa

SEQ ID NO: 14487 - DNA, 283 bp, Oryza sativa
  Clone ID: TFbOSC18902j.C1.o2.np
tctacaggccctactccacgtccaagtcggggtagaaaccaaaggaaacccgaaacatgccttcccgagcaagaaaacttcgagacccaacgaaacacagtcggactcggacctgccggtcagatcagccacacaccgccggtctgaccggccctcaaccggtggtctgaccgcccaacacacggcagtcagaccggcccactcggaggaaaccggtagacttccaaatttagtctcccctctaaatccattaagaattttgacagagtctcccctgtaaata

SEQ ID NO: 14488 - DNA, 1317 bp, Oryza sativa
  Clone ID: TFbOSC18902j.C1.o8.gm
atggcgcatcgagagctggtgcacagaacaacaacaccaacggaggcagttatgcctcacaatccagcggagggactttcacaggcgatgcaatgtttctatgtttcacggggcaaacgaagtgaaccacctgtctctcctgaggaagaggttaagttcgaggcttcggattgcctgttccgtggagcattgatcagtgtactcgctgacaatatagtggacgtgtatatgcacatgccttcagggaaggacatgtgggatgcacttgaggccaagttcggagtttctgacgccggcagtgagctgtatgtcatggagcaattctatgactacaagatggtcgatgaccgttctgtagtagaacaagctcatgagattcagatgctggctaaggaacttgagaacaacaactgtgagttgccggacaagtttgtggtgggtggtattattgccaaattgccaccttggtcggactttgccacttttctaaagcacaagagacaagagttcagtgtttctgatctcattggctttttgggtgttgaagagaaggctagggcaaaggacaaccggggcaaaaaggttgagggaggttctagtgccattatggtacagaagaaccctcatgcatcccacaacaacaaaaaagtcatgcctgatgtcaaacccaaggctacaaccaattttaagaagaaaggcaagggaaaggcaaagggagactgcttcgtgtgtggcaagtctaggcattgggccaagtactgtcctgagcgcaaagacataaagtctgccaacatggtcattagcgagggcggaggaacatcggggtacggtcgggagaggttcctccttgttcatggtgttggtacggtcgatctgaagtttacttcgggaaagaccgtgcagctgaagaacgtgcagcatgtcccttcaataaagaagaatctagttagcggctctctactcatgggttatagattcttaatagtaaattctagagtacccgacatgcgtgttggtacaattattgagtccagagatgctacattctttgagaatgaatttcccatgaaaaatacacctagcacttctagtcaaaaaactgtcataccccatgagcactttgcaccgatagaacacaatgatcaaacgcttgagggaaatcctgaggaggataacattgtagatactcgtaagagtaagagacaaagggttgcaaaatcctttggagatgactacattgtatacctcgtggatgacactccaagaaccatagaagaggcatattcatctcctgacgctgactactggaaggaagca

SEQ ID NO: 14489 - DNA, 1437 bp, Oryza sativa
  Clone ID: TFbOSC900359j.C1.o9.gm
atggcgcatcgagagctggtgcacagaacaacaacaccaacggaggcagttatgcctcacaatccagcggagggactttcacaggcgatgcaatgtttctatgtttcacggggcaaacgaagtgaaccacctgtctctcctgaggaagaggttaagttcgaggcttcggattgcctgttccgtggagcattgatcagtgtactcgctgacaatatagtggacgtgtatatgcacatgccttcagggaaggacatgtgggatgcacttgaggccaagttcggagtttctgacgccggcagtgagctgtatgtcatggagcaattctatgactacaagatggtcgatgaccgttctgtagtagaacaagctcatgagattcagatgctggctaaggaacttgagaacaacaactgtgagttgccggacaagtttgtggtgggtggtattattgccaaattgccaccttggtcggactttgccacttttctaaagcacaagagacaagagttcagtgtttctgatctcattggctttttgggtgttgaagagaaggctagggcaaaggacaaccggggcaaaaaggttgagggaggttctagtgccattatggtacagaagaaccctcatgcatcccacaacaacaaaaaagtcatgcctgatgtcaaacccaaggctacaaccaattttaagaagaaaggcaagggaaaggcaaagggagactgcttcgtgtgtggcaagtctaggcattgggccaagtactgtcctgagcgcaaagacataaagtctgccaacatggtcattagcgagggcggaggaacatcggggtacggtcgggagaggttcctccttgttcatggtgttggtacggtcgatctgaagtttacttcgggaaagaccgtgcagctgaagaacgtgcagcatgtcccttcaataaagaagaatctagttagcggctctctactcatgggttatagattcttaatagtaaattctagagtacccgacatgcgtgttggtacaattattgagtccagagatgctacattctttgagaatgaatttcccatgaaaaatacacctagcacttctagtcaaaaaactgtcataccccatgagcactttgcaccgatagaacacaatgatcaaacgcttgagggaaatcctgaggaggataacattgtagatactcgtaagagtaagagacaaagggttgcaaaatcctttggagatgactacattgtatacctcgtggatgacactccaagaaccatagaagaggcatattcatctcctgacgctgactactggaaggaagcagtacgcacctctcatggtcttctcgttcatcagatggacgttaagacagctgtcctaaacggagagctggaggaggagatctatatggatcaaccagacgggtatgtactagaaggttag

SEQ ID NO: 14490 - DNA, 4386 bp, Oryza sativa
  Clone ID: TFbOSC418782j.C1.o3.fg
atggacatctctagggcaaatgaaggctacacgagctgcggcccggtagtcgagatgtcatggcacagggccggtgtcctgctgctaggggctcagtcctgcctacctgtcccggaggttccggccgtaggtggggttgggtcagtactcttgtctatggctaggatgggttggaaactatgtcacgtcttccgtccatatacagttgtgatggccggcagcatcaaccgtcgtggcctggaccttactggctttgttttggagctgcggggcatgtgcgttgtcctggggtatccgcatggagtggactaccagggcaagcagctcctggagcaggagggtgatgatgtagagccccacgctgcctgggaggtcactgtagtggtcctcactggctctcccgagaggacttcgttggcagtcaccgcgggtggagattctttctccgccgcttgccagaacgctgcactcctcgccatcggcactcttcaccagcgctacccggacgagttgcagcactcgccctaccgctaccaccctcgtcgcggaggagcccgcgactacgccaccttcagggatgctagctcggaggatgacgctaccatcatgcacctggcgcgcatggtgcaggcgtacaacgcgacccgtatcaacttccatcatatggtgcgccgtgggttggtcgagaacaacatgaagatcctggagctgcgtcaggagaatctgcagctaaagaaggacttggacgcagtagaggcgcagctgtgtcagctcaagatcgcccagggagagatggtgacaaccaggagaagtgctgctttcctccatcacatccaaaatccgccacagcataatgctccacctctaccaccacccccgcaacattctaaactcgcagagttcctccgcatccgcccgcctatcttctctagctccaataaccccgtggatgctttggattggttgcatgctgtggggaaaaagttggataccgtgcagtgcaatgatgaggagaaagtcatcttcgccgcccatcaactgcaggggcccgcatctctatggtgggaccacttccaggctacgcagccagaaggacagcctattacttgggcccgcttcaccgccgctttccggaggacccatgtgccggccggagtcatggcccttaagaaaagggaattccgagagttgaagcaaggcaaccgctctgtgatggagtatttgcatgagtttaacaacctggcccgggtccgctacaccattccctatccagggggatcctcctcgcagcagcagcagcagcagcaaccacgctccgcgccccgacctcaatttgtggtgcgcgtcccacagccacagcaacagcagagtcagcaagggacccgtgcgccccgtcctcctgcgcctgttgtgcagcctggtcaaggccgcagagacgctcaaggtcagcagcgtctgtgcttcaactgcttcgagtccgggcactttgcggataaatgcccaaagccgaggcgccagcaaggccaagcgcctccccgccccaacaacggtggtaaggatgtcattcggggtcgtgtgaaccacgtgactgccgaggatgtgctgacaactccagacgtcatcgttggagtagtggattgcgcaaggcgcactgtcactctgtatcgggggctggaacaaccggttgttttctttgcacccccaacctctgtcggcagttcagaacttcatcagataggactgtcggaaatccccatcgtcagagagttcggagacgtgtttccggaagaactacccggtatgtcgcccaagcgagagattgagttccggatagatctcgctccaggaaccactcctctgtacaagcgaccctaccgtatggcagcaaatgaactagccgaagtagagagacagttggaagagttgaaagaaaagggatatatatggccgagcacttccccctggggtgctcctgtgatttttgtggaaaagaaagacaagacaaagaggatgtgcgttgactacagagctctcaatgaagttactatcaaaaacaggtaccctcttccccggattgatgatctgttcgatcagcttaaaggtgccactgtcttttctaaaatcgatcttcgttctggatatcaccaattgcgtattcgtgaagaagatatcccgaagaccgcattcaccacgcgatacggactgtatgaattcacggtgatgtcgttcggtctaaccaatgatcctgccttcttcatgaacttaatgaacaaagtgttcatggaatacttggataagtttgttgtggttttcattgacgacattctggtgtactcacaatcagaggaagaccatcagcagcatctccgtctggtgttgggaaagttgcgggaacaccaattgtatgccaagctcagcaagtgtgagttctggttgtccgaagtcaagttcttagggcacgtgatatctgctaaaggagttgcggtggatcccgacacggtgaccgccgtcactgattggaagcaacccaagacagtcactcaagtccgcagctttttgggtttggccggcccgcaatgcgagaaggcgttccaaactctcaaagaaaagctggtttcctcgccagtgttgatcttaccggatactcgcaaggacttcctggtgtactgtgacgcttcgcgccaaggattggggtgcgtattaatgcaggaaggtcatgtggtagcctatgcctcacgccagctacggccccatgaaggcaactaccctacccatgatttggagttggccgctgtggttcatgctctaaagatctggcggcactatctcattgggaatcgctgtgaaatatatactgatcataagagtttgaaatacatcttcactcagtcggatctgaatcttcggcagaggagatggttagaactcataaacgattatgatgtgggaattcactatcatcctggtaaggccaacgtggtcgccgacgctctaagtcgaaaaagccgttgcaacactcttggcgtccgtgacattccaccggaacttaatcaacagatggaagccctgaacctaagcatagttggtcatggattcttggctacgctggaagccaagcctaccttgctcgatcaaatccgcgaggctcagaagaatgatctagatatgcatgggatcctcaagaatatgaaacagggtaaagccgctggtttcacagaggatgaacacggaaccctatggaacggaaatcgggtatgcgttccagacgacagggaacttaaaaagttgatacttcaggaagctcatgaaagtccctattccatccatcctggcagcacgaagacgtacttggacttgaaagaaaaatattggtgggttagtatgaagcgggaaattgcagagttcgtggccctttgtgatgtgtgccagcgtgtcaaggcagagcaccaacgaccggccggacttctccaacctctccaagtaccagaatggaaatgggatgaaattgggatggatttcatcaccggacttccaaaaacccagggtggttatgattctatatgggtagtcgtggatcgactaaccaaggtagctcggtttattcctgtgaagaccacctatggagggaacaaactagctgaactctacttcgctaggatcgtgagtctccatggcgttcctaagaaaattgtatctgataggggaagccaattcacctctcacttctggaagaagctccaagaagagttgggtacccgattaaatttcagcaccgcgtatcacccgcagacagatggacagaccgagcgtctaaatcagatcctggaagatatgctctgtgcctgtgttctagatttcgggaagacctgggataagagtctcccctatgccgagttctcctacaataacagctaccaagccagcatacaaatggcaccctatgaagcgttgtatggccgcaaatgccggacaccgctattgtgggaccaagttggggaaagccaagtgttcgggactgatatcctgagagaagctgaagctaaagtcaaaaccattcgggataatctaaaggtggcacagtcccggcagaagagctatgcagataaccgacgccgtaacctggaatttgcagtggatgactttgtgtaccttagggtcacgccattgcggggtgtacacaggttccagacgaaagggaagctcgcacctcggttcgtgggtcctttctgtatcattgctcgacgcggagaagtcgcttaccagttggagctgcccgcatccttgggcaacgtgcatgatgtttccatgtgtcgcaactcaagaaatgtcttcgagtgccatccgagcaggccgattcagagcaaattgaagttcgcgaagacttga

SEQ ID NO: 14491 - DNA, 2096 bp, Oryza sativa
  Clone ID: TFbOSC10766j.C1.o1.fg
atggcaccagctcagtcaggtccgccagctgtgtcagctcagtcagaacaacccaagaagggggctgtaggaaagccaggaccctgcttcaactgtggcaagcacggccactttgctggcaagtgtccgaagctgaatcgcactggacccaggttcatccaggcccgcgccaatcatgtgtctgcagaggaagcacaggcagcaccagaggtcgtgttgggcacgtttccagtgaactcatatccagcaacagttctctttgattcaggtgcctcgcattctttcatttccaaaagatttgctgggacacatggattatcggtagtggaacttaaaataccgatgcaggttcatacccctggaaatgatatgaggacagcacactactgcccctcggtgactatagagatcaaaagatcaccgtttctatccaacctcatccttctcgaatctaaagacctggatgtcattcttggaatggattggttgaccagaaacaagggagtgattgactgcgcaagccgcaccatcaccctaaccaacgacaaaggggagaagatcaccttccgttccccagcgtcgcagaagtccgtagcgagtctgaatcaggctgctattgagggtcagacagaaacagtggagaaaagttccaggaagttggaggatattcctatagtacaagagtatcctgaggtgttcccagaagacctcactacaatgccaccgaagagagaaatcgagttccggatcgatttggcacccgggactgctccaatttacaagaggccgtacagaatggcagctaatgagctagcagaggtcaagaagcaggttgacgaacagctgcagaaagggtacatccgaccgagtacttcaccttggggtgctccggttatctttgtggagaagaaagacaagaccaagaggatgtgcgtggattatcgcgcccttaatgaggtcacaatcaagaacaaatatccgttgccaagaattgatgacctgtttgatcagctaaaaggagctaaggtgttttccaagatagacctacgatcaggctatcatcagttgagaattcgggaagaggatattcccaagacagccttcaccactcggtatgggttgtttgagtgcacggttatgtcctttggactcaccaatgcaccggctttcttcatgaacttgatgaacaaagtgtttatggagtttcttgacaagtttgtcgtggtattcattgacgacatacttatttattcaaaatcagaagaggaacatgagcaacatcttcgtctggtacttgagaaattgaaggagcaccagttatatgccaagtttagcaagtgtgacttctggttatcggaggtcaaatttctgggtcacgtcatttctgctcaaggcgtggtagtggacccatcaaatgtggaatcagttacaaagtggaccccaccaaagacagtttctcagatccggagttttcttggacttgcgggctattaccgtcggttcatcgaaaatttctctaagattgccaggcccatgacacagttgctaaagaaagatgaaaaattcaaatggtcagctgagtgcaaccaaagttttgaagaactcaagaagaagttagtctctgcaccagttctaattctgccagatcagacaaaagacttccaggtctactgtgatgcatctcgccaaggattgggatgtgtgttgatgcaagaaggcagagtggttgcatatgcttcgcgacagttgcgtccacatgaggccaattatcccactcatgaccttgagttggcagcagtggttcatgctctgaaaatctggcggcactatcttattggcaaccgctgtgaagtttacactgatcataagagcctgaagtacatcttcacccagcccgacttaaatctccggcaacgaagatggctggagctgattaaagattatgacatggggatacactatcatccaggcaaagcaaatgtggtagcagatgctctgagcagaaagagctattgcaatgcagtatgtaccgaaggcatgtgtgacaaattgcagcaagatcttgagcacctaaatttgggcatcgtagaacacgg

SEQ ID NO: 14492 - DNA, 4371 bp, Oryza sativa
  Clone ID: TFbOSC12547j.C1.o1.fg
atgatgaagacaaggaatgatccccgtgactccaacgacgccagtggcagcgaagagcagaccgatggagctcatgtcagtggtgcatctggcagcagatcatctccaccgcccgaaaacccaacagtcactcaaatgatgacaatgatgatgcaacagatgcagcaacattaccatcagatgttgcagcaggcgcaacagaaccagcagtttggtcctccaccatcacacgtgtccaaactgttagactttcttcgtatccagccacccactttctcaagcaccaccaacccaatggaggccaatgactggctccgtgctattgagaagaagctgaacctattgcaatgcaacgaccgagagaaagttgcttttgctacacaccagttgcaaggtcccgcttctgcctggtgggataactacgtggcgacccgtctagatgcaacggaggttacttgggcagagttttgtcaaagcttcaggaaggcacagattcctgaagggattatggcacaacagaagagagagttccgtgcattgcaacaaggaaccagaacggttacagagtacctgcacgagttcaaccgcctcgcgcgctacgctcctgaggacgtgcgcaccgatgctgagaagcaggagaagtttttgtttgggctcgacgatgaattgaccaaccagctaatctccggagtctatgaggactttgagaagcttgtggacaaggctatccgccaggaagagcaacgcaacaaaatggaccgaaaaagaaaggcagctcagatcagctttcctcaggggaacaatcagaagcctcgcttcatgacgggacagctaggtgggccttccaccctgatcgtctgtcagcaccgtccctatcacccgagtaacttcaacaacgactacaacggtggcagtcacaacaacagtaagcagcacaaccacaactcgactccacccccactaatggcaccagctcagtcagatccgccagctgtgtcagttcagtcagaacaacccaagaagggggctgtaggaaagccaggaccctgcttcaactgtggcaagcacggccactttgctggtaagtgtccgaagctgaatcgcactagacccaggttcatccaggcccgcgccaatcatgtgtctgcagaggaagcacaggcagcaccagaggtcgtgttgggcacgtttccagtgaactcatatccagcaacagttctctttgattcaggtgcctcgcattctttcatttccaaaagatttgctgggatgcatggattatcggtagtggaacttaaaataccgatgcaggttcatacccctggaaatgatatgaggacagcacactactgcccctcggtgactatagagatcaaaagatccccgtttctatccaacctcatccttctcgaatctaaagacctagatgtcattctcggaatggattggttgaccagaaacaagggagtgattgactgcgcaagccgcaccatcaccctaaccaacgacaaaggggagaagatcaccttccgttctccagtgtcgcagaagtccgtagcgagtctgaatcaggctgctattgagggtcagacagaaacagtggagaaaagtcccaggaagttggaggatattcctatagtacaagagtatcctgaggtgttcccagaagacctcactacaatgccaccgaagagagaaatcgagttccggatcgatttggcacccgggactgctccaatttacaagaggccgtacagaatggcagctaatgagctagcagaggtcaagaagcaggttgacgaacagctgcagaaagggtacatccgaccgagtacttcaccttggggtgctccggttatctttgtggagaagaaagacaagactaagaggatgtgcgttgattatcgggcccttaatgaggtcacaatcaagaacaaatatccgttgccaagaattgatgacctgtttgatcagctaaaaggagctaaggtgttctccaagatagacctgcgatcaggctatcaccagttgagaattcgggaagaggatattcccaagacagccttcaccactcggtatgggttgtttgagtgcacggttatgtcctttggactcaccaatgcaccggctttcttcatgaacttgatgaacaaagtgtttatggagtttcttgacaagtttgtcgtggtgttcattgacgacatacttatctattccaagtctgaaaaacaacatgagcaacatcttcgtctggtactcgagaaattgaaggagcaccagttatatgccaagtttagcaagtgtgacttctggttatcggaggtcaaatttctgggtcacgtcatttctgctcaaggcgtggcagtggatccatcaaatgtggaatcagttaccaagtggaccccaccaaagacagtttctcaaatccggagttttcttggacttgcgggctattaccgtcggttcatcgaaaatttctccaagattgccaggcccatgacacagttgctaaagaaagatgaaaaattcaagtggtcggctgagtgcaaccaaagttttgaagaactcaagaagaagttagtctctgcaccagttctaattctgccagatcagacaaaagacttccaggtatactgtgatgcatctcgccaaggattgggatgtgtgttgatgcaagaaggcagagtggtcgcatatgcttcgcgacagttgcgtccacatgagaccaattatcccactcatgaccttgagttggcagcagtggttcatgctctgaaaatctggcggcactatcttattggcaaccgctgtgaagtttacactgatcataagagcctgaagtacatcttcacccagcccgacttaaatctccggcaacgaagatggctggagttgattaaagattatgacatggggatacactatcatccaggcaaagcaaatgtggtagcagatgctctgagcagaaagagctattgcaatgcagtatgtaccgaaggcatgtgtgacaaattgcagcaagatcttgagcacctaaatttgggcatcgtggaacacgggttcgtagctgccctagaggcacggcctacactcgtggatcaagtcagagcagctcaagtaaatgatcctgaaatagctgagctgaaaaagaatatgagggttggaaaagctcgagatttccatgaggatgagcatggcacaatctggttgggagagagattgtgtgtgcctgacgacaaagaactgaaggatctcatactaacagaagctcatcaaactcagtattcaattcatcccggcagtactaaaatgtaccaggacctcaaagagaaattctggtgggtcagcatgagaagagagatagccgaattcgtcgcactctgcgatgtttgtcagcgagtcaaagcagaacatcagaggcccgcaggactgctacaaccccttcagatcccggaatggaaatgggaagaaatcggaatggatttcataacaggtttgcccaggacatcgtcggggcacgattcaatctgggtggtcgtggatcgactcaccaaagttgctcatttcattccagtacacactacctatacggggaaaaggttggcagagctgtacttagcaaggatcatgtgtctgcatggggtacctaagaagatagtatctgatcgggggagtcagttcacttcaaaattttggcagaaactgcaagaagaattggggactcgtttgaatttcagcacggcttatcatccgcaaactgatggtcagaccgaaagggtcaatcagatcttggaagatatgctgcgagcgtgtgcgctcgattttggtggagcatgggataaaagtctgccttatgcggaattctcttacaacaacagttatcaagccagtttgcaaatggcaccgtttgaagcgttgtacggacggaaatgccgcactccgctcttctgggatcaaactggagaacgccaattgtttgggacggaagtattaactgaagcagaggagaaagtcagaaccatcagagaaaggctaagaattgcccagtctcggcagaagagttatgctgataaccgccgaagagagcttactttcgaagcaggggattatgtgtaccttcgtgtcactccgctccgaggagtacaccgttttcagacgaaaggcaagctggcaccacgcttcgtgggaccatacaaaattttggaacgaaggggagaagttgcttatcagctagaacttccatccaacatgatcggcatccatgacgtgttccacgtttcccaactaaagaagtgcttaagggtacctgaggaacaggctgattcggaacacatcgatatccaggaggacctgacctatgtggagaagccg

SEQ ID NO: 14493 - DNA, 170 bp, Oryza sativa
  Clone ID: TFbOSC12547j.C1.o1.gm
gttgcttcctcttccgaatgatgactccactgaactcggcaaaacctggtgaccttgtttctggttctcctttcgctggtgtcaagtatgcgaaccggcttctccacataggtcaggtcctcctggatatcgatgtgttccgaatcagcctgttcctcaggtacccttaa

SEQ ID NO: 14494 - DNA, 4353 bp, Oryza sativa
  Clone ID: TFbOSC1521j.C1.o1.fg
atggtgaagacaagggacgatccccgtgactccaacgacgccagtggcagcgaagagcagaccgatggagctcatgtcagtggtgcatctggcagcagatcatctccaccgcccgaaaacccaacagtcactcaaatgatgacaatgatgatgcaacagatgcagcaacattaccatcagatgttgcagcaggcgcaacagaaccagcagtttggtcctccaccatcacacgtgtccaaactgttagactttcttcgtatccagccacccactttctcaagcaccaccaacccaatggaggccaacgactggcttcgtgctattgagaagaagctgatccttctgcaatgtaacgaccgagagaaggttgcttttgctacacatcagttgcaaggtcctgcttctgcttggtgggatcactacgtggtgacccgtccagatgcaacggaggttacttgggcagagttttgtcaaagcttcaggaaggcacagattcccgaagggattatggcacaacagaagagagagttccgtgcattgcaacaaggaaccagaacggttacagagtacctgcacgagttcaaccgcctcgcgcgctacgctcccgaggacgtgcgcaccgatgctgagaagcaggagaagtttttgtttgggctcgatgatgaattgaccaaccaactaatctccggagtctatgaggactttgagaagcttgtggacaaggctatccgccaggaagagcaacgcaacaaaatagaccgaaaaagaaagacagctcagatcagctttcctcaggggaacaatcagaagcctcgtttcatgacgggacagctaggtgggccttccaccctgatcgtctgtcagcaccgtccctatcgcccgagtaacttcaacaacgattacaatggtggcagtcacaacaacagtaagcagcacaaccacaactcgactccacccccactaatggcaccagctcagtcagatccgccagctgtgtcagttcagttagaacaacccaagaagggggctgtaggaaagccaggaccctgcttcaactgtggcaagcacggccactttgctggcaagtgtccgaagctgaatcgcactggacccaggttcatccaggcccgcgccaatcatgtgtctgcagaggaagcacaggcagcaccagaggtcgtgttgggcacgtttccagtgaactcatatccagcaacagttctctttgattcaggtgcctcgcattctttcatttccaaaagatttgctgggacacatggattatcggtagtggaacttaaaataccgatgcaggttcatacccctggaaatgatatgaggacagcacactactgcccctcggtgactatagagatcaaaagatcaccgtttctatccaacctcatccttctcgaatctaaagacctggatgtcattcttggaatggattggttgaccagaaacaagggagtgattgactgcgcaagccgcaccatcaccctaaccaacgacaaaggggagaagatcaccttccgttccccagcgtcgcagaagtccgtagcgagtctgaatcaggctgctattgagggtcagacagaaacagtggagaaaagtcccaggaagttggaggatattcctatagtacaagagtatcctgaggtgttcccagaagacctcactacaatgccaccgaagagagaaatcgagttccggatcgatttggcacccgggactgctccaatttacaagaggccgtacagaatggcagctaatgagctagcagaggtcaagaagcaggttgacgaacagctgcagaaagggtacatccgaccgagtacttcaccttggggtgctccggttatctttgtggagaagaaagacaagaccaagaggatgtgcgtggattatcacgcccttaatgaggtcacaatcaagaacaaatatccgttgccaagaattgatgacctgtttgatcagctaaaaggagctaaggtgttttccaagatagacctacgatcaggctatcatcagttgagaattcgggaagaggatattcccaagacagccttcaccactcggtatgggttgtttgagtgcacggttatgtcctttggactcaccaatgcaccggctttcttcatgaacttgatgaacaaagtgtttatggagtttcttgacaagtttgtcgtggtattcattgacgacatacttatttattcaaaatcagaagaggaacatgagcagcatctccgcctggtactcgagattttgaaggagcaccagctatatgccaagtttagcaagtgtgacttctggttatcggaggtcaaatttctgggtcacatcatttctgctcaaggcgtggcagtggatccatcaaatgtggagtcagttacaaagtggaccccaccaaagacagtttctcagatccggagttttcttggacttgcgggctattaccgtcggttcatcgaaaatttctctaagattgccaggcccatgacacagttgctaaagaaagatgaaaaattcaaatggtcagctgagtgcaaccaaagttttgaagaactcaagaagaagttagtctccgcaccagttctaattctgccagatcagacgaaagacttccaggtctactgtgatgcatctcgccaaggattgggatgtgtgttgatgcaagaaggcagagtggttgcatatgcttcgcgacagttgcgtccacatgaggccaattatcccactcatgaccttgagttggcagcagtggttcatgctctgaaaatctggcggcactatcttattggcaaccgctgtgaagtttacactgatcataagagcctgaagtacatcttcacccagcccgacttaaatctccggcaacgaagatggctggagttgattaaagattatgacatggggatacactatcatccaggcaaagcaaatgtggtagcagatgctctgagcagaaagagctattgcaatgcagtatgtaccgaaggcatgtgtgacaaattgcagcaagatcttgagcacctaaatttgggcatcgtagaacacggatacgtagctgccctagaggcccggcctacgctcgtggatcaagtcagagcagctcaggtaaatgatcctgaaatagctgagctaaaaaaaaatatgagggtcggaaaagcccgagatttccatgaggatgagcatggcacaatctggttgggagaaagattgtgtgtgcctgacgacaaagaactgaaggatctcatactcacagaagctcatcaaactcagtattcaattcatcccggcagtactaaaatgtaccaggacctcaaagagaaattctggtgggtcagcatgagaagagagatagccgaattcgtcgcactctgcgatgtttgtcagcgagtcaaagcagaacatcagaggcccgcaggactgctacaaccccttcagatcccggaatggaaatgggaagaaatcggaatggatttcataacaggtttgcccagaacatcgtcggggcacgattcaatctgggtggtcgtggatcgactcaccaaagttgctcattttattccagtacacactacctatactgggaaaaggttggcagagctttatctttcaagaatcatgtgtttgcatggggtacctaagaagattgtatctgatcgaggaagtcaattcacttcaaagttttggcagaaactgcaagaagaattggggactcgtttgaatttcagcacggcttatcatccacaaacagatggtgagcgccaactgtttgggacagaagtgttaaccgaagcagaggagaaagtcaggaccgtcaggaaaagactgcgaatcgcccagtctcggcaaaagagttatgctgataaccgccgaagagagcttactttcgaagcaggggattatgtgtatcttcgtgtcactccgctccggggagtacatcgttttcagacgaaaggcaagttggcaccacgcttcgtgggaccatacaaaatcttggaacgaaggggagaagttgcttatcagctagaacttccatccaacatgatcggcatccatgacgtgttccacgtgtcccaattaaagaagtgtttaagggtacctgaagaacaggctgattcggaacacattaatatccaggaggacctaacttatgtggagaagccggttcgcatacttgataccagcgaaaggagaaccagaaacaaggttacccggttttgccgagttcagtggagtcatcattcggaagaggaagcaacctgggaaagggaagatgagttgaaagccgcccatccgcatctcttcaccagctcctccgaatctcggggccgagattccgtttaa

SEQ ID NO: 14495 - DNA, 4407 bp, Oryza sativa
  Clone ID: TFbOSC16872j.C1.o1.fg
atgatgatgcaacagatgcagcaacattaccatcagatgttgcagcaggcgcaacagaaccagcagtttggtcctccaccatcacacgtgtccaaactgttagactttcttcgtatccagccacccactttctcaagcaccaccaacccaatggaggccaatgactggctccgtgctattgagaagaagctgaacctattgcaatgcaacgaccgagagaaagttgcttttgctacacaccagttgcaaggtcccgcttctgcctggtgggataactacgtggcgacccgtctagatgcaacggaggttacttgggcagagttttgtcaaagcttcaggaaggcacagattcctgaagggattatggcacaacagaagagagagttccgtgcattgcaacaaggaaccagaacggttacagagtacctgcacgagttcaaccgcctcgcgcgctacgctcctgaggacgtgcgcaccgatgctgagaagcaggagaagtttttgtttgggctcgacgatgaattgaccaaccagctaatctccggagtctatgaggactttgagaagcttgtggacaaggctatccgccaggaagagcaacgcaacaaaatggaccgaaaaagaaaggcagctcagatcagctttcctcaggggaacaatcagaagcctcgcttcatgacgggacagctaggtgggccttccaccctgatcgtctgtcagcaccgtccctatcacccgagtaacttcaacaacgactacaacggtggcagtcacaacaacagtaagcagcacaaccacaactcgactccacccccactaatggcaccagctcagtcagatccgccagctgtgtcagttcagtcagaacaacccaagaagggggctgtaggaaagccaggaccctgcttcaactgtggcaagcacggccactttgctggtaagtgtccgaagctgaatcgcactagacccaggttcatccaggcccgcgccaatcatgtgtctgcagaggaagcacaggcagcaccagaggtcgtgttgggcacgtttccagtgaactcatatccagcaacagttctctttgattcaggtgcctcgcattctttcatttccaaaagatttgctgggatgcatggattatcggtagtggaacttaaaataccgatgcaggttcatacccctggaaatgatatgaggacagcacactactgcccctcggtgactatagagatcaaaagatccccgtttctatccaacctcatccttctcgaatctaaagacctagatgtcattctcggaatggattggttgaccagaaacaagggagtgattgactgcgcaagccgcaccatcaccctaaccaacgacaaaggggagaagatcaccttccgttctccagtgtcgcagaagtccgtagcgagtctgaatcaggctgctattgagggtcagacagaaacagtggagaaaagtcccaggaagttggaggatattcctatagtacaagagtatcctgaggtgttcccagaagacctcactacaatgccaccgaagagagaaatcgagttccggatcgatttggcacccgggactgctccaatttacaagaggccgtacagaatggcagctaatgagctagcagaggtcaagaagcaggttgacgaacagctgcagaaagggtacatccgaccgagtacttcaccttggggtgctccggttatctttgtggagaagaaagacaagactaagaggatgtgcgttgattatcgggcccttaatgaggtcacaatcaagaacaaatatccgttgccaagaattgatgacctgtttgatcagctaaaaggagctaaggtgttctccaagatagacctgcgatcaggctatcaccagttgagaattcgggaagaggatattcccaagacagccttcaccactcggtatgggttgtttgagtgcacggttatgtcctttggactcaccaatgcaccggctttcttcatgaacttgatgaacaaagtgtttatggagtttcttgacaagtttgtcgtggtgttcattgacgacatacttatctattccaagtctgaaaaacaacatgagcaacatcttcgtctggtactcgagaaattgaaggagcaccagttatatgccaagtttagcaagtgtgacttctggttatcggaggtcaaatttctgggtcacgtcatttctgctcaaggcgtggcagtggatccatcaaatgtggaatcagttaccaagtggaccccaccaaagacagtttctcaaatccggagttttcttggacttgcgggctattaccgtcggttcatcgaaaatttctccaagattgccaggcccatgacacagttgctaaagaaagatgaaaaattcaagtggtcggctgagtgcaaccaaagttttgaagaactcaagaagaagttagtctctgcaccagttctaattctgccagatcagacaaaagacttccaggtatactgtgatgcatctcgccaaggattgggatgtgtgttgatgcaagaaggcagagtggtcgcatatgcttcgcgacagttgcgtccacatgagaccaattatcccactcatgaccttgagttggcagcagtggttcatgctctgaaaatctggcggcactatcttattggcaaccgctgtgaagtttacactgatcataagagcctgaagtacatcttcacccagcccgacttaaatctccggcaacgaagatggctggagttgattaaagattatgacatggggatacactatcatccaggcaaagcaaatgtggtagcagatgctctgagcagaaagagctattgcaatgcagtatgtaccgaaggcatgtgtgacaaattgcagcaagatcttgagcacctaaatttgggcatcgtggaacacgggttcgtagctgccctagaggcacggcctacactcgtggatcaagtcagagcagctcaagtaaatgatcctgaaatagctgagctgaaaaagaatatgagggttggaaaagctcgagatttccatgaggatgagcatggcacaatctggttgggagagagattgtgtgtgcctgacgacaaagaactgaaggatctcatactaacagaagctcatcaaactcagtattcaattcatcccggcagtactaaaatgtaccaggacctcaaagagaaattctggtgggtcagcatgagaagagagatagccgaattcgtcgcactctgcgatgtttgtcagcgagtcaaagcagaacatcagaggcccgcaggactgctacaaccccttcagatcccggaatggaaatgggaagaaatcggaatggatttcataacaggtttgcccaggacatcgtcggggcacgattcaatctgggtggtcgtggatcgactcaccaaagttgctcatttcattccagtacacactacctatacggggaaaaggttggcagagctgtacttagcaaggatcatgtgtctgcatggggtacctaagaagatagtatctgatcgggggagtcagttcacttcaaaattttggcagaaactgcaagaagaattggggactcgtttgaatttcagcacggcttatcatccgcaaactgatggtcagaccgaaagggtcaatcagatcttggaagatatgctgcgagcgtgtgcgctcgattttggtggagcatgggataaaagtctgccttatgcggaattctcttacaacaacagttatcaagccagtttgcaaatggcaccgtttgaagcgttgtacggacggaaatgccgcactccgctcttctgggatcaaactggagaacgccaattgtttgggacggaagtattaactgaagcagaggagaaagtcagaaccatcagagaaaggctaagaattgcccagtctcggcagaagagttatgctgataaccgccgaagagagcttactttcgaagcaggggattatgtgtaccttcgtgtcactccgctccgaggagtacaccgttttcagacgaaaggcaagctggcaccacgcttcgtgggaccatacaaaattttggaacgaaggggagaagttgcttatcagctagaacttccatccaacatgatcggcatccatgacgtgttccacgtttcccaactaaagaagtgcttaagggtacctgaggaacaggctgattcggaacacatcgatatccaggaggacctgacctatgtggagaagccggttcgcatacttgacaccagcgaaaggagaaccagaaacaaggtcaccaggttttgccgagttcagtggagtcatcattcggaagaggaagcaacctgggaaagggaagatgagttgaaagccgcccatccgcacctcttcaccagctcctccgaatctcggggccgagattccgtttaa

SEQ ID NO: 14496 - DNA, 170 bp, Oryza sativa; identical to SEQ ID NO: 14493
  Clone ID: TFbOSC16872j.C1.o1.gm

SEQ ID NO: 14497 - DNA, 1098 bp, Oryza sativa
  Clone ID: TFbOSC25996j.C1.o4.gm
atggtgaagacaaggaatgatccccgtgactccaacgacgccagtggcagcgaagagcagaccgatggagctcatgtcagtggtgcatctggcagcagatcatctccaccgcccgaaaacccaacagtcactcaaatgatgacaatgatgatgcaacagatgcagcaacattaccatcagatgttgcagcaggcgcaacagaaccagcagtttggtcctccaccatcacacgtgtccaaactgttagactttctctgtatccagccacccactttctcaaacaccaccaacccaatggaggccaacgactggctccgtgctattgagaagaagctgaacctactgcaatgcaacgaccaagagaaagttgcttttgctacacaccagttgcaaggtcccgcttctgcctggtgggataactacgtggcgacccgtctagatgcaacggaggttacttgggcagagttttgtcaaagtttcaggaaggcacagattcctgaagggattatggcacaacagaagagagagttccgtgcgctccaacaaggaaccatgtcagttacagagtacttgcatgagttcaaccgccttgcacgctatgctcctgaggacgtgcgcaccgatgctgagaagcaggagaagtttttatttgggctcgacgatgaattgaccaaccagctaatctccggagtttatgaggactttgagaagcttgtggacaaggctattcgtcaggaagagcaacgcaacaaaatggaccgaaaaagaaaggcagctcagatcagctttcctcaggggaacaatcagaagcctcgcttcatgacgggacagctaggtgggccttccaccctgatcgtctgtcagcaccgtccctatcacccgagtaacttcgacaacgactacaacggtggcaggcacaacaacaaacaacccaagaagggggctgtaggaaagccaggaccctgcttcaactgtggcaagcacggccactttgctggcaagtgtccgaagctgaatcgcactggacccaggttcatccaggcccgcgccaatcatgtgtctgcagaggaagcacaggcagcaccagaggtcgtgtag

SEQ ID NO: 14498 - DNA, 4347 bp, Oryza sativa
  Clone ID: TFbOSC27228j.C1.o1.fg
atggtgaagacaaggaatgatccccgtgactccaacgacgccagtggcagcgaagagcagacagatgaagctcataccagtggtgcacctggcagcagttcatctccgccgcccgagaacccaacagtcactcagatgatgacaatgatgatgcaacagatgcagcaacattaccatcagatgttgcagcaggcgcatcagaaccagcagtttggtcctccaccatcacacgtgtccaaactgttagactttcttcgtattcagccacccactttctcaagcaccaccaacccaatggaggccaacgactggctccgtgctattgagaagaagctgaacctactacaatgcaacgaccaagagaaagttgcttttgctacacaccagttgcaaggtcccgcttctgcctggtgggataactacgtggtgacccgtccagatgcaacgaaggttacttgggcagagttttgtcaaaactttaggaaggtacagattcctgaagggattatggcacaacagaagagagagttccgtgcattgcaacaaggaaccagaacggttacagagtatctgcacgagttcaaccgcctcgcgcgctacgctcctgaggacgtgcgcaccgatgctgagaagcaggagaagtttttttttgggctcgatgatgaattgaccaaccagctaatctccggagtctatgaggactttgagaagcttgtggacaaggctatccgccaggaagagcaacgcaacaaaatggaccgaaaaagaaaggcagctcagatcagctttcctcaggggaacaatcagaagcctcgcttcatgacgggacagctaggtgggcctcccaccctgatcgtctgtcagcaccgtccctatcacccgagtaacttcaacaacgattacaacggtggcagtcacaacaacagtaagcagcacaaccacaactcgactccacccccactaatggcaccagctcagtcagatccgccagctgtgtcagctcagtcagaacaacccaagaagggggctgtaggaaagccaggaccatgcttcaactgtggcaagcacggccactttgctggcaagtgtccgaagctgaatcgcactagacccaggttcatccaggcccgcgccaatcatgtgtctgcagaggaagcacaggcagcaccagaggtcgtgttgggcacgtttccagtgaactcatatccagcaacagttctctttgattcaggtgcctcgcattctttcatttccaaaagatttgctgggacacatggattatcggtagtggaacttaaaataccgatgcaggttcatacccctggaaatgacatgagggcagcacattattgcccctcggtgactatagagatcaaaagatcaccgtttctatccaacctcatccttctcgaatctaaagacctagatgtcgttctcggaatggattggttgaccagaaacaagggagtgattgactgcgcaagccgcaccatcaccctaaccaacgacaaaggggagaagatcaccttccattccccagcatcgcagaagtccgtagcgagtctgaatcaggctgctattgagggtcagacagaaacagtggagaaaagtcccaggaagttggaggatattcctatagtacaagagtatcctgaggtgttcccagaagacctcactacaatgccaccgaagagagaaatcgagttccggatcgatttggcacccgggactgctccaatctacaagaggccgtacagaatggcagctaacgagctagcagaagtcaaaaagcaagttgacgaacagctgcagaaagggtacatccgaccgagtacttcaccttggggtgctccggtgatctttgtggagaagaaagacaagactaagaggatgtgcgtggattatcgcgcccttaatgaggtcacaatcaagaacaaatatccgttgcccagaattgatgacctgtttgatcagctaaaaggagctaaggtgttttccaagatagacctgcgatcaggctatcatcagttgagaattcgggaagaggatattcccaagacagccttcaccactcggtatgggttgtttgagtgcacggttatgtcctttggactcaccaatgcaccggctttcttcatgaacttgatgaacaaagtgtttatggagtttcttgacaagtttgtcgtggtattcattgacgacatacttatttattcaaaatcagaagaggaacatgagcagcatctccgtctggtactcgagaaattgaaggagcaccagctatatgccaagtttagcaagtgtgacttctggttatcggaggtcaaatttctgggtcacgtcatttctgctcaaggcatggcagtggatccatcaaatgtggaatcagttacaaagtggaccccaccaaagacagtttctcaaatccggagttttcttggacttgcgggttattaccgtcggttcatcgaaaatttctctaagattgccaggcccatgacacagttgctaaagaaagatgaaaaattcaaatggtcagctgagtgcaaccaaagttttgaagaactcaagaagaggttagtctctgcaccagttctagttctgccagatcagacaaaagatttccaagtctactgtgatgcatcccgccaaggattgggatgtgtgttgatgcaagaaggcagagtggtcgcatatgcttcgcgacagttgcgcccacacgagaccaattatcccactcatgaccttgagttggcagcagtggttcatgctctgaaaatctggcggcactatcttattttcaaccgctgtgaagtttacactgatcataagagcctgaagtacatcttcacccagcccgacttgaatctccggcaacgaagatggctagagttgattaaagattatgacatggggatacactatcatccaggcaaagcaaatgtggtagcagacgctctaagcagaaagagctattgcaatgcagtatgtattgaagacatgtgtgacaaattgcagcaagatcttgagcacctaaatttgggcatcgtggaacacgggttcgtagctgccctagaggcacggcctacgctcgtggatcaagtcagagcagctcaggtaaatgatcctgaaatagctgagctaaaaaagaatatgagggttggaaaagcccgagatttccatgaggatgaacatggcacaatctggttgggagaaagattgtgtgtgcctgacgacaaagaactgaaggatctcatactcacagaagctcatcaaactcattattcaattcatcccggtagtactaaaatgtaccaggacctcaaagagaaattctggtgggtcagcatgagaaaggaaatagccgaattcgtcgcactctgcgatgtttgccagttggcagagctttacctttcaagaatcatgtgtttgcatggggtacctaagaagattgtatctgatcgaggaagtcaattcacttcaaagttctggcagaaactgcaagaagaattggggactcgtttgaatttcagcacggcttatcatccgcaaacagatggtcagaccgagcgagtaaatcaaatcttggaagatatgttgagagcttgtgcacttgactttggtggagcctgggataaaagtctaccgtatgcggaattctcttacaacaacagctatcagtccagtttgcaaatggcaccgtttgaagcattgtacggacgaaagtgccgcaccccacttttctgggatcaaacaggtgagcgccaactgtttgggacagaagtgttaaccgaagcagaggagaaagtcaggaccgtcagggaaagactgcgaatcgcccagtctcggcagaagagttatgctgataaccgccgaagagagcttactttcgaagcaggggattatgtgtaccttcgtgtcactccgcttcggggagtacaccgcttccaaaccaaaggcaagttggcaccacgctttgtgggaccatacaggatcttggaacgcagaggtgaagtcgcataccagctagagcttccatctaatatggttggtatccacgatgtgtttcatgtgtctcaactgaagaagtgtttgagggtacctgaggaacaagctagctcagagcacattgacatccaagaagatttgacctacgtggagaagccagttcgtatccttgagaccagtgagagaaggaccagaaacaaggtgatcaggttttgcaaagtccagtggagccaccactccgaggaagaggccacctgggaaagagaagatgaattgaaggccgctcatccgcacctcttcgccagctcttccgaatctcggggtcgagattccgtttaa

SEQ ID NO: 14499 - DNA, 652 bp, Oryza sativa
  Clone ID: TFbOSC27228j.C1.o3.np
atggcatttaaggaccggttcgcgggatgccctggaagaacttatcgtacttaccacaagcccgacgtacccaggcgagggtgggcgtgatggagttgggtcggccggggtgtccggttgatcggcttccggattcaccgcacgggaacgtgtcgtggggctgtgtcttgtgggtacagttgtacacctctgatcagagtaaaactattcgaatagccgtgcccgcggttatgggcggtcaaccagattcaccgtgattagtttcaccctagttagcttttggaactggttagttcaggtggtggtttgggcctgttgcaacgtggtgtaacgttggacagtgattggttaatatggattaaatactacaactgttttactgctttcaactactgctttgaaatgccggctttatgcaaaagaacctttagcctcccttggatatatcttgcatcatacctcctcttccggtatgacttgctgagtaccgtgggtagtactcagtcttgctcttttccccctcaccagaattgaagtccttctcagttgaagatgtctcgaagaggttggtttcgtcgctgccgtcaagcttagaaattctggttcgtgaatttctgggcgtgacaagttggtatcagagccgaccttgacc

SEQ ID NO: 14500 - DNA, 2754 bp, Oryza sativa
  Clone ID: TFbOSC31102j.C1.o13.gm
atggtgaagacaagggacgatccccgtgactccaacgacgccagtggcagcgaagagcagaccgatggagctcatgtcagtggtgcatctggcagcagatcatctccaccgcccgaaaacccaacagtcactcaaatgatgacaatgatgatgcaacagatgcagcaacattaccatcagatgttgcagcaggcgcaacagaaccagcagtttggtcctccaccatcacacgtgtccaaactgttagactttcttcgtatccagccacccactttctcaagcaccaccaacccaatggaggccaacgactggcttcgtgctattgagaagaagctgatccttctgcaatgtaacgaccgagagaaggttgcttttgctacacatcagttgcaaggtcctgcttctgcttggtgggatcactacgtggtgacccgtccagatgcaacggaggttacttgggcagagttttgtcaaagcttcaggaaggcacagattcccgaagggattatggcacaacagaagagagagttccgtgcattgcaacaaggaaccagaacggttacagagtacctgcacgagttcaaccgcctcgcgcgctacgctcccgaggacgtgcgcaccgatgctgagaagcaggagaagtttttgtttgggctcgatgatgaattgaccaaccaactaatctccggagtctatgaggactttgagaagcttgtggacaaggctatccgccaggaagagcaacgcaacaaaatagaccgaaaaagaaagacagctcagatcagctttcctcaggggaacaatcagaagcctcgtttcatgacgggacagctaggtgggccttccaccctgatcgtctgtcagcaccgtccctatcgcccgagtaacttcaacaacgattacaatggtggcagtcacaacaacagtaagcagcacaaccacaactcgactccacccccactaatggcaccagctcagtcagatccgccagctgtgtcagttcagttagaacaacccaagaagggggctgtaggaaagccaggaccctgcttcaactgtggcaagcacggccactttgctggcaagtgtccgaagctgaatcgcactggacccaggttcatccaggcccgcgccaatcatgtgtctgcagaggaagcacaggcagcaccagaggtcgtgttgggcacgtttccagtgaactcatatccagcaacagttctctttgattcaggtgcctcgcattctttcatttccaaaagatttgctgggacacatggattatcggtagtggaacttaaaataccgatgcaggttcatacccctggaaatgatatgaggacagcacactactgcccctcggtgactatagagatcaaaagatcaccgtttctatccaacctcatccttctcgaatctaaagacctggatgtcattcttggaatggattggttgaccagaaacaagggagtgattgactgcgcaagccgcaccatcaccctaaccaacgacaaaggggagaagatcaccttccgttccccagcgtcgcagaagtccgtagcgagtctgaatcaggctgctattgagggtcagacagaaacagtggagaaaagtcccaggaagttggaggatattcctatagtacaagagtatcctgaggtgttcccagaagacctcactacaatgccaccgaagagagaaatcgagttccggatcgatttggcacccgggactgctccaatttacaagaggccgtacagaatggcagctaatgagctagcagaggtcaagaagcaggttgacgaacagctgcagaaagggtacatccgaccgagtacttcaccttggggtgctccggttatctttgtggagaagaaagacaagaccaagaggatgtgcgtggattatcacgcccttaatgaggtcacaatcaagaacaaatatccgttgccaagaattgatgacctgtttgatcagctaaaaggagctaaggagcaccagctatatgccaagtttagcaagtgtgacttctggttatcggaggtcaaatttctgggtcacatcatttctgctcaaggcgtggcagtggatccatcaaatgtggagtcagttacaaagtggaccccaccaaagacagtttctcagatccggagttttcttggacttgcgggctattaccgtcggttcatcgaaaatttctctaagattgccaggcccatgacacagttgctaaagaaagatgaaaaattcaaatggtcagctgagtgcaaccaaagttttgaagaactcaagaagaagttagtctccgcaccagttctaattctgccagatcagacgaaagacttccagttgcgtccacatgaggccaattatcccactcatgaccttgagttggcagcagtggttcatgctctgaaaatctggcggcactatcttattggcaaccgctgtgaagtttacactgatcataagagcctgaagtacatcttcacccagcccgacttaaatctccggcaacgaagatggctggagttgattaaagattatgacatggggatacactatcatccaggcaaagcaaatgtggtagcagatgctctgagcagaaagagctattgcaatgcagtatgtaccgaaggcatgtgtgacaaattgcagcaagatcttgagcacctaaatttgggcatcgtagaacacggatacgtagctgccctagaggcccggcctacgctcgtggatcaagtcagagcagctcag

SEQ ID NO: 14501 - DNA, 3045 bp, Oryza sativa
  Clone ID: TFbOSC32579j.C1.o3.fg
atggtgaagacaaggaatggttctcaatccaacaaggtcagtggcagtgaagagcagatcaatggaccacgtgccagcggtgcatctgatagcagttcatctccaccactcgagaaccctacgattgctcaggtgttggacaatcagactcagatgataacaatgatgatgcaacagatgcaacaacagtaccatcaggtgttgcagcagtccaaactgttagaatttctccgtgtcaagccgcccactttctcaagtaccaccaacccaatcgaggccaatgactggcttcgtgctattgagaagaagctgaaccttttgcaatgcaacgaccaagagaaggttgcttttgctacacaccagctgcaactgcaaggtcccgcttctgtttggtgggacaactacatggtgacccgtccagctgggacagaggttacttggatagagttttgtcagagttttaataaggcacaggttcccgagggaattgtggcacaaaagaagagagagttccgttctttgcagcaaggaaccagaacagttatagagtatctacacgagttcaaccgtctcacgcgctatgcccctgaggacgtgcgcactgatgccgagaggcaggagaagtttttgtcgggtcttgatgatgaattgaccaaccagttgatctcccaacattatgaggactttcagaagttggtggacaaagccatccgtcaggaagagcagtgcaacaaaatgaaccgtaaaaggaaggcagttcagttcaggacttcccaggggattagtcagaagcctcgcctcacgatgggacatcagggtggaccttccaccatgattatccagcagcaccgtccctaccacccgggtagcttcgacaagaactaccatagtggcagtcacaacaacagtgagcagcacagcctcaatccgactccaagttcactaatgaatgtagctcagtcagctctaccagctcagccagaacagcccaagaagtttggagaaaagcctgacctctgcttcaattgtaacgagcccggacacatggttggtaagtgcccgaagccaagacgtgccggactcaagttcgttcaggcccatgtcaatcatgcatctgcagaggaggcacagtcagcaccagaggttatattgggcacatttcccgtcaactcgacaccggcagtaatattgtttgattctggtgcaactcattccttcatttccaagcgttttgctggtgcgcatgggttatctttagtgaagcttaagatacctatgcgagttcatactcctggaggtggcatgaccacaactcactattgcccatcagtaacagttgaaattcaagggttgatttttccagccaacctcattcttctcgaatccaaggatctagatgttattcttggaatggattggttgacaaggcacagagtgattgattgcactagccacaccatcaagttgaccaatgcgaaaggagaagtggtaaccttccagtctccagtattgcagaagccagggatcagtttaaaccaggctgctggtgaggaacaagaggtagcagtggagaaaaccactaagaagttggaagatattcccatagtcagagagtatccagaggtttttccggataatctgacaacaatgccaccaaaaagggatatcgagttccggatcgacttggcacctggaactgcaccgatccacaagaggccttacagaatgggagccaacgagttggcggaagtcaagaagcaagttgatgaacagttacagaagggatacattcgcccgagcacgttgccttggggtgctccgtacgcactcaatgaggtcactattaagaacaagtaccctttgtcaaggattgatgatctgtttgatcagttgaaaggagctacagtgttccctaagatggacctgcgatcaggctatcaccagttgaggatccgtgaagaggatattccaaagactgcattcatcacttgttatgggttgttcgaatgtacagttatgtctttcggactcaccaacgaacctgccttcttcatgaatttgatgaacaaggtgtttatggaatttctagacaagtttgtcgtggttttcatcgatgacatactgatttactccaagtccgaggaagaacatgagcagcatcttcggttggtacttgaaaagttaaaagagcaccagctatatgccaagttcagcaagtgtgacttctggcttaaggaagttcagtttctcggtcacatcgtgaatgctcaaggagtagctgtggatccagcaaatgtggagtcagttaccaagtggaccccaccgaggacagtcactcaggttcggagtttctttggacttgcgggctattaccgccagttcattgagaagttctctaaaattgcaaagccaatgacacagctattgaagaagaaagaaaagtttatctggtctgctgaatgcaataggagttttgaagaactcaaacgacggttggtgtctgcaccagttttaattctgcctgatcagacgaaagatttccagttgcgtcctcatgaaggcaactacccgacccacgatctggaattggccgcagttgttcatgctttaaagatctggcggcactatttcatcggtaaccgttgtgagcgaagatggttggagctaatcaaggattatgatatgggaatacactatcatgccggcaaggctaatgtggtagcagacgccttaagcaggaagagttactgcaatgttgcatgggtagagaaactgtgttgtgaggttaaacgtgatttggaacatctgaaccttagtatagttgagcacggattcgtggctgccctagaggcacagcccacattggtggagcaggttcgcatagctcatgcaagtgatcctgaaatagcagagctcaaaaagaacatgagagttggaaaagcccgaggttttgatgaggacgaacaaggaacaatctggatgggagaaagattgtgtgtacctggatgggagaaagattgtgtgtacctgaaaacaaggagttaa

SEQ ID NO: 14502 - DNA, 4497 bp, Oryza sativa
  Clone ID: TFbOSC400202j.C1.o2.fg
atggtgaagacaaggaatgatccccgtgactccagcgacgccaggggcagcgaagagcagaccgatggagctcatgtcggtggtgcatctgacagcagttcatccccaccgctcgggaacccaacggtcactcaaatgatgacaatgacgatgcaacagatgcagcaacatcaccatcaggtgttgcaacaggtgcagcagaaccagtggtttgctcctccaccatcacacctgtccaaactgttagactttctccgcatccagccacctactttctcaagcaccaccaacccaatggaggccaacgactggctccgtgttgttgagaagaagctgaaccttctgcaatgcaacgaccgagagaaggttgcttttgctacacatcagttgcaaggtcctgcttctgcctggtgggataactacgtggtgacccgtctagatgcaacggaggttacttgggcagagttttgtcaaagcttcaggaaggcacagattcctgaagggattatggcacaacagaagagagagttccgtgcgctccagcaaggaaccatgtcagttacagagtacctgcacgagttcaactgccttgcgcgctacgctcctgaggacgtgcgcaccgatgccgagaagcaggagaagtttttgtttggtcttgatgatgagttgaccaaccagctaatctccggagtctatgatgattttgagaagcttgtggacaaggctatccgtcaggaagagcaacgcaacaaaatggaccgtaaaagaaaggcagctcagatcagctttcctcaggggaacaatcagaagcctcgcttcatgacgggacagctaggtgggccttccaccctgatcgtctgtcagcaccgtccctatcacccgagtaacttcgacaatgactacaacggtggctgtcacaacaacagtaagcagcacaaccacaactcgactccacccccactaatggcaccagctcagtcagattcaccagctgtgtcagctcagtcagaacagcccaagaagggggctgtaggaaagctaggaccctgcttcaactgtggcaagcacggccactttgctggcaagtgtccgaagctgaatcgcgctggacccaggttcattcaggcccgcgtcaatcatgcgtctgcagaggaggcactggcggcaccagaggtcgtgctgggcacgtttccagtgaactcatatccagcaacagttctctttgattcaggtgcctcgcactctttcatttccaagagatttgctggggcacatggattatcggtagtggaacttaaaataccgatgcaggttcatacccctggaaatgacatgaggacatcacactattgcccctcggtgactatagaaatcacaagatcaccgtttctatccaacctcatccttctcgaatccaaagacctggatgtcattctcggaatagattggttgaccagacacaagggggtgattgactgcgcaagccgcaccatcaccctaaccaacgacaaagcggagaagatcaccttccgttctccagtgtcgcagaagtccgtagcgagtttgaatcaggctgctattgagggtcagacagaaacagtggagaaaagtcccaggaagttggaggatattcctatagtacaagagtatcctgaggtatttcctgaagacctcactacaatgccaccgaagagagaaatcgagttccgaattgatctggcacccggaactgctccaatctacaagaggccgtacagaatggcagctaacgagctagcagaagtcaaaaagcaagttgatgaacagctgcagaaagggtacattcgaccgagtacttcaccttggggtgctccggttatctttgtggagaagaaagacaagactaagaggatgtgcgttgattatcgggcccttaatgaggtcacaatcaagaataaatatccgttgccaagaattgatgacctgtttgatcagctaaaaggagctaaggtgttttccaagatagacctgcgatcaggctatcatcagttgagaattcgggaagaggatattcccaagacagccttcatcactcggtatgggttgtttgagtgcacggttatgtcatttggactcaccaatgcaccggctttcttcatgaacttgatgaacaaagtgtttatggagtttcttgacaagtttgtcgtggtattcattgacgacatacttatttattcaaaatcagaagaggaacatgagcaacatcttcgtctggtactcgagaaattgaaggagcaccagttatatgccaagtttagcaagtgtgacttctggttatcggaggtcaaatttctgggtcacgtcatttctgatcaaggcgtggcagtggatccatcaaatgtggaatcagttacaaagtggaccccaccaaagacagtttctcagatccggagttttcttggacttgcgggctattaccgtcggttcatcgaaaatttctccaagattgccaggcccatgacacagttgctaaagaaagatgaaaaattcaagtggtcagctgagtgcaaccaaagttttgaagaactcaagaagaagttagtctcagcaccagttctaattctgccagatcagacgaaagacttccaggtctactgtgatgcatctcgccaagggttgggatgtgtgttgatgcaagaaggcagagtggtcgcatatgcttcgcgacagttgcgtccacatgagagcaattatcctactcatgatcttgagttggcagcagtggttcatgctctgaaaatctggcggcactatcttattggcaaccgctgtgaagtctacactgaccacaagagtttaaaatatatcttcacccagcccgacttaaatctccggcaacgaagatggctggagttgattaaagattatgacatggggatacactatcatccaggcaaagcaaatgtggtagcagatgctctgagcagaaagagctattgcaatgcagtatgtaccgaaggcatgtgtgacaaattgcagcaagatcttgagcacctaaatttgggcatcgtagaacacgggtacgtagctgccctagaggcacggcctacgctcgtggatcaagtcagagcagctcaagtaaatgatcctgaaatagctgagctgaaaaagaatatgagggttggaaaagctcgagatttccatgaggatgagcatggcacaatctggttgggagaaagattgtgtgtgcctgacgacaaagaactgaaggatctcatactcacagaagctcatcaaactcagtattcaattcatcccggcagtactaaaatgtaccaggacctcaaagagaaattctggtggcgagtcaaagcagaacatcagaggcccgcaggactactacaaccccttcagatcccggaatggaaatgggaagaaatcggaatggatttcataacaggtttgcccaggacatcgtcggggcacgattcaatctgggtggtcgtggatcgactcaccaaagttgctcattttattccagtacacactacctatactgggaaaaggttggcagagctttatctttcaagaatcatgtgtttgcatggggtacctaagaagattgtatctgatcgaggaagtcaattcacttcaaagttctggcagaaactgcaagaagaattggggactcgtttgaatttcagcacggcttatcatccgcaaacagatggtcagactgagcgagtaaatcaaatcttggaagatatgttgagagcttgtgcacttgactttggtggagcctgggataaaagtctaccgtatgcggaattctcttacaacaacagctatcagtccagtttgcaaatggcaccgtttgaagcattgtacggacgaaagtgccgcacaccacttttctgggatcaaacaggtgggcgccaactgtttgggacagaagtgttaaccgaagcagaggagaaagtcaggaccgtcagggaaagactgcgaatcgcccagtctcggcagaagagttatgctgataaccgccgaagagagcttactttcgaagcaggggattatgtgtaccttcgtgtcactccgctccggggagtacaccggttccagacgaaaagcaaattggcaccacgctttgtgggaccatacaggattttggaacgcagaggtgaagtcgcttaccagctagagcttccatctaatatggttggtatccacgatgtgtttcatgtgtctcaactgaagaagtgtttgagggtacctgaggaacaagctagctcagagcacattgacatccaagaagatttgacctacgtggagaagccaattcgtatcctggaaaccagcgagagaaggaccagaaacaaagtaatcagattttgcaaagttcagtggagccaccactcagaggaagaggccacctgggaaagagaagatgaattaaaggccgcccatccgcacctcttcgccagctcttccgaatctcggggccgagattccgtttaa

SEQ ID NO: 14503 - DNA, 4551 bp, Oryza sativa
  Clone ID: TFbOSC401215j.C1.o19.fg
atggtgaagacaaggaatgatccccgtgactccagcgacgccaggggcagcgaagagcagaccgatggagctcatgtcagtggtgcatctggcagcagatcatctccaccgcccgaaaacccaacagtcactcaaatgatgacaatgatgatgcaacagatgcagcaacattaccatcagatgttgcagcaggcgcaacagaaccagcagtttggtcctccaccatcacacgtgtccaaactgttagactttcttcgtatccagccacccactttctcaagcaccaccaacccaatggaggccaacgactggctccgtgctattgagaagaagctgaacctactgcaatgcaacgaccaagagaaagttgcttttgctacacaccagttgcaaggtcccgcttctgcctggtgggataactacgtggcgacccgtctagatgcaacggaggttacttgggcagagttttgtcaaagcttcaggaaggcacagattcctgaagggattatggcacaacagaagagagagttccgtgcgctccagcaaggaaccatgtcagttacagagtacttgcatgagttcaaccgccttgcgcgctacgcccctgaggacgtgcgcaccgatgctgagaagcaggagaagtttttgtttgggctcgacgatgaattgaccaaccagctaatctccggagtttatgaggactttgagaagcttgtggacaaggctattcgtcaggaagagcaacgcaacaaaatggaccgaaaaagaaaggcagctcagatcagctttcctcaggggaacaatcagaagcctcgcttcatgacgggacagctaggtgggccttccaccctgatcgtctgtcagcaccgtccctatcacccgagtaacttcgacaacgattacaacggtggcagtcacaacaacagtaagcagcgcaaccacaactcgactccacccccactaatggcaccagctcagtcagatccgccaactgtgtcagttcagtcagaacaacccaagaagggggctgtaggaaagccaggaccctgcttcaactgtggcaagcacggccactttgctggcaagtgtccgaagctgaatcgcactggacccaggttcatccaggcccgcgccaatcatgtgtctgcagaggaagcacaggcagcaccagaggtcgtgttgggcacgtttccagtgaactcatatccagcaacagttctctttgattcaggtgcctcgcattctttcatttccaaaagatttgctgggacacatggattatcggtagtggaacttaaaataccgatgcaggttcatacccctggaaatgatatgaggacagcacactactgcccctcggtgactatagagatcaaaagatcaccgtttctatccaacctcatccttctcgaatctaaagacctggatgtcattcttggaatggattggttgaccagaaacaagggagtgattgactgcgcaagccgcaccatcaccctaaccaacgacaaaggggggaagatcaccttccgttccccagcgtcgcagaagtccgtagcgagtctgaatcaggctgctattgagggtcagacagaaacagtggagaaaagtcccaggaagttggaggatattcctatagtacaagagtatcctgaggtgttcccagaagacctcactacaatgccaccgaagagagaaatcgagttccggatcgatttggcacccgggactgctccaatttacaagaggccgtacagaatggcagctaatgagctagcagaggtcaagaagcaggttgacgaacagctgcagaaagggtacatccgaccgagtacttcaccttggggtgctccggttatctttgtggagaagaaagacaagaccaagaggatgtgcgtggattatcgcgcccttaatgaggtcacaatcaagaacaaatatccgttgccaagaattgatgacctgtttgatcagctaaaaggagctaaggtgttttccaagatagacctacgatcaggctatcatcagttgagaattcgggaagaggatattcccaagacagccttcaccactcggtatgggttgtttgagtgcacggttatgtcctttggactcaccaatgcaccggctttcttcatgaacttgatgaacaaagtgtttatggagtttcttgacaagtttgtcgtggtattcattgacgacatacttatttattcaaaatcagaagaggaacatgagcagcatctccgcctggtactcgagatattgaaggagcaccaactatatgccaagtttagcaagtgtgacttctggttatcggaggtcaaatttctgggtcacatcatttctgctcaaggcgtggcagtggatccatcaaatgtggagtcagttacaaagtggaccccaccaaagacagtttctcagatccggagttttcttggacttgcgggctattaccgtcggttcatcgaaaatttctctaagattgccaggcccatgacacagttgctaaagaaagatgaaaaattcaaatggtcagctgagtgcaaccaaagttttgaagaactcaagaagaagttagtctccgcaccagttctaattctgccagatcagacgaaagacttccaggtctactgtgatgcatctcgccaaggattgggatgtgtgttgatgcaagaaggcagagtggtcgcatatgcttcgcgacagttgcgcccacacgagaccaattatcccactcatgaccttgagttggcagcagtggttcatgctctgaaaatctggcggcactatcttattggcaaccgctgtgaagtttacactgatcataagagcctgaagtacatcttcacccagcccgacttaaatctccggcaacgaagatggctggagttgattaaagattatgacatggggatacactatcatccaggcaaagcaaatgtggtagcagatgctctgagcagaaagagctattgcaatgcagtatataccgaagtcatgtgtgacaaattgcagcaagatcttgagcacctaaatttgggcatcgtagaacacgggtacgtagctgccctagaggcccggcctacgctcgtggatcaagtcagagcagctcaagtaaatgatcctgaaatagctgagctgaaaaagaatatgagggttggaaaagctcgagatttccatgaggatgagaatggcacaatctggttgggagaaagattgtgtgtgcctgacgacaaagaactgaaggatctcatactcacagaagctcatcaaactcagtattcaattcatcccggcagtactaaaatgtaccaggacctcaaagagaaattctggtgggccagcatgagaagagaaatagccgaattcgtcgcactctgcgatgtttgtcagcgagtcaaagcagagcatcagaggcccgcaggactgctacaaccccttcagatcccggaatggaaatgggaagaaatcggaatggatttcataacaggtttgcccagaacgtcgtcggggcacgattcaatctgggtggtcgtggatcgactcaccaaagttgctcattttattccagtacacactacctatacgggcaaaaggttggcggagctctacctctcgagaatcatgtgtctgcatggggtacctaagaagatagtatctgatcgagggagtcagttcacttcaaagttctggcagaaactgcaagaagaattggggactcgtttgaatttcagcacggcttatcatccgcaaacagatggtcagaccgagcgagtaaatcaaatcttggaagatatgttgagagcctgtgcgcttgactttggcggagcctgggataaaagtctgccttatgcggaattctcttacaacaatagttatcagtccagtttgcaaatggcaccgtttgaagcattgtacggacgaaagtgccgcacaccacttttctgggatcaaacaggtgagcgccaactgtttgggacagaagtgttaaccgaagcagaggagaaagttaggactgtcagagaaaggctaagaattgcgcaatctcgacagaagagttatgctgacaaccgccgaagagagcttactttcgaagcaggggattatgtgtaccttcgtgtcactccgcttcggggagtacaccgcttccaaaccaaaggcaagttggcaccacgctttgtgggaccatacaggatcttggaacgcagaggtgaagtcgcttaccagcttgagctcccatctaatatggttggtatccacgatgtgtttcatgtgtctcaactgaagaagtgtttgagggtacctgaggaacaagctagctcagagcacattgacatccaggaagatctgacttatgtggagaagccgatttgtatcctcgagaccagtgagagaaggaccagaaacaaggtgatcaagttttgcaaagttcagtggagccaccactcggaagaagaagccacctgggaaagagaagatgaattgaaggccgcccatccgcacctcttcgccagctcttccgaatctcggggtcgagattctgtttaa

SEQ ID NO: 14504 - DNA, 4506 bp, Oryza sativa
  Clone ID: TFbOSC401219j.C1.o10.fg
atggtgaagacaaggaatgatccccgtgactccaacgacgccagtggcagcgaagagcagaccgatggagctcatgtcagtggtgcatctggcagcagatcatctccaccgcccgaaaacccaacagtcactcaaatgatgacaatgatgatgcaacagatgcagcaacattaccatcagatgttgcagcaggcgcaacagaaccagcagtttggtcctccaccatcacacgtgtccaaactgttagactttcttcgtatccagccacccactttctcaagcaccaccaacccaatggaggccaatgactggctccgtgctattgagaagaagctgaacctactgcaatgcaacgaccaagagaaagttgcttttgctacacaccagttgcaagatgcaacggaggttacttgggcagagttttgtcaaagcttcaggaaggcacagattcctgaagggattatggcacaacagaagagagagttccgtgcgctccagcaaggaaccatgtcagttacagagtacttgcatgagttcaaccgccttgcgcgctacgctcctgaagacgtgcgcaccgatgctgagaagcaggagaagtttttgtttgggctcgatgatgaattgaccaaccagctaatctccggagtttatgaggactttgagaagcttgtggacaaggctattcgtcaggaagagcaacgcaacaaaatggaccgaaaaagaaaggcagctcagatcagctttcctcaggggaacaatcagaagcctcgcttcatgacgggacaactaggtgggccttccaccctgatcgtctgtcagcaccgtccctatcacccgagtaacttcgacaacgactacaacggtggcagtcacaacaacagtaagcagcacaaccacaactcgactccacccccactaatggcaccagctcagtcagatccgccagctgtgtcagttcagtcagaacaacccaagaagggggctgtaggaaagccaggaccctgcttcaactgtggcaagcacggccattttgctggcaagtgtccgaagctgaatcgcactggacccaggttcatccaggcccgcgccaatcatgtgtctgcagaggaagcacaggcagcaccagaggtcgtgttgggcacgtttccagtgaactcatatccagcaacagttctctttgattcaggtgcctcgcattctttcatttccaaaagatttgctgggacacatggattatcgatagtagaacttaaaataccgatgcaggttcatacccctggaaatgatatgaggacagcacactactgcccctcggtgactatagagatcaaaagatcaccgtttctatccaacctcatccttctcgaatctaaagacctggatgtcattcttggaatggattggttgaccagaaacaagggagtgattgactgcgcaagccgcaccatcaccctaaccaacgacaaaggggagaagatcaccttccgttccccagcatcgcagaagcccgtagcgagtctgaatcaggctgctattgagggtcagacagaaacagtggagaaaagtcccaggaagttggaggatattcctatagtacaagagtatcctgaggtgttcccagaagacctcactacaatgccaccgaagagagaaatcgagttccggatcgatttggcacccgggactactccaatttacaagaggccgtacagaatggcagctaatgagctagcagaggtcaagaagcaggttgacgaacagctgcagaaagggtacatccgaccgagtacttcaccttggggtgctccggttatctttgtggagaagaaagacaagaccaagaggatgtgcgtggattatcgcgcccttaatgaggtcacaatcaagaacaaatatccgttgccaagaattgatgacctgtttgatcagctaaaaggagctaaggtgttttccaagatagacctacgatcaggctatcatcagttgagaattcgggaagaggatattcccaagacagccttcaccactcggtatgggttgtttgagtgcacggttatgtcctttggactcaccaatgcaccggctttcttcatgaacttgatgaacaaagtgtttatggagtttcttgacaagtttgtcgtggtattcattgacgacatacttatttattcaaaatcagaagaggaacataagcagcatctccgtctggtactcgagaaattgaaggagcaccagctatatgccaagtttagcaagtgtgacttctggttatcggaggtcaaatttctgggtcacgtcatttctgctcaaggcgtggcagtggatccatcaaatgtggaatcagttacaaagtggaccccaccaaagatagtttctcagatccggagttttcttggacttgcgggctattaccgtcggttcatcgaaaatttctccaagattgccaggcccatgacacagttgctaaagaaagatgaaaaattcaagtggtcagctgagtgcaaccaaagttttgaagaactcaagaagaggttagtctctgcaccagttataattctgccagatcagacaaaagacttccaagtctactgtgatgcatctcgccaaggattgggatgtgtgttgatgcaagaaggcagagtggtcgcatatgcttcgcgacagttgcgtccacatgagaccaattatcccactcatgaccttgagttggcagcagtggttcatgctctgaaaatctggcggcactatcttattggcaaccgctgtgaagtttacactgatcataagagcctgaagtacatcttcacccagcccgacttaaatctccggcaacgaagatggctggagttgattaaagattatgacatggggatacactatcatccaggcaaagcaaatgtggtagcagatgctctgagcagaaagagctattgcaatgcagtatgtaccgaaggcatgtgtgacaaattgcagcaagatcttgagcacctaaatttgggcatcgtagaacacgggtacgtagctgccctagaggcacggcctacgctcgtggatcaagtcagagcagctcaagtaaatgatcctgaaatagctgagctgaaaaagaatatgagggtcggaaaagcccgagatttccatgaggatgagcatggcacaatctggttgggagaaagattgtgtgtgcctgacgacaaagaactgaaggatctcatactcacagaagctcatcaaactcagtattcaattcatcccggcagtactaaaatgtaccaggacctcaaagagaaattctggtgggccagcatgagaagagagatagccgaattcgtcgcactctgcgatgtttgtcagcgagtcaaagcagaacatcagaggcccgcaggactgctacaaccccttcagatcccggaatggaaatgggaagaaatcggaatggatttcataacaggtttgcccaggacatcatcgggtcacgattcaatctgggtggtcgtggatcgactcaccaaagttgctcattttattccagtacacactacctatactgggaaaaggttggcagagctttacctttcaagaatcatgtgtttgcatggggtacctaagaagattgtatctgatcgagggagtcagttcacttcaaaattttggcagaaactgcaagaagaattggggactcgtttgaatttcagcacggcctatcacccgcaaactgatggtcagaccgaaagggtcaatcagatcttggaagatatgctgcgagcgtgtgcgctcgattttggtggagcatgggataaaagtctaccttatgcggaattctcttacaacaacagttatcaagccagtttgcaaatggcaccgtttgaagcgttgtacggacggaaatgccgcactccgctcttctgggatcaaactggagaacgccaattgtttgggacggaagtattaactgaagcagaggagaaagtcagaaccgtcagagaaaggctaagaattgcccagtctcggcagaagagttatgctgataaccgccgaagagagcttactttcgaagcaggggattatgtgtaccttcgtgtcactccgctcaggggagtacaccggttccaaacgaaaggcaaattggcaccacgctttgtgggaccatacaggattttggaacgccgaggtgaagtcgcttaccagcttgagctcccatctaatatggttggaatccacgatgtgtttcatgtatctcaattgaagaagtgtttgagggtacctgaggaacaagctagctcagagcacattgacatccaggaagatctgacttatgtggagaagccgattcgtatccttgagaccagtgagagaaagaccagaagcaaggtgatcaggttttgcaaagttcagtggagccaccactcagaagaagaggccacctgggaaagagaagatgaattgaaggccgcccatccgcacctcttcgccagctcttccgaatctcggggtcgagattccgtttaa

SEQ ID NO: 14505 - DNA, 4881 bp, Oryza sativa
  Clone ID: TFbOSC401577j.C1.o3.gm
atggtgaagacaaggaatgatccccgtgactccaacgacgccagtggcagcgaagagcagaccgatggagctcatgtcagtggtgcatctggcagcagatcatctccaccgcccgaaaacccaacagtcactcaaatgatgacaatgatgatgcaacagatgcagcaacattaccatcagatgttgcagcaggcgcaacagaaccagcagtttggtcctccaccatcacacgtgtccaaactgttagactttcttcgtatccagccacccactttctcaagcaccaccaacccaatggaggccaatgactggctccgtgctattgagaagaagctgaacctactgcaatgcaacgaccaagagaaagttgcttttgctacacaccagttgcaaggtcccgcttctgcctggtgggataactacgtggcgacccgtctagatgcaacggaggttacttgggcagagttttgtcaaagcttcaggaaggcacagattcctgaagggattatggcacaacagaagagagagttccgtgcgctccagcaaggaaccatgtcagttacagagtacttgcatgagttcaaccgccttgcgcgctacgctcccgaggacgtgcgcaccgatgctgagaagcaggagaagtttttgtttgggctcgatgatgaattgaccaaccaactaatctccggagtctatgaggactttgagaagcttgtggacaaggctatccgccaggatgagcaacgcaacaaaatggaccgaaaaagaaaggcagctcagatcagctttcctcaggggaacaatcagaagcctcgcttcatgacgggacagctaggtgggccttccaccctgatcgtctgtcagcaccgtccctatcacccgagtaacttcgacaacgactacaacggtggcagtcacaacaacaaacaacccaagaagggggctgtaggaaagccaggaccctgcttcaactgtggcaagcacggccactttgctggcaagtgtccgaagctgaatcgcactggacccaggttcatccaggcccgcgccaatcatgtgtctgcagaggaagcacaggcagcaccagaggtcgtgttgggcacgtttccagtgaactcatatccagcaacagttctctttgattcaggtgcctcgcattctttcatttccaaaagatttgctgggacacatggattatcggtagtggaacttaaaataccgatgcaggttcatacccttggaaatgatatgaggacagcacactactgcccctcggtgactatagagatcaaaagatcaccgtttctatccaacctcatccttctcgaatctaaagacctggatgtcattcttggaatggattggttgaccagaaacaagggagtgattgactgcgcaagccgcaccatcaccctaaccaacgacaaaggggagaagatcaccttccgttccccagcgtcgcagaagtccgtagcgagtctgaatcaggctgctattgagggtcagacagaaacagtggagaaaagtcccaggaagttggaggatattcctatagtacaagagtatcctgaggtgttcccagaagacctcactacaatgccaccgaagagagaaatcgagttccggatcgatttggcacccgggactgctccaatttacaagaggccgtacagaatggcagctaatgagttagcagaggtcaagaagcaggttgacgaacagctgcagaaagggtacatccgaccgagtacttcaccttggggtgctccggttatctttgtggagaagaaagacaagaccaagaggatgtgcgtggattatcgcgcccttaatgaggtcacaatcaagaacaaatatccgttgccaagaattgatgacctgtttgatcagctaaaaggagctaaggtgttttccaagatagacctacgatcaggctatcatcagttgagaattcgggaagaggatattcccaagacagccttcaccactcggtatgggttgtttgagtgcacggttatgtcctttggactcatcaatgcaccggctttcttcatgaacttgatgaacaaagtgtttatggagtttcttgacaagtttgtcgtggtattcattgacgacatacttgtgtattcaaaatcagaagaggaacatgagcaacatcttcgtctggtacttgagaaattgaaggagcaccagttatatgccaagtttagcaagtgtgacttctggttatcggaggtcaaatttctgggtcacgtcatttctgctcaaggcgtggcagtggacccatcaaatgtggaatcagttacaaagtggaccccaccaaagacagtttctcagatccggagttttcttggacttgcgggttattaccgtcggttcatcgaaaatttctccaagattgccaggcccatgacacagttgctaaagaaagatgaaaaattcaagtggtcagctgagtgcaaccaaagttttgaagaactcaagaagaagttagtctccgcaccagttctaattctgccagatcagacgaaagacttccaggtctactgtgatgcatctcgccaaggattgggattggttcatgctctgaaaatctggcggcactatcttattggcaaccgctgtgaagtatacactgatcacaagagtctgaagtacatcttcactcagcctgacttgaatctccgacagcgaagatggctggagttaattaaagattatgacatggggatacattatcatcccggcaaagcaaatgtggtagcagatgctttgagcagaaaaagctattgcaatgccttatgcactgaagacatgtgtggcaaattgcaacaagatcttgagcacctaaatttgggcatcgtggaacacgggtacgtagctgccctagaggcacggcctacgctcgtggatcaagtcagagcagctcaagtaaatgatcctgaaatagctgagctgaaaaagaatatgagggttggaaaagctcgagatttccatgaggatgagaatggcacaatctggttgggagaaagattgtgtgtgcctgacgacaaagaactgaaggatctcatactcacagaagctcatcaaactcagtattcaattcatcccggcagtactaaaatgtaccaggacctcaaagagaaattctggtgggtcagcatgaggagagaaatagctgaattcgtcgcactctgcgatgtttgccaacgggtgaaggcagagcaccaaagaccagcaggtttactccaacctcttcaaatcccggaatggaaatgggaggagattggaatggactttataacaggactgccccggacatcatcggagcacattgacatccaggaagatctgacttatgtggagaagccgatttgtatcctcgagaccagtgagagaaggaccagaaacaagccaacgctcgatgccatctcaccgggacaagagctcgccgccggcgacaagctcgtgtccagcaatggcaggttcgccctcggcttcttccaaaccgacagtaacaagtcctcctccaatagcactccgaacatttacctaggcatctggttcaacaccgtccccaaattcacccctgtatgggttgccaacggcgaaaaccctgtcgcggatctcgcgtcgtgcaagctcctagtttccagcgatggcaacctcgccatcgttgcaacgacccatgccaagaactcctccatggtctggtccagcaaagccaacatcccaaccaacaccacccatgctgttctcctggacgatggaaaccttgtcctgcgtagcactagcacaaccaatgcatcatccaccattctctggcaaagctttgatcacccgacagacactgttctgcagggtggaaagatcggctggaacaacgccaccggtgtgaaccgccgtcttgtctccaggaagaacaccgttgatcaagctcctggcatgtattccttcgagttgctcggacacaacggccctacctccatggtctccacgttcaactcctcgaatccgtattggtccagcggagactggaacggccggtacttcagcaacataccggagacggtaggacagacatggctatcactgaattttacaagcaatgagcaagagaagtatatcgagtatgcaattgcagatcccacggtgctatcacgtaccatactggatgtctccggccagctgaaggcgcttgtgtggttcgaggggtcgcgggattggcaaaccatcttcacggcacccaaatcgcagtgcgatgtctacgctttctgtggacctttcacggtctgcaacgacatcacattcccctcctgcacctgcatgaagggcttctcagtacaatcacctgaagattgggagctagatgaccgaacaggtggatgtgtgagaaatactccgctgctctgcaacagcaataaaactgcagcaggcacggcagataagttctatcctatgacttctgttcagcttcctgataaagcccagagcataggagcagctactagtgcagatgaatgtgcagctgcctgcctcagtagctgctcatgtactgcgtattcctacggtgaaggtggctgctctgtttggcatgacaagctgctcaatgtacgacaacaaggtaatggtgttctctaccttcgcctttctgcaaaagaagtactggaaagtaggagaaacaatagatggggggtgatccttggtgcttcaattggtgccagcactgctgctttgggggagaaatcacgtgaatttccgaccttctctacctacgattcatgctccaagatcttctccagctccggcaactctagcaagctcgagctgccgaagacggaggaggatggtggcaccgaagctagggagtgtaaataa

SEQ ID NO: 14506 - DNA, 3795 bp, Oryza sativa
  Clone ID: TFbOSC407633j.C1.o19.fg
atgatcgtccttcagcaccgtccctataatccgggcaacttcaacaacgactacaacagtggcagtcacaacagcagtgaggagcaccatcacaactcaactccacccccactaatggcaccagctcagtcagatctaccagctgtgtcaactcagtcagaacagccccaggggtctgcaggaaagccagggccatgcttcaactgtggcaagcacggccactttgctggcaagtgtccgaagctgaagcgcgctggacctagatttgctgggacacacggattaacggtagtggaacttaaaataccgatgcaggttcatacccctagaagtgacatgaagatagcacactactgcccctcagtgactatagagatcaaaaggtcaccatttctatccaacctcatccttctcgaatccaaagacctagatgtcattctcggaatggattggttgaccagacacaagggagtgatcgactgcgcaagtcgtaccatcaccctaaccaacaacaaaggagagaagatcaccttccggtctccaatgccgcataagtccgtagcgactctgaatcaggctgctattgaggaacagacagaaatagcaaagaaaagtcccaagaagttggaggatattcctatagtacaagagtatcctgaggtgttcccagaagacctcactacaatgccaccgaagagagagatcgagttccggattgatttggcaccgagaactgcaccgatctacaagaggccctataggatggcagctaatgagctagcagagttgagaattcgggaagaggatattcccaagacagccttcaccactcggtatgggttgtttgagtgcacggttatatcatttggactcaccaatgcatcggctttcttcatgaacttgatgaccaaagtgtttatggagtttcttgacaagtttgtcgtggtattcattgacgacatacttatctattcaaagtctgaagaagaacatgagcaacatctccgtctggtactcgagaagttgaaggagcaccagttatatgccaagtttatggatccatcaaatgtggagtcagttacaaagtggaccccacctaagacagtttctcacatccggagttttcttagacttgcgggttattatcgtcggttcattgaaaatttctccaagattgtgaggcccatgacacagttgcttaagaaagatgaaaaattcaagtggtcaactgagtgcaaccaaagttttgaagaactcaagaaaagctgccctagaggcatgacctacgctcgtggatcaagtccaagcagctcagtgcacactacctatacggggaaaaggttggcagagctctacctttcaagaatcatgtgtttgcatggggtgcctaagaagatagtatctgatcgaggaagtcaattcacttcaaagttctggcagaaactgcaagaagaattgggaactcgtttgaatttcatcatagcctaccatccacaaactgatggccagactgagcgagtgaatcaaatattggaagatatgttgcgagcttgtgcgcttgactttggcggagcttgggataaaagtctaccgtatgctaaattctcttacaacaacaattaccaggacagtttgcaaatggcaccgtttgaaacattgtatggccggaagtgccgtacaccgctcttctgggatcaaactggagaacgccaactgttcgggacagaagtgctaaccgaggcagaggaaaaagattacccaaccaagaccgagatcgtcaggtgtaatagctctggagacctctaccccttcccggcggacgatttttcctcggcagcctccgctcgtgctttcattgctacggagtccaccacggacctttggcatcaccgtctagggcacattggtcacgaagctctcacccgcttgtcacaggcttctgtcataccaccacccaggggtgctgcccctgttgtcatgcttgccaacttgacccagttctccaccaccattcgcaacatacaatgtgacaatggccgcgagtttgataacctcaccgcccgcacctttttcctcactaacggtgttcacatgcgaatgtcgtgcccccacacctaccccagaacggattttacagcaccttcgctgactccgatcagtcgtccccactccggccgctctggcccagcggcgcgcgtggctcctgccggccctactgctgaggtggctcgctccactgagccgcccacgcctcctgttggctcggctcctgtcagctcggcccctgctggcccggcctcgacggctccctctgctgagctgcctgcccacgagtcggcttcccctgggccgccatctaccgggtcggctgcccggcgccctcctgcgtcgccatcctccaccagcagcatgctctggcgaccgccgggaccacctcccggctttcctgcgctgccatctaggccgccaccactgctggcgcctcctagcggtgccccgacacgtgcgcgcagttcacgcgttcccgatgctgttataccaaaccaactcggtgtttcgcccggtgtcaacacacatggcatgacgactcgcggcaaggacgacatccacctccctgttacacgctacaacctcaacgcaactaccctctctccagtgcctcgcacttatcgtgccgccttggaagaggagtttgctgcattaatgccttcctgcatggtactttacaagagaccgtctactgcactcagccatctagatttgaagaccacaccaggcctcatatggtgtgtcgcctcaacaagtcgctggtacagtcggtttgctagctacttacttaccctgggtttcattgaggctaagtttgatacttctttgtttatctatcatcatggctctcacttggtctacttgcttctatatgtggatgacattgttttgactgcatcctcagctggtcttctccgttgggctattcaggctctccagtctgagttttctatgaaggaccttggttctctacaccattttttgggtatcacagtcaccggtgacagctccggtcttctcctgagtcagcaccagtatagcattgaggttctcgagcgtgctggcatgtcagattgcaagccgtgctctacaccagttgacaccaatgcaaagttgtcctcctctgatggctcacctgttgtagatcccactgactgtcacagtttagctggtgctctacattatttgaccttcactcggcctgatatttcctatgctgttcagcaggtttgtctccacatgcatgacccagggattcccatcgtgccgctctcaagcggatactccgattgggcgggttgtcctgacactcgcaagtccacctggtcattcaagcggcagaacacggtgtctcgatccagcgacgaagcagagtacagggttgtggccaatacagttgctgaaacttgttggctatgccaattattacatgagcttacaccgccctcccgggctaccttggtttattgcgacaatgtcagcgccatctatctctctactaatcctgttcagcatcaacggaccaaacatgtggagattgatttacattttgttcatgatcgcgttgctgctggttctgttcgagtgcttcatgttccaacgacatcacagtacgcggacatcttcaccaagggtttgcctacatccatttttgtggagtttcgttccagtctcaacgttcgttgcaccaacgttgcgactgcgggaggtgttagttgtatatatgtatttcatgtttatctctaa

SEQ ID NO: 14507 - DNA, 3831 bp, Oryza sativa
  Clone ID: TFbOSC415897j.C1.o1.fg
atggtgaagacaaggaatgatccccgtgactccaacgatgccagtggcagcgaagagcagacagatggagctcataccagtggtgcatctggcagcagatcatctccaccgcccgagaacccaacggtcgctcagatgatgacaatgatgatgcaacagatgcagcaacattaccatcagatgttgcagcaggcgcagcagaaccagcagtctgattttctccgtatccagccacccactttctcaagcaccaccaacccaatggaggccaacgactggcttcgtgcgattgagaaaaagctgaaccttctgcaatgcaatgaccaagagaaggttgcttttgctacacatcagttgcaaggtcccgcttctgcctggtgggataactacgtggtgacccgtccagatgcaacggaggttacttgggcaaagttttgtcaaagcttcaggaaggcacagattcctgaggggattatggcacaaaagaaaagagagttccgcgcactacatcaaggaaccaggacagttacagagtacttgcatgagttcaaccgccctgcgcgctacgctcctgaggatgtgcgcaccgatgctgagaagcaagagaagtttttgtttggtcctgatgatgaattgaccaaccagctaatctccggagtctatgaggactttgagaagcttgtggacaaggctatccgtgggccttccaccctgatcgtctgtcagcaccgtccctatcacccgagtaacttcaacaacgactacaacggtggcagtcacaacaacagtaagcagcacaaccacaactcgactccacccccactaatggcaccagctcagtcagatccgccagctgggtcagctcagtcagaacagcccaaaaagggggctgtaggaaagccaggaccctgcttcaactgtggcaagcacggccactttgctggcaagtgtccgaagctgaatcgcgctggacccaggttcatccaggcccgcgccaatcatgtgtctgtagaggaagcacaggcagcaccagaggtcgtgttgggcacgtttccagtgaactcatatccagcaacagttctctttgattcagagatcaaaagatcaccgtttctatccaacctcatccttctcgaatctaaagacctagatgtcattctcggaatggaatggttgaccagacacaagggagtgattgactgcgcaagccgcaccatcaccctaaccaacgacaaaggggagaagataaccttccgttccccagcgtcgcagaagtccgtggctagtctgaatcaggctgctattgagggtcagacagaaacagtggagaaaagtcccaggaagttggaggatattcctatagtacaagagtatcctgaggtatttcctgaagacctcactacaatgccaccgaatagagaaatcgagttccgaattgatttggcacccggaactgctcctatctacaagaggccgtacagaatggcagctaatgagctagcagaggtcaagaagcaagttgatgaacagctgcagaaagggtacatccgaccgagtacttcgccttggggtgctccggttatctttgtggagaagaaagacaagactaagaggatgagcgttgattattgcgcccttaatgaggtcacaatcaagaacaaatatccgttgcctagaattgatgacctgtttgatctgctaaaaggagctaaggtgttttccaagatagacctgcgatcaggctatcaccagctgagaattcgggaagaggatattcccaagacagccttcactactcggtgtgggttgtttgagtgcacggttatgtcatttggactcaccaatgcaccggctttcttcatgaacttaatgaacaaagtgtttatggagtttcttgacaagtttgtcatggtattcattgacgacatacttatttattcaaaatcagaagaggaacatgagcagcatctccgtcttgtactcgagaaattgaaggagcaccagttatatgccaagttcagtaagtgcgacttctggttgtcggaagacaagtttcttggtcacgtcattactgctcaaggtgtggcagtggatccatcgaatgtggagtcagttaccaagtggaccccacctaagacagtttctcagatccggagttttcttggacttgcgggttattaccgtcggttcatcgaaaatttctccaagattgccaggcccatgacacagttgctaaagaaagatgaaaaattcaaacaaaagacttccaagtctactgtgatgcatctcgccaagggttgggatcggcactatcttattggcaaccgctgtgaagtatacactgatcacaagagtctgaagtacatcttcactcagcctgacttgaatctccgacagcgaagctggctggagttaattaaagattatgacatggggatacattatcatccaggcaaagcaaatgtggtagcagatgctttgagcagaaaaagctattgcaatgccttatgcactgaaggcatgtgtggcaaattgcagcaagatcttgagcacctaaatttgggcatcgtgcaacacgggtacgtagctgccctagaggcacggcctacgctcgtggaccaagtcagagcagctcaggtaaatgatcctgaaatagctgagctgaaaaagaatatgagggttggaaaagctcgagatttccatgaggatgagcatggcacaatctggttgggagaaagattgtgtgtgcctgacgacaaagaactgaaggatctcatactcacagaagctcatcaaactcagtattcaattcatcccggcagtactaaaatgtaccaggacctcaaagagaaattctggtgggccagcatgagaagagagatagccggtttcgtcgcactctgcgatgtttgtcagcgagtcaaagcagaacatcagaggcccataggactgctacaaccccttcagatcccggaatggaaatgggaagaaatcggaatggatttcatcactggtttgcccaggacattgtcagggcatgattcaatttgggtagtcgtggatcgcctcacgaaagttgctcatttcattccaatgcacactacctatactgggaaaagattggcaaagctctacctttcaagaatcatgtgtttgcatggggtacctaagaagattgtatctgatcgaggaacgttgtatggacggaaatgccgcactccgctcttctgggatcaaactggagaacgccaattgtttgggacggaagtattaactaaagcagaggagaaagtcagaaccgtcagagaaaggctaagaattgcgcaatctcgacagaagagttatgctgacaaccgccaaagagagcttactttcgaagtaggggattatgtgtaccttcgtgtcactccgctcaggggagtacaccgcttccagactaaaggaaagttggcaccacgctttgtgggaccatacaggatcttggaacgcagaggtgaagttgcttaccagcttgagctcccatctaatatggttggtatccatgatgtgtttcatgtatcccagttaaagaagtgcttgagggtacccgaagaacaagccgattcggagcacattgacatccaagaagatctgacctacgtggagaagccagttcgtatccttgagaccagtgaaaggaggaccagaaacaaggtgatcaggttttgcaaagtccaatggagccaccactcacaggaagaggccacctgggaaagagaagatgaattgaaggccgcccatccgcacctcttcgccagttcttccgaatctcggggtcgagattccgtttaa

SEQ ID NO: 14508 - DNA, 4710 bp, Oryza sativa
  Clone ID: TFbOSC416775j.C1.o2.np
gcccccatgtcgccaccaccgccgaaaccgccgcaccccgccccctcgggccacgtcggccccgccgcgcgcgcgccccgcctttcccgcgtccacctccctctctcgcttcctccctcctgtgtgcgccgtcgtcctccgcgcgcgcaccgtcgtcttcggccgccgccgccgctttcggcatggtgaagacaaggaatgatctccgtgaccccaacgacgccagtggcagcgaagagcagaccgatgaagctcataccagtggtgcacctggcagcagatcatctccaccgcccgagaacccaacaatcactcagatgatgacaatgatgattcaacagatgcagcaacattaccatcagatgttgcagcaggcgcaacagaaccagcagtttggttctccaccctcacatctgtccaaactgttagactttctccgtatccagccacctactttctcaagcaccaccaacccaatggaggccaacgactggctccgtgcgattgagaagaaactgaaccttctgcaatgcaacgaccaagagaaggttccttttgctacacatcagttgcaaggtcccgcttctgcctggtgggacaactatgtggtaacccgtccagatgcaatggaggttacatggtcagagttttgtcaaggcttcaggaaggcacagattcctgaagggattatggcacaacagaagagagagtttcgggcgctgcaacaaggaaccagaacagttacagagtacctgcacgagttcaaccgcctcacgtgctacgctcctgaggacgtgcgcatcgatgctgagaagcaggagaagtttttgtttgggctcgatgatgaattgaccaaccagctaatctccggagtctatgaggactttgagaagcttgtggacaaggctatccgtcaggaagagcaacgcaacaaaatggaccgaaaaagaaaggcagctcagatcagctttcctcaggggaacaatcagaagcctcgcttcatgacgggacagctaggtgggccttccaccctgatcgtctgtcagcaccgtccctatcacccgagtaactttgacaacgactacaacggtggcagtcacaacaacagtaagcagcacaaccacaactcgactccatccccactaattccgccagctgggtcagcttagtcagaacagcccaagaagggggctgtaggaaagccaggaccctgcttcaactgtggcaagcacggccactttgctggcaagtgtccgaagctgaatcgcgctggacccaggttcatccaggcccgcgccaatcatgtgtctgcagaggaagcacaggcagcaccagaggtcgtgttgggcacgtttccagtgaactcatatccagcaacagttttctttgattcaggtgcctcgcgttctttcatttctaagagatttgctggggcacatagattatcggtagtggaacttaaaataccgatgcaggttcatacccctggaaatgacatgaggacaacacactattgccccttagtgactatagagatcaagagatcacagtttctatccaacctcatccttctcgaatccaaagacctagatgtcatcctcggaatggattggttgaccaggcacaagggagtaatcgactgcgcaagtcgcaccatcaccctaaccaacgacaaaggggagaagatcactttccggtctccagtgccacagaagtccgtagcaagtttgaatcaggctactattgaggaacagactgaagtagcggagaaaagtcctaggaagttggaggacattcgtatagtacaggagtatcctgaggtgtttcctgaagacctcactacaatgccaccaaagagagaaatcgagttccagattgacctggttaaggtaaccactccgatttacaagaggccatacagaattgcagctaatgagctagcagaggtcaagaagcaagttgatgaacagctgtagaaagggtacatccgaccgagtacttcaccttggggtgctccggttatctttgtggagaagaaagacaagaccaagaggatgtgcgttgattatcgcgcccttaatgaggtcacaatcagaacaaatatccattgccaagaattgatgacctgtttgatcagctaaaaggagctaaggtgttttccaagatagacctgcgatcaggctatcaccagttaagaattcgggaagaggatattcccaagacagcctttaccactcgatatgggttgtttgagtgcacggttatgtcatttggactcaccaatgcaccggctttcttcatgaacttgatgaacaaagtgtttatggagtttcttgacaagtttgtcgtggtattcattgacgacatacttatttattcaaaatcagaagaggaacatgagcagcatctccgtctggtactcgagaaattgaaggagcaccagttatatgccaagttcagtaagtgtgacttctggttgtcggaagtcaagtttcttggtcacgtcattactgctcaaggtgtgacagtggatcaatcgaatgtggagtcagttaccaagtggaccccacctaagatagtttctcagatccggagttttcttggacttgcgggttattaccgtcggttcatcgaaaatttctccaagattgccaggcccatgacacagttgcttaagaaagatgaaaaattcaagtggtcagctgagtgcaaccaaagttttgaagaactcaagaagaggttagtctctgcaccagttctaattctgccagatcagacaaaagacttccaagtctactgtgatgcatctcgccaagggttgggatgtgtgctgatgcaggaaggcagagtggtcgcatatgcttcgcgacagttgcgtccacatgagagcaattatcctactcatgatcttgagttggcagcagtggttcatgctctggaaatctggtgacactatctttttggcaaccgctgtgaagtctacactgaccacaagagcttgaagtacatcttcacccagcccgacttaaatctccgacaacgaagatggctggagttgattaaagattatgacatggggatacattatcatccaggcaaagcaaatgtggtagcggatgctttgagcaggaagagctattgcaatgcggtatgtaccgaaggcatatgtgacaaattgcagcaagatcttgagcacctaaatttgggcatcgtggaacacgggtacgtagctgccctagaggcacggcctacgctcgtggatcaagtcagagtagctccggtaaatgatcctgaaatagctgagttgaaaaagaatatgagggttgaaaagcccgagattttcatgaggatgagcatggcacaatctggttgggagaaagattgtgtgtgcctgacgacaaagaactgaaggatctcatactcatagaagctcatcaaactcagtattcaattcatcccagcagtactaaaatgtaccaggacctcaaagagaaattctggtgggccagcatgagaagagagatagccggattcgtcgcactctgcgatgtttgtcagcgagtcaaagcagaacatcagaggcccgcaggactgctacaaccccttcagatcccggaatggaaatgggaagaaatcggaatggatttcatcactggtttgcccaggacatcgtcagggcatgattcaatttgggtagtcgtggatcgcctcacgaaagttgctcatttcattccagtgcacactacctatactgggaaaagattggcagagctctacctttcaagaatcatgtgtttgcatggggtacctaagaagattgtatctgatcgaggaagtcaattcacttcaaagttctggcagaaactgcaagaagaattggggactcgtttgaatttcagcacggcttatcatccgcaaacagatggtcagaccgagcggataaatcaaatcttggaagatatgttgagagcttgtgcacttgactttggcggagcttgggataaaagtctaccatatgctaaattctcttacaataacagctatcaggccagtttgcaaatggcaccgtttgaagcattgtacggacggaagtgccgcactccgctcttctgggatcaaactggagaacgccaactgttcgggacagaggtgctaaccgaggcagaggaaaaagtcagaactgtcagagaaaggctgagaattgcacaatctcgacagaaaagctacgcagacaaccgccgaagagaactcgctttcgaagcaggagattatgtgtaccttcgtgtcactccgcttcggggagtacaccgcttccaaaccaaaggcaagttggcaccacgttttgtgggaccatacaggatcttggaacgcaaaggtgaagtcgcttaccagcttgagctcccatctaatatggttggtatccacgatgtgtttcatgtatctcaattgaagaagtgtttgagggtacctgaggaacaagctagctcagagcacattgacatccaagaagatctgacctacgtggagaagccagttcgtatccttgagaccagtgaaaggaggaccagaaacaaggtgatcaggttttgcaaagtccaatggagccaacactcacaggaagagaccacctgggaaagagaagatgaattgaaggccgcccatccgcacctcttcgccagttcttccgaatctcggggtcgagattccgtt

SEQ ID NO: 14509 - DNA, 4551 bp, Oryza sativa
  Clone ID: TFbOSC900179j.C1.o8.fg
atgatgaagacaaggaatgatccccgtgactccaacgacgccagtggcagcgaagagcagaccgatggagctcatgtcagtggtgcatctggcagcagatcatctccaccgcccgaaaacccaacagtcactcaaatgatgacaatgatgatgcaacagatgcagcaacattaccatcagatgttgcagcaggcgcaacagaaccagcagtttggtcctccaccatcacacgtgtccaaactgttagactttcttcgtatccagccacccactttctcaagcaccaccaacccaatggaggccaatgactggctccgtgctattgagaagaagctgaacctattgcaatgcaacgaccgagagaaagttgcttttgctacacaccagttgcaaggtcccgcttctgcctggtgggataactacgtggcgacccgtctagatgcaacggaggttacttgggcagagttttgtcaaagcttcaggaaggcacagattcctgaagggattatggcacaacagaagagagagttccgtgcattgcaacaaggaaccagaacggttacagagtacctgcacgagttcaaccgcctcgcgcgctacgctcctgaggacgtgcgcaccgatgctgagaagcaggagaagtttttgtttgggctcgacgatgaattgaccaaccagctaatctccggagtctatgaggactttgagaagcttgtggacaaggctatccgccaggaagagcaacgcaacaaaatggaccgaaaaagaaaggcagctcagatcagctttcctcaggggaacaatcagaagcctcgcttcatgacgggacagctaggtgggccttccaccctgatcgtctgtcagcaccgtccctatcacccgagtaacttcaacaacgactacaacggtggcagtcacaacaacagtaagcagcacaaccacaactcgactccacccccactaatggcaccagctcagtcagatccgccagctgtgtcagttcagtcagaacaacccaagaagggggctgtaggaaagccaggaccctgcttcaactgtggcaagcacggccactttgctggtaagtgtccgaagctgaatcgcactagacccaggttcatccaggcccgcgccaatcatgtgtctgcagaggaagcacaggcagcaccagaggtcgtgttgggcacgtttccagtgaactcatatccagcaacagttctctttgattcaggtgcctcgcattctttcatttccaaaagatttgctgggatgcatggattatcggtagtggaacttaaaataccgatgcaggttcatacccctggaaatgatatgaggacagcacactactgcccctcggtgactatagagatcaaaagatccccgtttctatccaacctcatccttctcgaatctaaagacctagatgtcattctcggaatggattggttgaccagaaacaagggagtgattgactgcgcaagccgcaccatcaccctaaccaacgacaaaggggagaagatcaccttccgttctccagtgtcgcagaagtccgtagcgagtctgaatcaggctgctattgagggtcagacagaaacagtggagaaaagtcccaggaagttggaggatattcctatagtacaagagtatcctgaggtgttcccagaagacctcactacaatgccaccgaagagagaaatcgagttccggatcgatttggcacccgggactgctccaatttacaagaggccgtacagaatggcagctaatgagctagcagaggtcaagaagcaggttgacgaacagctgcagaaagggtacatccgaccgagtacttcaccttggggtgctccggttatctttgtggagaagaaagacaagactaagaggatgtgcgttgattatcgggcccttaatgaggtcacaatcaagaacaaatatccgttgccaagaattgatgacctgtttgatcagctaaaaggagctaaggtgttctccaagatagacctgcgatcaggctatcaccagttgagaattcgggaagaggatattcccaagacagccttcaccactcggtatgggttgtttgagtgcacggttatgtcctttggactcaccaatgcaccggctttcttcatgaacttgatgaacaaagtgtttatggagtttcttgacaagtttgtcgtggtgttcattgacgacatacttatctattccaagtctgaaaaacaacatgagcaacatcttcgtctggtactcgagaaattgaaggagcaccagttatatgccaagtttagcaagtgtgacttctggttatcggaggtcaaatttctgggtcacgtcatttctgctcaaggcgtggcagtggatccatcaaatgtggaatcagttaccaagtggaccccaccaaagacagtttctcaaatccggagttttcttggacttgcgggctattaccgtcggttcatcgaaaatttctccaagattgccaggcccatgacacagttgctaaagaaagatgaaaaattcaagtggtcggctgagtgcaaccaaagttttgaagaactcaagaagaagttagtctctgcaccagttctaattctgccagatcagacaaaagacttccaggtatactgtgatgcatctcgccaaggattgggatgtgtgttgatgcaagaaggcagagtggtcgcatatgcttcgcgacagttgcgtccacatgagaccaattatcccactcatgaccttgagttggcagcagtggttcatgctctgaaaatctggcggcactatcttattggcaaccgctgtgaagtttacactgatcataagagcctgaagtacatcttcacccagcccgacttaaatctccggcaacgaagatggctggagttgattaaagattatgacatggggatacactatcatccaggcaaagcaaatgtggtagcagatgctctgagcagaaagagctattgcaatgcagtatgtaccgaaggcatgtgtgacaaattgcagcaagatcttgagcacctaaatttgggcatcgtggaacacgggttcgtagctgccctagaggcacggcctacactcgtggatcaagtcagagcagctcaagtaaatgatcctgaaatagctgagctgaaaaagaatatgagggttggaaaagctcgagatttccatgaggatgagcatggcacaatctggttgggagagagattgtgtgtgcctgacgacaaagaactgaaggatctcatactaacagaagctcatcaaactcagtattcaattcatcccggcagtactaaaatgtaccaggacctcaaagagaaattctggtgggtcagcatgagaagagagatagccgaattcgtcgcactctgcgatgtttgtcagcgagtcaaagcagaacatcagaggcccgcaggactgctacaaccccttcagatcccggaatggaaatgggaagaaatcggaatggatttcataacaggtttgcccaggacatcgtcggggcacgattcaatctgggtggtcgtggatcgactcaccaaagttgctcatttcattccagtacacactacctatacggggaaaaggttggcagagctgtacttagcaaggatcatgtgtctgcatggggtacctaagaagatagtatctgatcgggggagtcagttcacttcaaaattttggcagaaactgcaagaagaattggggactcgtttgaatttcagcacggcttatcatccgcaaactgatggtcagaccgaaagggtcaatcagatcttggaagatatgctgcgagcgtgtgcgctcgattttggtggagcatgggataaaagtctgccttatgcggaattctcttacaacaacagttatcaagccagtttgcaaatggcaccgtttgaagcgttgtacggacggaaatgccgcactccgctcttctgggatcaaactggagaacgccaattgtttgggacggaagtattaactgaagcagaggagaaagtcagaaccatcagagaaaggctaagaattgcccagtctcggcagaagagttatgctgataaccgccgaagagagcttactttcgaagcaggggattatgtgtaccttcgtgtcactccgctccgaggagtacaccgttttcagacgaaaggcaagctggcaccacgcttcgtgggaccatacaaaattttggaacgaaggggagaagttgcttatcagctagaacttccatccaacatgatcggcatccatgacgtgttccacgtttcccaactaaagaagtgcttaagggtacctgaggaacaggctgattcggaacacatcgatatccaggaggacctgacctatgtggagaagccggttcgcatacttgacaccagcgaaaggagaaccagaaacaaggtcaccaggttttgccgagttcagtggagtcatcattcggaagaggaagcaacctgggaaagggaagatgagttgaaagccgcccatccgcacctcttcaccagctcctccgaatctcggggccgagattccgtttaa

SEQ ID NO: 14510 - DNA, 3652 bp, Oryza sativa
  Clone ID: TFbOSC900192j.C1.o1.np
gtcgttagccgcccgtgtcctcgggtgcggctgacacgtggggcccacggcgccggccggtgtgagcccgagtgcgcccggtccaccgtggaccgtgaggctgccgcgtgggtcccactacaacgactacaactgtggcagtcacaacagcagtgagcagcacaaccaaagctcaactccaccctcactaatggcaccagctccgtcagatccgccagctatgccagctcaatcagaacagcccaagaaggagtccggaggaaagccaggaccctgcttcaattgtggcaagcacgggcactttgctggcaagtgtccaaagccgtagcgtgctggacctaagttcgttcaggcccgcatcaatcatgcatctgcagaggaggcacgggcagcaccagaggtcgtgctgggcacgtttcctgtcaactcacatccgacagtggttctttttgattcaggtgcaacacattctttcatttccaagaagtttgctgggacacatggattatcggtagtgtaacttaaaataccgatgcgggttcatacccatggaaatgacatgaagacaacacacaactgcccctcagtgactagtgagatcaagagatcacagcttctagctgcgcaagggagtgattgactgcgcaagtcgcaccatcactctaaccaatgacaaaggggagaagatcacctttcggcctctagtgccacagaagtctgtagcaagtcaggatcaggctgctactgaggaacagacagaaatagtgaagaaaagtcccaagaagttggaggatattcttgtagtacaagagtatcctgaggtgtttcctgaagacctcactacaatgccaccgaagagagaaatcgagttccgaatcgatttggcacctggaactgctccaatttacatgaggccgtacagaatggcagctaatgagctagcaaaggttaagaagcaggttgatgaacagctgcagaaagggtacatccgcctgagtacttcgccttggggtgctccggttatctttgtggagaagaaagacaagaccaagatcatgtgcgttgattatcgcgcctttaatgaggtcacaatcaagaatcgacaacaaatatccgttgccaagaattgatgacctgtttgatcagttaaagggagccaaagtgttttgcaagatagacctacgatcaggctatccctagttgagaatttgggaagaggatattcccaagacagccttcaccactcggtatatgttgtttgagtgcacggttatgtcatttggactgaccaatgcacccgccttcttcatgaacttgatgaacaaagtattcatggagtttctggacaagtttgccgtggtgttcattgatgacatacttatctgttcaaagtcagaagaagaacatgagcagcatctccatctggtactcgagaaattgaaggtgcaccagttatatgccaagttcagtaagtgtgacttctagttgtcggaagttaaatttcttgatcacgtcattactgctcaaggtgtggcagtggattcatcaaatgtggagtcagttaccaagtggaccccaccaaagacagtttctcaaatccggagttttcttggacttgcgggttattaccgttggttcattgaaaatttctccaagattgccaggcccatgactctattgcttaagaaagatgaaaaatttaagtggtcagctgagtgcaaccaaagctttgaagaacacaaaaagaaattggtatctgcaccaattctaattctgcctgaccagacgaaagacttctaggtctactgtgatgcatctcgccaagggttgggatgtgttttgatgcaagagggcagagtggtcgcttattcctcgcggcagttgcgtccacatgagagcaattatcctactcacgaccttgagttggcagcagtggttcacgctctgaaaatctagcggcactatgttattggcaactgctgtgaagtctacactgatcacaagagtttgaaatacattttcactcagcctgacttgaaccttcgacagcgaagatggttggagttagttaaagataatgacatggggatacactaccatctaggtaaagccaacgtcgtggcagatgctttgagcagaaagagctattgcaatgccctatgtacagacaaattgcagcaagacctagaggcatggcctacgctcgtggatcaagtcagagcagctcaagtaaatgatgctgaaatagctgagctcaagaagaatatgagggttggaaaagcctaagattttcacgaagatgagcacggcacaatctggatgggagaaatgttgtgcgtacccgaggacaaagaactaaaggatctgatactcacagaagcccattagactcaatattcaattcatcccggcagtaccaaaatgtaccaggacctcaaagagaaattcaggtgggccagcatgaaaagagaaatagctgaagtcgtcgcactctgtgacgtttgtcagcgggtaaaggtagaacatcaaaggctcgcaggattgttacaacctcttcagatcccgaaatggaaataggaagacattggaatggatttcatcaccggtatgcccaggacgtcatcagggcacgattcaatctaggtagtcgtggatcgactcaccaaagttgctcatttcattccagcgcacactacctatactgggaaaagattggaagagctctacctttcaagaatcatatgtacgcacggggtacccaagaacattgtatctgatcgagggagtcaattcacctcaaaattctggcagaagttgcaagaagaattggggactcgcttaaatttcaacacagcctatcacccgcaaatggatgatcagactgagagggtcaatcagatcttggaagatatgttatgagcatgtgcacttgactttggcggagcttgggataaaagtctgccttatgcggaattctcttacaacaacagctattaggccattttgtaaatggctccattcgaagcgttgtatggttgtaaatgccgcataccactctcctgggatcaaattggagaacgccaactgttcgggacagaagtgctaagcgaggcagagaagaaagtcaggattgtcagggaaagattgcgaatcgcccagactcagcagaagagttatgctgagaaccgccgaagggagctcacttttgaagtaggggattatgtgtacctttgtgtcactcccctcaagcgagtacaccgcttccaaaccaaaggaaagttggcaccatgctttgtgggaccagacaggattttggaacacagatgtgaagtcgcataccagcttgagcttccatctaatatggttggtatccacgatgtgtttcatgtgtctcaattgaagaagtgtttgagggtacccgaggaacaagctagctcagagcacatcgacattcaggaagatcaaacgtatgtcgagaagccagtccgcatcctcgaaaccaatgagagaaggacctgaaacaatgtgatcaggttttgcaaagttcagtggagccaccactcagaggaagaggccacttgggaaaaagaagacgaattgaaggccgcacctcttcgccagctcttctgaatctcggggtcgagattccgtt

SEQ ID NO: 14511 - DNA, 2525 bp, Oryza sativa
  Clone ID: TFbOSC17325j.C1.o1.np
taggatcgtgagtctccatggcgttcccaagaaaattgtatctgataggggaagccaattcacctctcatttttggaagaaactccaagaagagttgggaacccgattaaatttcagcaccgcgtatcacccgcagacagatggacagaccgagcatctaaatcagatcctagaagatatgctccgcgcatgtgtactagatttcgggaagacctgggataagagtctcccctatgccgaattctcctacaataacagttatcaagccagcatacaaatggcaccttatgaagcgttgtacgggcgcaaatgccggacaccgctcttgtgggaccaagttggagaaagccaagtgttcgggactgatatcctgagagaagctgaagctaaagtcagaatcattcgggataatctaaaggtggcacagtctcggcagaaaagttatgcagataaccgtcgccgtgacctggaattcgcagtgggtgattttgtataccttcgggtcacgccattgcgaggtgtgcacaggtttcagacaaaagggaagctcgcacctcggtatgtggagtggagccaggaactatctacctctgtaatgacactttatacgcttattaattagagtaataattgtactctattatcaatttgttattgtgtgcctcggctgattcctggacgagggttcacacacatgtaagcgtttggaattttggatagaaattccgggcgtgacaagttggtatcagagcccccttgaccctaggttatgccaaatggttacccatagaagccttctaaaaatattggaaaagtagaactgttctcctcccatgccgcgctacaagcctgagtacttgtttggtgttgagggttttgtccaggagttgcgtacgatgtcctttgtcattggatttgggactgcccctttttatgcccagattcctcatgatcgtcatgaagagaagtgccgagtcaaagtcaccttgaacagtaatagtgaagatattccctcagtgatgttcgaagctggaggaagaaactacatccatgcgtgtcaggaggtggcaaggatcgccataggagagcttcgcgatcgctacagtgatcagttggccgatacggagtatcgctaccatcctcgtcaaccacagggaagtgaccgtggcaattaccttgagactgaaggaattgagaatgatgctaccacaaggcatttggttgagatgctgtgggctatggatgaaagtcgtgcggagactgtattagcggctcaagatcgtgaagaccggaatcgtggtaagatttgcaagctagaagacaaggtggatcgtttggagaaggaattagccgcattgaagggagaagcaccgccgcagaaggccaggattcgtctcactgcaatgaagagagctctatttgtccctcgctatcaattggcgccaaaggttcgtgtggtggagaatgaagttgccccaaccctagcagatcctccggtcatcatcatggtgaacactcgcagcaatgggaatggccccaacaacaaccccaataacaacaataaagtggagagaatcccacacttgcccaagttcttgctcaacagacacaactcatgaacatgatgatgcagcaactccagaatcagcagaaccaaggaaataaccatgcacctcctcagaataagttagcagaatttcttcgtgtgaggccgcctgttttctctagtaccactaatcctgttgaagctggtgattggctgcatgccatagagaagaagttggatttgcttcagtgcactgatcaggagaaggtctcatttgcatcacatcagttgcatggccctgcctctgaatggtgggatcacttccgcctgaataggactactgctgaacctattacttggcttgaattcaccgctgctttccggaagacgcatataccatcgggagtggtgtctctcaagaagaaggagttcaggtcgctcacccagggatctcgctctgttacggagtatctgcacgagttcaatcgtcttgctcgttatgctccggaagatgtgcgcaatgatgaagagcgccaggagaagttcttggaaggacttaatgatgagctttcttacccactcatgactggagattattctgatttccagaaattaatggataaggctattcgtcaggaagacaatgctggcaacaacatccgcaatcaagctccacgtcctgttgcagctccaacacagcaacaacctgccaagagggagccaggcagcaagcccgtggtgtgtttcaactgtggagacccaggacattatgctgcaagtgtccgaagccccgacggtgaaggttgtccctgcccagagcaactctaccgcaccagcatcaaaggcccgtgtcaatcatgttgctgctgcagaagcccaagatgctccagatgtgattttgggtacgttttctgttaactcagttcctgcaacagtgcttttcgattctggtgctacacattcattcgggctgcaggaa

SEQ ID NO: 14512 - DNA, 3135 bp, Oryza sativa
  Clone ID: TFbOSC22791j.C1.o1.np
atggctagccgccccaccgcgctgctcgtgcaccagcccgcttcggttttgaggaaggtagagttgagccagaagcagatcatgagtcagctaatgagcagtctcaccacagcaaccgttcgcaccgtactgcttcccgcaatgcagaagttgagcaatcccaccgcagcaaccgctcgcatcgcatagtttcccgtaatgcagaagtggaatagtctcaccgctctcaccgctctgtcggtcacaattctggtgaagaacgcattccttcaccaccccatgttgagaataacatgcagcacttgatggcagttcagactcaaatcttgcaaggtttagccacagctatagccggtattcagcacaacgcgcatggaaatggccaccctcacatgggcaacaatagatccaagctgacagactttctgaggtctcgtccgccagagttctctcagaccgtcaagcccgttgaggctggcgattggctaaaggatgttgagagaaaactcaacttagtgcagtgtattcctattgagaagacggtctacgcctctcaccagctaagaggacctgctgcagattggtgggagaattactgcaatgcacaccccgaacccactaacattccatggaatgagttcgctgcagcttttcgtgtagctcatgtgcctaaaagcactattgacatgaagaaggaagaatttatcaggctcaagcaaggcaatagcagtgtcaatgagtatctgagtcagttcaacaagttggctcgatacgctcctgaagaagtggacacagacaagaagaagatcaggaagttcttgaaaggagtcacagttggaatgagactccagttgcttgctcatgacttccccacctttcagcacatgatcaacaaggcacttccacttgaggatgccagaaaagaggctactgaagaatataagaaacgcaagtctacccatcaagggaattcttcccgaggtgcaccccaccctcgctttggtcagcctaagcagtatcaccagtcggtcactcaggctaaccgccagccaggctatgcccctcgccctcagatgaaccgtccagcacctccgccgcagcagcgtgccccaagtggcaatattgcgccaaacagtgttacctctttcaagtcaccaccaggactgtcaaccgtacagtgtttccggtgggacaagatgggtcactctgctagacagtgccctcagaatcctaccaacaccaactcagggcatgctaatggcagcaccgccagaactcctactctagcagcagctcagtctcgtcctagctcttaggcaagtggacaaggttcccatgcttccaacaacttcggtcgaggtcgggtgaaccacattcaagctgagaccgctcaggatgctccagacgttgtgatgggtatgttctctgtcaactccatacccgcaataattctgtttgattcaggagcttcctattctttcatatcgcaagcctttgtgaaaagaaatggttggaaaacctaaaatttacgagtaccaatgatagtacattccactggaagggatataagggcaactaaaatatgcccggaagttaaccttagaattgaggaagttgacttcctagccaaactgatagtcctggactcgcaaagcttggacatcatcctagggatggattggttggctaagcacaaaggacagatagattgtgccgaaaggtccatcaccttgcaaggacctggtggaaagcaagttcactttacccccaacactcttaccgcaagtcggtcaatcctaaccaatttgcaagccactcccttggaatcggtgcccatagtctgtgaatatcccgacgtgtttccagaagagttatcgagtatgcccccagatcgagagatcgagttctccatagaactggcaccaggtaccgcaccgattgcgaaaagaccctaccgaatggcagctaacgagttagcagaagtcaaaaggcagatcgaagaactggagagtaaaggttatgtgcgacctagctcatccccttggggagccccagtgctcctggttaagaaaaaggatggctttgagagaatggtaattgactatagagccctgaatgaagtaactataaagaacaagtacccgttgccacggattgacgatctgtttgatcaattggaaggagtgaaggttttctctaagattgacctaagatcaggataccactagttgaaaatcagatctgaagatatccgtaagaccgctttctcaacgcgctatggtctgtatgagttcacagtgatgtctttcggacttaccaatgctccagcattctttatgaacttgatgaacaaaatcttcatggaatacctggacaagtttgttgtggtattcatcgatgacatcttgatatgctccaagaatgaggaagaacatgctgaacagctgaggctgataatagagaagctaaggggtcatcaattgttcgctaagttctcaaaatgcgaattctggttggaccgagtagcattccttggacacgtgatctcctctaacggtatcgaagtggatccaagcaaggttgaagctgtacttgcttggaatccgcccaagaacgtgtcagagatccgcagtttccttggcctagctggatattatcgaagattcatcgaagggttctcaaagctagctagacctatgaccgagctgttaaagaaggaaaagatgtttgaatggtcagcagcctgtgaggacagctttcaagaaataaagaaaaggttgaccactgccctagttcttaccttgccagatatacgaaaggatttcgaaatcttctgtgatgcatcaagacaaggcttaggatgtgtcctaatgcaagagcgaaaggttgtggcctatgcatccaggcagcttaggcctcatgaagtcaactatcccacccgtgatctcgagttggcagccgtggttcatgcttttaagatctggcggcactatttaatcgggaacaaatgtgaagcatacaccgatcataaaagacttaagtatatcttcactcagaccgagttaaatatgaggcagagaagatggttggaactaatcaaggattacgatcttggaattcattaccatcccggta

SEQ ID NO: 14513 - DNA, 4612 bp, Oryza sativa
  Clone ID: TFbOSC5140j.C1.o1.np
ccattggggacgtccaagtcaaggtggaggcccaaaccaagtcgacgtctggatgatccttatgctaaggttaagtttaaaataccatcttttttgggatatgatgatgctaaaaaataccttgattgggagatgacagtagaacaaaagtttaatgtccaccttgtacccgagcaacatagagttagacgagccagtagtgagttcaaggattttgctattatgtggtgggctgggttatctgatgagggggtactacctactacttgggaagaacttaaggtagctatgcgcgataggtttgttcctccatcttatcatagagatttacgtaagaaactgatgcgtttggaacaaggggataaatctgtacaggattactatggtgagctacagaagggtgtgagacgctgtggtatagtggagggggtcgaggatgctatttgtcgtttctacactagtttgagggaggaaattcagaacattgttgattataaggaatttaactctgtcaaccagttgtttcgatttgctatgcttgcagagaaggaattacaggggcgcgaccatcagggcaagagcaaggcaagcacatcgacgccatctgcgggactgcccaaggccgtctcttttcgggcgtcccagccagcgggcaagcgaccagcagcatccggagcttctgcggcaccaaaaccatctccaccaccacgaccagcagagtcaagtaaaggttcctcgcaggtacccgccaagagtgcctcatctgtcacctcgacgggacgcattcagtgccaccgttgccaaggatttgggcatgtgcaaaaagattgccctagtcaacgggcctatgttgctacagaagatggctacatcaccacctccgacatggaagaggaagaggaggaagaagaagttgaggacgaggatggcgaagtttttggtcgtgatgacacaacggactacagaaccatcattgtgcagcgggtgctcagcacgcaggtacagcagcatgacaggttgcaacgccataatttgttttagatttttttcgtcatcaacaactgtcgtgcacgtgtgatcattgatggatgtagctgcaacaacttggtgagttctgatttggtcaataagcttggcttgactacatgtacacatccacatccttaccatattcagtggttaaacgattccggaagagcaaaggtaacacaggtttgtagggtttcgttttccattggctcatatgcagattctgttgattgcgatgtggttcctatgcaagcttgttcacttttgctggggcgtccttgggaacatgataatgatgctacacatcatggtaggagtaataaatacacttttatgcataatgggaagaaaattactttgctacctttgacccctgctgaaattgtagaagctgataaagaacgagctgctagtttgaaagttgatgaatctgaaaatcagcaagtggctaaatctgtttttccacctaaaaaggataagctttcacctagttctaaggttgagggaattaagttgaagggtggtgttatgcttgcaacgaaatgtgacattggtgatatttcaaatgatgatatgtgctatttcttgatatgcaaacaagccttggtttctttagatgatattgctagttcgatacctcctgttgttactaaccttttgcaggagtatgaggatgtctttccagctgagatacccccaggattgccacccatgagagggatagagcatcaaattgatttgattccaggagcatcattgccaaaccgtgctgcttatcgaaccaacccagatgagactaaggaaattcagtggcaagttcaagacctttaggaccgcgggtatgtacgtcaaagccttagtccctgtccagttcctgtaattttggttcctaagaaagatggttcttggcgaatgtgtgttgattgtagagccattaataatattactatccgatattgtcatcctattcctaggttagacgacatgcttgatgagttgtgtggctatattattttcacaaagattgacttgcgtagtggctatcaccaaattagaatgaaacttggagatgaatggaaaacagcttttaaaactaaatttggtttgtatgagtggttagtaatgccttttggtttgactaatgcacctagtactttcatgagcttaatgaatgaggttttaaggccttttattggacgatttgtggtagtgtactttgatgacatattgatttacagcaagtctttggatgaacacatggatcatttacgtgctgtttttaatgctctacgcgatgcacgtttgtttgctaaccttgaaaagtgcatcttttgcatggaacgagtctcttttcttggatatgttgttactccacagggaattgaggtggatgagtcgaaaattgaagccatcaggagttggtcggttccccaaaccatcacacaggtgaggagctttcttggtcttgcaggattctaccaccgtttcgtcaaagattttagtacttttgctgcaccattgaacgagttgacgaagaaaggcgtggtcttccattggggaaagacacaggagaagtcctttgacattttgaaggagaagcttacgcatgcacctttgctacaacttccaaactttggtaagacttttgagttagaatgtgatgctactggagttggcattggaggtgtgttgatgcaagatggtaagcctgttgcatactttagcgagaagttgcatggtcctattttgaattattccacatatgataaggaattgtatgctcttgtacgttccttagaaacgtggcgtcattatttttggcctaaagaatttgttattcactccgatcacgaatcgcttcaatatcttcgctctcaaaataatttgaatcgtagacatgcaaaatgggttgaatttattgaatcttttccttatgttatcaaacacaagaaagggaaagataatgtgattgcagatgctttgtctaggcgctatactttcttatcccaacttgaatgtcggatttttggacttgaatcaattaaagaacaatatgcacttgatcctgattttaatgaagtgatgataaattgtaaagagggacgtacttggaacaaatttgtgatcaatggtgggtttgtttatagagctaaccgtctatgcattccagttggttccgttcgtcttttgttgatacaggaagcgcatggaggagagttgatgggacattttggagctaagaagacggaagatgttttggccacatatttcttttggccaaggatgagaaaggatgttgacaggttcatggcacgttgcaccacttgtcagaaagctaagtctcatttgaatccacatggtttgtatatgcctcttcctgtaccttctattccttgggcagatatttctatggactttgttttgggattgtctagaactaagagggggagggatagtatttttgtagtggtggatcatttttctaagatggcacatttcataccatgtcataaaagtgatgatgctgttcatattgctgatctatttttccatgagattgttcgcttgcatggtatgccttctattgtttcagatcgtgatgcaaaattcttaagtcatttctggcgcacgctatggaacaagttgggtacaaagctattgttttctacaacatgtcacccacaaacagatggacaaacggaggtagtcaaccgcactttaggtaccatgttgagggctattttgaagaaaaatttgaagatgtgggaagaatgtttgcctcatatggagtttgcatacaatcgggcaacacattctactaccaaggtaagttcttttcaggtagtgtatggtttcaaccctcgtgctccaattgatatgttgcctttacctactagtgagagggttcataatgatgctaaggcacgcgctgaatttattttgaaaatgcatgagtcaaccaagttcaacattgaaaagatgactgaaaagtatagaattgctggtagtaaaagtaggcaagaggttaagcttgaaccgggtgatttagtttggttgcacttgagaaatgatagatttccggaattgagaaagtctaagttgatgcctcgtgctgatggcccttttaaaattgttgagaagattaatgataatgcatataaacttgagttgcctcccgagtttggggttagtcccacgtttaacatttcagatttgaagccatacttgggagaagagtatgagcttgagtcgaggacgacatcaattcaagagggggaggatgatgcggacatcactacctcggatacacacaacaatcctccaatggtcattcaaggaccgataacaagagctcgtgcgcgacaattaaatttagaggtgagttcgttcctatgttcttctttgtatgaattcgagaatagattgcaacctaatgattatattgtgcttaggaacaatggaggggacaaagagacacttggagaaggacttagagtcatggaggaccatcggggacgtccaagtcaaggtggaggcccaaaccaagtcgacgtcgggtgcaattcggagtccaggaccagtc

SEQ ID NO: 14514 - DNA, 1073 bp, Oryza sativa
  Clone ID: TFbOSC10016j.C1.o1.np
agagaaaaagatatggagaaggtactgtgaaaaacgaaggagaaagagaaagaccagctagggcagcaggaaaatggccccctgatagagaagaattttcatataactatataccaggtcaatataggcatatgggtacaaagagaagagactttgagaagcctgttaaatttcaaaaccagaggagtgatggtgctatattaaatttagccgcacatgaccctattgattggcctaatattattagtatttggaaaggtttaatagttcaaaaatatatacaaaaccagcacaatataggaagtaaagttgaagatatgataacctacttagaaacatttttaggtgaatctgctaagattctatgggaacaatgggttgaaaagaatcctaataattatgaagaattgaaaagagctggtagcaatccgcataattttgcaaatgttatatctaacattattatagctgaagatccggaattaggttatacaactttgcaaaatgaaaggttaaaagaaatagaaaaattaacgttaacaagttggaaaggcataaaagaattctcccaacattatttatataatgctacaactgctaaacaaggatataacaggggaatagttgaacgttactttaataaattacctgacccactaggaagtatgatatttgaagaatataaaaaggaaactgaaggagctgaaatcaatatctctcaagctataacttttgtgtttaagcaactaagaaaaatatgcacgggtatccaagcccaaagatctatgaaacactcggattacaatttctgcaataaaatagttcaaatacccttgtcatatggagaagacaagcctagaagtaaaaggatttataaacatcaaaatagaaaccataataatattagaacaaagaaaagatatttcttaagaagatcagataatagagcacccttcttacataaaagaaatgtaagaagatataatccaaagaaaacctatgacaaaacatgcagatgttttatatgcaactcgccagatcatttaagtagaacatgcccaaataaagatcaa

SEQ ID NO: 14515 - DNA, 3090 bp, Oryza sativa
  Clone ID: TFbOSC100588j.C1.o35.fg
atggccagcaagactcttcgcgagttcgctgctccctctgctgacaatgtggccattgggccgcaggtcaacataggagacgtggatttcgacttgaaatccaacctcatcacgatggcgcaggctagcccgttctgtggcaagcctaatgaggatgccaacgctcatctgcaacaattcctagagatatgtagcacatacaccatcgagggagtcagacccgacaccgataaatactctacagcattcctctcaaagttcttcccgatgggcaaaaccaatgccctccgtggaaggatttccagtttccagcagacaagggatgagtctattccggaagcatgggagcgtctgcaggagcatgtggccgcctgtcctcatcatgggatggtcgactggctgatcctgcagaacttctacaatggactcaccccaatgtcccgcgatcacctagacgcggcagctggaggtgctttcttctctaaaacggttcaaggagccgttgaattaatagagaagatggtctccaatatgggttggagcgaggaacgactccagacccgtcagcgaggcatgcttaccgtcacggagacggagttacttgctgccaagctggacctcgtcatgaaacgcttggacgaccacgagaaagggccacagggcaccgtcaaggccatggattcacacgtcacgtgtgaggtctgcggcggcacgggtcattctcggaatgactgcccggaaacccgtgaggagacgatgtatatgggcaacaacaacgggtaccgtccacaagaaggtaacaataatgataacttgtctaaccagccctccttgaaggatctcatttttgcacaagctaaaaccactgatgcactaagcaaaaatcttgctgctaacgataagatcctagagaacattaatgtcaaactagatggctttgcttctgcttttcaaaatcagtcgagctttaataaaatgatagaaacccagttagctcagttagcatctttagtccctgcaaatgaaactgggaggattccggggcaacccgactcttctattgaaaatgtcaaagcgatcacaacgagaggaggtaagtccactcgtgatccgccatatcctaaccctgcaggaactaatgggatgtcaaaagaagcgccatctaatgactcggcttacaaggagattcagcccaacaagaccgtgccgctggaatactacaacacacggttgctgccattccctcaacggagtaggaaaccgtcagtggacgagcagttcgctcgttttgttgaagtaatccagaagattcacatcaacgtgccgttgttggacgctatgcaagtgccgacatatgcccgttatctcaaggacatactcaacaataagagaccgctcccaacaacggaggtggttaagctgacggaacaatgcagcaacgtcatactccacatgctcctggagaagaagaaagatccggggtgtgccacgatcacctgcttgatcggggcacaacaattcgaccaggccttgtgcgaccttggagctagcgtcagcgtcatgccaaaagacgtctttgacaagctcaacttcacgatgttggaaccgacgccgatgcgcctccaactagttgactcgtcagtccgttacccggcagggatagcggaggatgtgccagacaagatacgggattccttcatcccggttgattttgtggtgctagacatggacacggggaagaagacgccgctcatcctggggcgtccattccttagcaccgcaggagccaacattgacgtgggaatggggagtatctgtttccatatcaacgggaaggaggaaaagtttgagtttcaaccgaggacggaacaatgctccatggtcagaatcaaatacgggccaaacccgcagaatattcaagaggtcaaagtggagccgcccaagacggacagcctagtgaaattcatgcaaaacttcctggagaaggaaacaacaatacccaggaaccgttattggaggacgccggtaaaatcacctgtatcggccaagaagttagagcagccggctcagaagaagccgccctctgcaccaaaaccaaagaaggtgtggaaggaaaagccaaagatgcccgctccatcacctccggagacggaaatagaagatggtatttcttttcgctttttccatgaagagtttacatttacatggaaaggcttaagtacatttcttggttttcacgattcctgcaaaatcgatctccagaaaggaatttctgggttcgagaaaaataggttttgggaagacatttctggtgctccaatttgcaagaaaccaagaacgaatgatatccttaatcctacacttaggctcatgcacaaatggattgctatgactttgtttcctagagcaaaagggctaggggtcgttagcgaccaaattgcttttatcttagccgctcgtccgcgtattgatgaggcttatctagtgctagcgcatattttgaaacatggagcagatggatctttgatatactttttccctggttgtacaaatgaaatcccgttgccaaatgcggggtatcatttgtacaactgccacgaactaaccattcccctacagaccatagaagaatctcgtgcaggtggaacattcagggagatgcacaacatgacaaggaacgaacgagaaatttcattatcctcgacacccgtgcagatgtatgaggcaggttggacaccaactggggatgcacccggatggacccaagctccacgccgcagcatcggagtctcaacctgggcaagcgccagtgaggaccggtggcatgcgcctcatgacatccaaaggggggacaatcaacctcccagatcaagtgatgtgtcttcatctccaagtgaatggcgctcaagttcctctcgttgggacttgggtgaaatcactaggagaatggacacccttgatgtgcagacgggggagatccagtacaacctcacggaacacatggctcaaacgcaagaatggcaacaatctgctgatgctcagttcgccaacatcaacaacatgatgcagcaacagcatgataacctttag

SEQ ID NO: 14516 - DNA, 3045 bp, Oryza sativa
  Clone ID: TFbOSC29942j.C1.o1.fg
atgacgacgatggccgacgcttcttcatcctccaacacctcaaccggtggctactccttgatgggttgcattaaagatattccgaccctacaaggagataactacgcagaatggaaaagaaaactcgaccttgcttttatcatgggagaggtggactgggtgttgactaccccatgtcctgtagaacctgttgaacttatcaaaggtgaaaatgagtcagatgctgactggcaaaagagtcagagggacaatgctcctctcgtcatgtcgtatgacattgaacaaaagaaatggtccttagccaacaagaaatgtttggctgtggtaaagaacacgattgagcccacaatattaggctcaattccagagtgtgacgctgtctcagagtaccttgaaagaataaaaagtcagttcactggcttttcaaagacttatgctacacagctgatcaagcagcttgtgacagagaggtaccatggaggtggtgttagagaccacattcttaggatgagcaacatggcttccaagttgaagccaatggatttgggcataacagatgactttctggtccatctggttatggcctcattgccaaagcagtttgacaattttattatcaactacaacataagtctagagaaatggaactttgaaaagctcatcgctaattatgtgcaagaggaggagagaatcaaagagtcaaatggtggttcaattaactatgttaaagataacaagaaaaagaaccacaagtctcccacctcaaaagctaaacagtctcagcatctacctcagcaacaacagttcgctgttgagaaagatcagtgtctccactgcaagaagataggacattataagaaagactgtcctgacttcttgaaaatgatcatggcaaggaaagatgagaacattattacatttgtaaatgaatctcattatgttggttactctagatctacatggtggattgattctggagcaactattcatgcttgtaattgtttaaaggcattccgttcgacgaggactatgcaaagaagtgaaagctccattagagttgccaatggagttgaagaaaaagttgaagctgttggagatcttcctctagagctcgcgaatggcttcacacttttacttcgaaatgtcttttatgttccttctttgcaaagaaacttaataagtgtatcaaagttagattttgatggatatgattgccgctttggaagtggcaaatgtgaactatgggggagaattgagagactcgttaagaatgaaattcttcgtccattggagttctcagacttagaacaatgcatagaatgcattaaaggaaaatttgtaaagagcatcaaaaagggtgcaaaacgaagcgcaggaattttagagatcattcatacagatatttgtggtccatttcttgtgaaaagtgtggatggctatgactcgttcgtaacattcacagatgattactcccgctatggttatatttatccaattaaagagcgatcagaagcattggataaatttaagatattcaaagttgaagttgaaaatcagcatgttataaagattaaagtgaatggggtagctgaaaggcgtaaccgtacccttatggatatggtgcacagcatgatgagctactccacactaccactgggtttatggatggaggcgttaaaaaccgccattcatattctcaacagagttccaagcaaatcggtgcccaaaacaccatatgagctatggacaggaagagtaccctcgctagctcacctccgtgtgtgggggagtcctgtagaggctaaagtatttaacccaaacattgggaagttggatcccaaaacagtcagctgccattttattggctatcctggaatatcaaagggctatcgtttctactgtccaaacagttatacaaagtttgtagaaatgagacatgccatcttcttggaagacgaaatgattagggggagctcggtagttcgagaaattgatcttgaggagaggcgggtgtctatacccgctccgtcgactcaggaacctttcttctctctacctgctgatgttgtgcctacaatgcctgtcattgcggaggaactgcaacagcctcaaacagataatgtgctagtacaggagactcaacaagagcctcaggtacaggatgtgccaaatgtggaggcccctagaaggtctgaaagagtcagaagatcggctatccgtgatgactataatgtttataatatagaagagtcgcatgtggaggatgatcccacctcatatgaagaggccatgagaagcgctcgctcatctaaatggttggaagccatgaaagatgaaatgaaatcaatgaaactaaacgatgtttgggatttagaagaaattcctaaaggagccaaaacaatagatgtaaaaacggcatttataaatggagatttggaggaaaaagtatgcatggcgcaaccgaaaggttttgtcatgaaaggaaacgaaaatatgggatgccgtctaaagagatccatttatggattaaaatttcagagtaatccaggcccagagcactggaaattggtaaagaaagtcttgcgttatttgcaaggaacaaaaggcctcatgctgtcttacagaagatcagaatcactccagatagtggggtattcagattttgactttgaaaagataatacaaaggtctactatgtatgccgagtttatagcatgctatgaggcaaatgaggcaacggggcaggtgaactggctaaagaagttcatacccggtttaaaggtggttgacagtattaagaaaccactaaagttatactgcgataacaaacccgcggtaatgtatgctcacaacaatcagtcaagtggtgctgccaaacacattgacataaagtactatgttgtgaaggacaaagtctgggatcaaacaatcagtctcgagcacattagaacagaaaggatgctcgcggatccgctcacgaaaggcctaccacccaacatgttcaaggaacatgtagctggcatgggtttaagggaagccttatga

SEQ ID NO: 14517 - DNA, 3759 bp, Oryza sativa
  Clone ID: TFbOSC400543j.C1.o10.fg
atggcaagccgacgtcgggcgtcaactagcaatgaagaaactcaaacacccgacctaaacaccctggccagagtcatgactactcaaacccaacttctgcaagccatcgcaaataatcaaggcaaccgtggaggatcaagctttggagaattcatgaggactaagccacccacgttcgccacagctgaagaacctatggatgctgaggattggttaaggatcattgagaagaagctgacccttgttcgagtacgtgaagccgataaagtgatctttgcggcgaaccaactggaaggaccagccggagactggtgggacacctacaaagaagcccgagaagaagatgctggagaaccaagctgggaggaattcactatagccttccgtgacaacttcgtgcctactgctgtgatgcgaatgaagaagaatgagttcaggagactacggcaaggaaatacctctatacaagagtacctgaaccgtttcactcagctggcgcgttacgcgactggagatcttgccgacgaggaggaaaagatcgacaagttcatcgaaggcctgaacgacgagttgcgtgggcccatgattggacaggaccacgatagtttccagagtttaatcaataaggtcgttagactggaaaacgaccggaaggttgtggagcacaatcgcaagaggaggcttgccatgaaccgcccgcctcaggccgcaccccagcgtcctaaaggaactacctcgtcagtatggaaaccagcagtggtaacaaccaattgtccttctgcacctagcaacttccacaggccggttaccactcagaaccgagctcctgcaccgaatcaggccgctactggatcagtgaggccaggaagctgtttcaactatggagagtacgggcatttcgccaacaagtgcccccatccaaacaagacacccattcgcaccggagctaatgcaacggctattcacgggactgctacccctgctgctggacgaggtctattcaggactccgcagactaacaggacctctaccggatttggacccgggcaaacccttgatgtcatattgggtatggattggttaacaaagaatagaggagtaatcaactgtagacgtagagaggttaccctaaccacaccctggggatcggatatgagagcaaccatggatcaagatcctagactaaccgaacatgccggaggcatatttaccatgctacccctgaaaggaatgcccgtagtgcagcgattccccgatgtgttcccacaagatttacctggaatgccaccagatcgtgacatagagttcattattgacctgatactcggaactgcccccatatccaagagaccatatcggatgccggtcaatgagttggaggaacttaaaaagcaaatcagagagttgcaagagaagggatttgtacgtcctagtttgtcaccttggggagctccagtgttattcgtcaagaagaaggatggtagcatgagaatgtgtgtggactaccgctcactgaatgaagtcactatcaagaacaagtatccactaccacggattgatgatctttttgatcaactcaaaggagctaaggtgttctctaagattgaccttcgatcaggctaccaccaactgaaaattaggaccggggatatacccaagaccgcgttctcaacacgctatgggttgtatgagttcacagtaatgtcgtttgggttaaccaacgccccggcatactttatgaatcttatgaacaaagtgttcatggattacttggataaatttgtggtagtattcatcgatgatatcttaatctactccaaagacgaggaggagcatgcggagcacttgcgattggtactcgagaaacttcggaagcataaattatatgcaaagtttagtaaatgtgagttctggttaaaagaagtcacttttctaggccacgtaatctcagccggtggagtagcagtggatcctgctaaagttgaagccgctacggaatggaaggcacccaaatctgtgactgagattcggagttttctaggtttggctggatactatcgaaggttcattgaaggattctctaagatagctcgaccaatgacacaactactcaagaaggaaaagaagtttgtgttgtcagaacagtgccaggaaagctttgagcagctcaaagaaaagttgacctctgcgcctattctagttctccccgacaataggaaagactttgttatatattgtgatgcatcaaggcaaggactaggaggagtactgatgcaggacggaaaggttgtggcctatgcatcgcgacaactgcgaccacacgaggaaaattaccctacccatgacctagagctagcagccgtggttcatgcgctaaagatttggagacactatttgattggaaaccattgcgatatctacactgaccacaagagtctgaagtatattttcacccagtcagatctcaacttgaggcaaagaatggaagggatggctcctgagcttaaagaggacatagcccagttaaacctacatatagtacctcgtggacagataaacaccctggacattcaacctcttttgagaacccaaatagaagaagcccagaaggacaatgaagaaatccaagaggtgaaggaacgcctagctacagggtttgcaaaggaattttcgaccgatgagaaagatgtattatggtataaaaagatgatctatgtacccgaacagggtggactgagaggattaatcctaaaggaagctcacgaatcagcatattcattgcaccccggaagtatgaaaatgtaccaggatctgaaggaaggatactggtggcccaatatgaagagagatgtggcagaatacgtagcactctgtgacgtatgccagaaggtgaaggctgagcaccagcgaccggcaggtttgctgcaaccccttaggattcccgagtggaaatgggatgagataggtatggattttattgttgggttgcccaagactgcaacagggtatgattccatttgggtgatcgtggatcgactcaccaagacggcgagattcatccccgttaagaccaattatagtggtgccaagctcgccgagttgtacatgaccaggatagtatgtcttcatggtgtgcctaagagaattatatccgatcgaggcacacagtttacttcgcatttctgggagaaaactggagaacgggcggtatttggacctgacattatcaaagaggccgaagaaaaggttcgcctgatccgtgatcatctaaaagtggcacaatcacgacaaaagagttacgctgacacccgaagaagaaacctggaatttaaggaagaagattacgtttatctgaaggtttctacgatgagaggcacgaaaaggtttaaggtcaaagggaaactcgcgccaagatatgtgggaccttttcaaatcatggctagacgaggagaagtcgcatatcagttacagctaccagaaaatatcgccgatgtgcacctagtcttccatgtgtctcaattaaagaagtgcttacgagtgccgaaggaacaagctccgttggaagaaattcataatagcaatgatctcacgtatccagaacacccagtccggatattggatgaagcagaaaagaggactaggaccaaagtgtggcatatgtataaggtacaatggagtaatcacactgaggatgaagccacttgggaaagcgaagaattcttgaagacggaatacccgcatctattcgaaaaccggtaa

SEQ ID NO: 14518 - DNA, 4038 bp, Oryza sativa
  Clone ID: TFbOSC400785j.C1.o28.np
atggacctatctaggagtttgtttagaagaatagcaagcagagacgataaatctttaagttgtattgataaacaaaaaggtaaaaataaagacatagatgagcttgaagatattgcagaagtagacaaacagctcgaaagatatcaaagagatactctgagggcaataagacctcaacaaatatattgcatgggattttttgagaataaaaatgggttatacagaatatctagagaagtagagttaagcgttttaacaaagccggttgagttaaaaattgtagccaaggaatttgaaaatggattaaagtattcagggtataaatatattcaccaaggtatgtatacaataggaatcaaaggtatgacaagaaagaaattaggagctaaagttttaataactctgttagataaaaggtgggacacaatagataaagcagcattaggatttttagaaggtgatatgaatgagaatatgttgataacatatatagccccagatctaatgatgcctataaaagaatttatagataaaatgagttttggttttcaaacaaagggatacgaagaatttaaaggaacaaatttgctagtaagcatagaatttataggaagattaactaatagaagtgcctccaaatacaaaataaatgtaaatgacgtgattgaaaatatgcactctaagggaataactttcatgagccctttaaaaataagttctgaagaaagggcaggagaagaatggaaaattagtgatttaattgaaagcaaaactttgagtcagcctgaaaattatataagttatcaaaacagtaaaggaaataccagcattagatttataaattataaacccagaaccacagatgacttagaaacagaagcatctgatagaaatataatagataatagaagacatagtgtttcagagtttatgaaaaaattagatcaagaaagtgagataaaatattacgaaaataaattaaaggaaataaatgaagaatataataaatctataaagtgtgagtggcctaaaataagagataaagaactttatttctatagagaattagctagagtaaagaaagtaaagaagaacgaagatatggcagtagaaatttttaaaaaccaagaaaccaagatagaacagataaagaggaaagagcaagataagcatggcaaagaagagcaaaatcttggtaaaattttaagtgaagaagagcaatgggcagagaatgaaagattatttcttgaaagttatgaagaagaaattaatctaataaatgagatggagaatatagaaaatgaaatagacaatgcagaacaatataatgattttatagacacattagatgaagtagggttacataatcttgataatgcaatggaagctatggaagtggacttaggaacaggaaaaagaaaaatatatggagaaggtactgtgaaaaacgaaggagaaagagaaagaccagctagggcagcaggaaaatggccccctgatagagaagaattttcatataactatataccaggacaatataggcacatgggtactaagagaagagactttgagaagcctgttaaatttcaaaaccagaggagtgatggtgctatattaaatttagccgcacatgaccctattgattggcctaatattattagtatttggaaaggtttaatagttcaaaaatatatacaaaaccagcacaatataggaagtaaagttgaagatatgataacctacttagaaacatttttaggtgaatctgctaaggttctatgggaacaatgggttgaaaagaatcctaataattatgaagaattgaaaagagctggtagcaatccgcataattttgcaaatgttatatctaacattattatagctgaagatccggaattaggttatacaactttgcagaatgaaaggttaaaagaaatagaaaaattaacgttaacaagttggaaaggcataaaagaattctcccaacattatttatataatgctacaactgctaaacaaggatataacaggggaatagttgaacgttatttcaataaattacctgacccactaggaagtatgatatttgaagaatataaaaaggaaactgaaggagctgaaatcaacatctcgcaagccataacttttgtgtttaagcaactaagaaaaatatgcacgggtatccaagcccaaagatctatgaaacactcggattacaatttctgcaataaaatagttcaaatacccttgtcatatggagaagacaagcctagaagtaaaaggatttataaacatcaaaatagaaacaacaataatattagaacaaagaaaaggtatttcttaagaagatccgataatagagcacccttcttacataaaagaaatgtaagaagatataatccaaagaaaatctatgacaaaacatgcagatgttttatatgcaactcgccagatcatttaagtagaacatgcccaaataaagatcaaaagagatattctagtaaatatgaagaacaagagagggttctaattatagatagcgtaaacgaaaacatattagtatgtgatgatgaaataaaagatgacgaatcaatatattctatcatagaaacagacgaagttgaaaccatcaacgaagaatatgaatcatccgatgaagagttagatttaattgacgaattagcaggtctaaaagttgaaatgatggatcaattaaattgtgaacatgattggattagaggaaagggtgactataatatcaaatgtgctttttgcatatattacccaagtcaagaaaatagagtgacttgtagtatatgtctaaaacaagcttgtgctgaatgtataaaagtaaataaacaaaaatggagaaaagaaatagaattagaatcagatgaaaagactttatctagtagagtacgagtgttagaaaatagactaaataaactagaagtagaattagagaacctaaaaaataattgtgatattaaggcattaccagagaataaggacatacaaaacaccgaatttaaagagcaattgataacactaaaagacagtaatactgctaaaataattcaactaagaaaggccataactaattttggaaataaatatatagtaagattgcctttcaaagaaatattaggtataagaatccctgttaaaataaaattgacacccaaagtatcttataaaatattagcactagtagacaccgggtgtacaaagaatattattcatgacaaatatttcataagatgtcctgaaatagttcacacaattgacgacaataaggcagaagtttccacagacatgtccggaataaagaaaattcataatcagttagcttataatattgaggtttacattaatgcaactaaatatataatagatgagattacaataagagatttgtcaatgattaatgatgacatgataattggcctaaggttccttcaacaatcagtacaaaccacagtaatacatgagcaaggaattacttttatcccatatcaaaataatgttccatatatctcagatgtacgaaagcgtggtggaacctcccccaaactcgacaacttagaagtacctaatcttgagtctgaagaaagaattaatgaatatgagcttacttaccccgaggatgacgatggtcagaactcggtgcggcggagctcgggacagcaagaggagctcaggacgatggcgggcagagtgggcggcagcgaagagggcgcccgcaaccaccggcgctcgggacggcgttttgtaaaaataaaccctgcgtacagcgccggacgttatggcaaactgataccgcggttgcttcgcccgatcgacgcgcgcacgccgcacgcccccggtgtcgacacggacctcgtcgtcgtcgcgtttgccgacgctcggagcgtgcgagctgagccgccagccagcgagcgacgcggagtagtacaaacggtgaaaagagaagaaaacaatgttgatgtcgctcgatcgcgggcctacacgtacggtcgatcggaaggtgcctgctgc

SEQ ID NO: 14519 - DNA, 3653 bp, Oryza sativa
  Clone ID: TFbOSC401724j.C1.o7.np
atggacatatttaggagtctctttagaagaatagcaagcagagatgataactgttctgataaacaaaaaggcaaatatgatgacatagatgagctgaaagatgttgcacaagtagataaacagctcgaaagatatcaacgagatactttaagggcaataagacctcaacaagtatactgcatgggattttttgagaataagaatgggctatatagaatatctagagaagtagaattaagtgttctaacaaaaccagtagaattaaaaatagtagctaaagaatttgaaaatagtttaaaatattcaggatataagtatattcaccaaggtatgtacataataggaatcaaaggaatgacaagaaagaaattaggagctaaagtgttaataaccttattagataaaagatgggacacaataaacaaagcatctttaggctatctagaaggagatatgaatgaaaatatgttgataacctatatagcgcctgatttaatgatgcctgtaaatgaattcatagataaaatgagttttggtttcaaacaaaaggatacgaagagtttaaaggaacaaatttattaataagtatagaatttataggaagattgactaatagaagtgccaccaaatacaaaatcaatgtaaatgatgtgatagaaaaaatgcattctaaaggaataaaattcatgagccctttaacaatagacactgaagaaagagcaggagaaaaatggccaattagtgaatttataaaaaataaaaccttgagtcagcctgaaaacttcataagttaccaagatagcaaagggaatgttagtattagatttacaaattataaaaccagagcttcggatgatttggatgcagaatcaactgacagaaatattatagataatagaagacatagtatttctgaattgatggaaaaattagaccatgaaagtgaaataaaatattatgaagataaattaagagatatagcagatgaatataataactctatgaaaagtgagtggcctaaaattagagacaaggaactttatttctatagagaactatccaggattaagaaacaaaaaaaagagaaaagcttggccatagaaacccccagaacccaggaaattaaaatagaacaaataaagtcaaaagaaccaagagaagaaatccaaaagtttgataaggtattaagtgaggaagagcaatgggaagtaaatgagaaattattactagagagttatgaagaagaaaacaacctgatagaggaaatagagaatatagaagaagaagataatgcagaacaatataatgattttatagactcattggatgaggtaggtttgcataatctagataatgcaatggaagccatgaaagtagatttgggaacaggaaaaaggaaaagatacggagagggttctgtacaaaatgaaggagaaagaaaaaagaccagccagggcagcaggaagatggcctccagaaaaagaagaatattcatatcattatatcccaggacagtataggcacatgggtactaaaagaagagattttgagaaatcaataaaatttcaaaatcaaaaaagtgatggggctatactaaatctagcagcacatgatcccatagactggccaaatatcattagtttttggaaggggttaatagttcaaaaatatatacaaaatcagcataatatagggaataatgtgggggatatgataacttatttagaaacatttttgggtgaatctgctaaagtcctatgggaacaatgggttgaaaagaatcctaataactacgaagagctaaaaagagcaggaagtaatcctcacaactttgcaaatatagtatctaatattatcatagctgaagacccagaattaggatatacaaccctgcaaaatgaaagattaaaagaaatagaaaaattaaccttaacaagctagaaaggtataaaggaattttctcaacattatctatataatgcaacaactgataagcaaggatacaataagggaatagttgagcgatattttaataaactacctgacccattaggtagtatgatttttgaggaatataaaaaggaaactgaaggagctgaaattaatatttcccaagccataacctttgtgttcaaacaattaagaaaaatatgcacaggaatacaagcccaaaggtcaatgaaacattctgattataatttttgcaataaaataatacaaatacctttatcatatggagaagataggcctagaaataaaagaaaccatagatatcaaagtagaaataacaataatataaagacaaagaaaaggtacttcttaagaagatcagataatagagcacctttcttacataaatgaaatgtaagaagatataacccaaagaaaacttatgataagacatgcagatgtttcatatgtaattctccagatcatttaagtagaacttgcccaaataaagatcaaaaaagatattctagtaaatatgaagaacaagagagagttttaattatagatagcgtaaatgaaaatatattagtatgtgatgatgaaataaaagatgacgaatcaatatattctatcatagaaacagatgaaattgaaaacaccaatgaagagtatgaatcaaccaatgaagagttagatttaattgacgaactagccggtttaaaaatagaaacgatggattagttaaattgtgaacatgattggattagaggaaaaggagattataacattaaatgtgctttttgcatctattacccaagccaagataatagagtaacctgtagtatatgcttaaaacaagcttgtgttgaatgtataaaagcaaataaacaaaaatggagaaaagagatagaattagaatcagatgaaaggatattatctagtagagtacgagtttttagaaaacagaataaataaactagaagtagaactagagaacctaaaaattaactatgatattaaggcattaccagaaaataaggatatacaaaataccgaatttaaagagcaagtgataacattaaaagacagtaatactgctaaaataattcaactaaaagatgccataactaattttggaaataaatatatagtaaaattgcctttcaaagaaattttgggaataagaataccggtaaaagtaaaactatcaccgaaggtattatataaaattctagcactagtagacactgggtgtataaaaaatattattcatgataagtacttcataaaatgttcagagatagttcatacaattgatgataataaggcagaagtctctacagacatgtccggaataaagaaaattcataatcagttagctcgtaatattgaagtatacattaatggaactaaatatataatagatgagattacaataagaaacttatccatgataagtgatgacatgataattggcctaaggtttttacaataatcagtacaaaccacagtaatacatgagcagggaattacttttatcccatatcaaaacaatgtgccatatatctcagaggtacgaaagcgtggtggagccagaatcaaacctgacaaccttgaagcactcaaccttgagtctgaagaaagaattaatgaatatgaacttaactataaccagcttaatagcaagaaaagctcaactagaa

SEQ ID NO: 14520 - DNA, 1647 bp, Oryza sativa
  Clone ID: TFbOSC413662j.C1.o1.np
ttcccacgcccaaagaatggatatttattatcaattgaaaaattaacgttaacaagttggaaaggcataaaagaattctcccaacattatttatataatgctacaactgctaaacaaggatataacaggggtatagttgaacgttatttcaataaattacctgacccactaggaagtatgatatttgaagaatataaaaaggaaactgaaggagctgaaatcaacatctctcaagccataacttttgtgtttaagcaactaagaaaaatatgcacgggtatccaagcccaaagatctatgaaacactcggattacaatttctgcaataaaatagttcaaatacccttgtcatatggagaagacaagcctagaagtaaaaggatttataaacatcaaaatagaaacaacaataatattagaacaaagaaaaggtatttcttaagaagatcagataatagagcacccttcttacataaaagaaatgtaagaagatataatccaaagaaaacctatgacaaaatatgcagatgttttatatgcaactcgccagatcatttaagtagaacatgcccaaataaagatcaaaagagatattctagtaaatatgaagaacaagagagggttctaattatagatagcgtaaacgaaaacatattagtatgtgatgatgaaataaaagatgacgaatcaatatattctatcatagaaacagacgaagttgaaactatcaacgaagaatatgaatcatccgatgaagagttagatttaattgacgaattagcaggtctaaaggttgaaatgatggatcaattaaattgtgaacatgattggattagaggaaagggtgactataatatcaaatgtgctttttgcatatattacccaagtcaagaaaatagagtgacttgtagtatatgtctaaaacaagcttgtgctgaatgtataaaagcaaataaacaaaaatggagaaaagaaatagaattagaatcagatgaaaagactatctagtagagtacgagtgttagaaaatagactaaataaactagaagtagaattagagaacctaaaaaataattgcgatattaaggcactaccagagaataaggacatacaaaacaccgaatttaaagagcaattgataacattaaaagacagtaatactgctaaaataattcaactaagagaggccataactaattttggaaataaatatatagtaagattgcctttcaaagaaatattaggtataagaatccctgttaaaataaaattgacaccaaaagtatcttataaaatattagcactagtagacaccgggtgtacaaagaatattattcatgacaaatatttcataagatgtcctgaaatagttcacacaattgacgacaataaggcagaagtttccacagacatgtccggaataaagaaaattcataatcagttagcttataatatggaggtttacattaatgcaactaaatatataatagatgagattacaataagagatttgtcaatgattaatgatgacatgataattggcctaaggttccttcaacaatcagtacaaaccacagtaatacatgagcaaggaattacttttatcccatatcaaaataatgttccatatatctcagaggtacgaaa

SEQ ID NO: 14521 - DNA, 2185 bp, Oryza sativa
  Clone ID: TFbOSC900074j.C1.o1.np
gagaggaggcgagagagagaggggagaagataaggttggccggcggagagagagaagagagttgaaaatttttgaactattgaaagggaaataggaggcaagtaagacttgtagacgactctttaagaggcacgtatatattcaaaatcaaaaaagtgatggggctatactaaatctagcagcacatgatcccatagactggccaaatatcattagtatttggaaggggttaatagttcaaaaatacatacaaaatcagcataatatagggaataaggtggaggatatgataacttatttagaaacatttttgggtgaatctgctaaagtcctatgggaacaatgggttgaaaagaatcctaataactacgaagagctaaaaagagcaggaagtaatcctcacaactttgcaaatatagtatctaatattatcatagctgaagacccagaattaggatatacaaccctgcaaaatgaaagattaaaagaaatagaaaaattaactttaacaagctggaaaggtataaaggaattttctcaacattatctatataatgcaacaactgctaagcaaggatacaataagggaatagttgagcgatattttaataaactacctgacccattaggtagtatgatttttgaggaatataaaaaggaaactgaaggagctgaaattaatatttcccaagccataaccttcgtgttcaaacaattaagaaaaatatgcacaggaatacaagcccaaaggtcaatgaaacattctgattataatttttgcaataaaataatacaaatacctttatcatatggagaagataggcctagaaataaaagaaaccatagatatcaaagtagaaatagcaataatataaagacaaagaaaaggtacttcttaagaagatcagataatagagcaccattcttacataaacgaaatgtaagaagatataacccaaagaaaacttatgataagacatgcagatgtttcatatgtaattcaccagatcatttaagtagaacttgcccaaataaagatcaaaaaagatattctagtaaatatgaagaacaagagagagttttaattatagatagcgtaaatgaaaatatattagtatgtgatgatgaaataaaagatgacgaatcaatatattctatcatagaaacagatgaaattgaaaacaccaatgaagagtatgaatcaaccgatgaagagttagatttaattgacgaactagccggtttaaaaatagaaatgatggatcagttaaattgtgaacatgattggattagaggaaaaggagattataacattaaatgtgctttttgcatctattacccaagccaagataatagagtaacctgtagtatatgcttaaaacaagcttgtgctgaatgtataaaagcaaataaacaaaaatggagaaaagagatagaattagaatcagatgaaaggatattatccagtagagtacgagttttagaaaacagaataaataaactagaagtagaaagaacctaaaaattaactatgatattaaggcattaccagaaaataaagatatacaaaataccgaatttaaagaacaagtgataacattaaaagacagtaatactgctaaaataattcaactaaaagatgccataactaattttggaaataaatatatagtaaaattgcctttcaaagaaattttgggaataagaataccggtaaaagtaaaactatcacccaaggtatcatataaaattctagcactagtagacactgggtgtacaaaaaatattattcatgataagtactttataaaatgtccagagatagttcatacaattgatgataataaggcagaagtctctacagacatgtccggaataaagaaaattcataatcagttagctcataatgttgaagtatacattaatggaactaaatatataatagatgagattacaataagaaacttatccatgataagtgatgacatgataattggcctaaggtttttacaacaatcggtacaaaccacagtaatacatgagcagggaattacttttattccatatcaaaacaatgtgccatatatctcagaggtacgaaagcgtggtggagccagaatcaaacccgacaaccttgaagcacttaaccttgagtctgaagaaagaattaatgaatatgaactta

SEQ ID NO: 14522 - DNA, 4128 bp, Oryza sativa
  Clone ID: TFbOSC900151j.C1.o8.fg
atggacctatctaggagtttgtttagaagaatagcaagcagagacgataaatctttaagttgtattgataaacaaaaaggtaaaaatgaagacatagatgagcttgaagatattgcagaagtagacaaacagctcgaaagatatcaacgagatactttaagggcaataagacctcaacaaatatattgcatgggattttttgagaataaaaatgggttatacagaatatctagagaagtagagttaagcgttttaacaaagccagttgagttaaaaattgtagccaaggaatttgaaaatggattaaagtattcagggtataaatatattcaccaaggtatgtatataataggaatcaaaggtatgacaagaaagaaattaggagctaaagttctaataactctgttagataaaaggtgggacacaatagataaagcagcattaggatttttagaaggtgacatgaatgagaatatgttgataacatatatagccccagatctaatgatgcctgtaaaagaatttatagataaaatgagttttggttttcaaacaaagggatacgaggaatttaaaggaacaaatttgctagtaagcatagaatttataggaagattaactaatagaagtgcctccaaatacaaaataaatgtaaatgacgtgattgaaaatatgcactctaagggaataactttcatgagccctttaaaaataagttctgaagaaagggcaggagaagaatggaaaattagtgatttaattgaaagcaaaactttgagtcagcctgaaaattttataagttatcaaaatagtaaaggaaataccagcattagatttataaattacaaacccagaaccacagatgacttagaaacagaagcatctgatagaaatataatagataatagaagacatagtgtttcagagtttatggaaaaattagatcaagaaagtgagataaaatattacgaaaataaattaaaggaaataaatgaagaatataataactctatgaagtgtgagtggcctaaaataagagataaagaactttatttctatagagaattagctagagtaaagaaagtaaagaagaacgaagatatggcagtagaaatttttaaaacccaagaaaccaagatagaacagataaagaggaaagagcaagataagtatgacaaagaagagcaaaatcttggtaaaattttaagtgaagaagagcagtgggcagagaatgaaagattatttcttgaaagttatgaagaagaaattaatctaataaatgagatggagaatatagaaaatgaaatagacaatacagaacaatataatgattttataaacacattagatgaagtagggttacataatcttgataatgcaatggaagctatggaagtggacttaggaacaggaaagagaaaaagatatggagaaggtactgtgaaaaacgaaggagaaagagaaagaccagctagggcagcaggaaaatggccccctgatagagaagaattttcatataactatataccaggtcaatataggcatatgggtacaaagagaagagactttgagaagcctgttaaatttcaaaaccagaggagtgatggtgctatattaaatttagccgcacatgaccctattgattggcctaatattattagtatttggaaaggtttaatagttcaaaaatatatacaaaaccagcacaatataggaagtaaagttgaagatatgataacctacttagaaacattcttaggtgaatctgctaagattctatgggaacaatgggttgaaaagaatcctaataattatgaagaattgaaaagagctggtagcaatccgcataattttgcaaatgttatatctaacattattatagctgaagatccggaattaggttatacaactttgcaaaatgaaaggttaaaagaaatagaaaaattaacgttaacaagttggaaaggcataaaagaattctcccaacattatttatataatgctacaactgctaaacaaggatataacaggggaatagttgaacgttactttaataaattacctgacccactaggaagtatgatatttgaagaatataaaaaggaaactgaaggagctgaaatcaatatctctcaagctataacttttgtgtttaagcaactaagaaaaatatgcacgggtatccaagcccaaagatctatgaaacactcggattacaatttctgcaataaaatagttcaaatacccttgtcatatggagaagacaagcctagaagtaaaaggatttataaacatcaaaatagaaaccataataatattagaacaaagaaaagatatttcttaagaagatcagataatagagcacccttcttacataaaagaaatgtaagaagatataatccaaagaaaacctatgacaaaacatgcagatgttttatatgcaactcgccagatcatttaagtagaacatgcccaaataaagatcaaaagagatattctagtaaatatgaagaacaagagagggttctaattatagatagcgtaaacgaaaacatattagtatgcgatgatgaaataaaagatgacgaatcaatatattctatcatagaaacagacgaagttgaaactatcaacgaagaatatgaatcatccgatgaagagttagatttaattgacgaattagcaggtctaaaggttgaaatgatggatcaattaaattgtgaacatgattggattagaggaaagggtgactataatatcaaatgtgctttttgcatatattaccctagtcaagaaaatagagtgacttgtagtatatgtctaaaacaagcttgtgctgaatgtataaaagcaaataaacaaaaatggagaaaagaaatagaattagaatcggatgaaaagactttatctagtagagtacgagtgttagaaaatagactaaataaactagaagtagaattagagaacctaaaaaataattgcgatattaaggcattaccagagaataaggacatacaaaacaccgaatttaaagagcaattgataacattaaaagacagtaatactgctaaaataattcaactaagagaggccataaccaattttggaaataaatatatagtaagattgcctttcaaagaaatattaggtataagaatccctgttaaagtaaaattgacacccaaagtatcttataaaatattagcactagtagacactgggtgtacaaagaatattattcatgacaaatatttcacaagatgtcctgaaatagttcacacaattgatgacaataaggcagaagtttccacagacatgtccggaataaagaaaattcataatcagttagcttataatatggaggtttacattaatgcaactaaatatataatagatgagattacaataagagatttgtcaatgattaatgatgacatgataattggcctaaggttccttcaacaatcagtacaaaccacagtaatacatgagcaaggaattacttttatcccatatcaaaataatgttccatatatctcagaggtttacattaatgcaactaaatatataatagatgagattacaataagagatttgtcaatgattaatgatgacatgataattggcttaaggttccttcaagaatcagtacaaaccacagtaatacatgagcaaggaattacttttatcccatatcaaaataatgttccatatatctcagaggtacgaaagcgtggtggagtctcccccaaactcgacaacttagaagtacctaatcttgagtctgaagaaagaattaatgaatatgagcttagtgagaatatagacaactattatatatcaaattccaatatagagtgcataggactacaagcatttgcaccaaattggtatagagatattaagtctaaaagggatatagaaaaaattattcaaagattagaagatatccaaattataggagaaattcctatgaaatattgggagaaaaatgctattgagtgtaaaattaatataatcaacccagaatatatcattaagactagcccaatagaagcaactccgaaagacatagaagaatttaagatgcataaagaagaacgaagatatggcagtagaaatttttaa

SEQ ID NO: 14523 - DNA, 3592 bp, Oryza sativa
  Clone ID: TFbOSC900372j.C1.o14.np
atggacctatctaggagtttgtttagaagaatagcaagcagagacgataaatctttaagtggtattgttaaacaaaaaggtaaaaatgaagacatagatgagcttgaagatattgcagaagtagacaaacagctcgaaagatatcaaagagatactttgagggcaataagacctcaacaaatatattgcatgggattttttgagaataaaaatgggttatacagaatatctagagaagtagagttaagcgttttaacaaagccagttgagttaaaaattgtagccaaggaatttgaaaatggattaaagtattcagggtataaatatattcaccaaggtatgtatataataggaatcaaaggtatgacaagaaagaaattaggagctaaagttctaataactctgttagataaaaggtgggacacaatagataaagcagcattaggatttttagaaggagacatgaatgagaatatgttgataacatatatagccccagatctaatgatgcctataaaagaatttatagataaaatgagttttggttttcaaacaaagggatacgaagaatttaaaggaacaaatttgctagtaagcatagaatttataggaagattaactaatagaagtgcctccaaatacaaaataaatgtaaatgacgtgattgaaaatatgcactctaagggaataactttcatgagccctctaaaaataagttctgaagaaagggcaggagaagaatggaaaattagtgatttaattgaaagcaaaactttgagtcagcctgaaaattttataagttatcaaaacagtaaaggaaatacaagcattagatttataaattacaaacccagaaccacagatgacttagaaacagaagcatctgatagaaatataatagataatagaagacatagtgtttcagagtttatggaaaaattagatcaagaaagtgagataaaatattacgaaaataaattaaaggaaataaatgaagaatataataactctatgaagtgtgagtggcctaaaataagagataaagaactttatttctatagagaattagctagagtaaagaaagtaaagaagaacgaagatatggcagtagaaatttttaaaaaccaagagcaagataagcatgacaaagaagagcaaaatcttggtaaaattttaagtgaagaagagcaatgggcagagaatgaaagattatttcttgaaagttatgaagaagaaattaatctaataaatgagatggagaatatagaaaatgaaatagacaatacagaacaatataatgatttataaacacattagatgaagtagggttacataatcttgataatgcaatggaagctatggaagtggacttaggaacaggaaagagaaaaagatatggagaaggtactgtgaaaaacgaaggagaaagagaaagaccagctagggcagcaggaaaatggccccctgatagagaagaattttcatataactatataccaggtcaatataggcatatgggtacaaagagaagagactttgagaagcctgttaaatttcaaaaccagaggagtgatggtgctatattaaatttagccgcacatgaccctattgattggcctaatattattagtatttggaaaggtttaatagttcaaaaatatattcaaaaccagcacaatataggaagtaaagttgaagatatgataacctacttagaaacattcttaggtgaatctgctaagattctatgggaacaatgggttgaaaagaatcctaataattatgaagaattgaaaagagctggtagcaatccgcataattttgcaaatgttatatctaacattattatagctgaagatccggaattaggttatacaactttgcaaaatgaaaggttaaaagaaatagaaaaattaacgttaacaagttggaaaggcataaaagaattctcccaacattatttatataatgctacaactgctaagcaaggatacaataagggaatagttgagcgatattttaataaactacctgacccattaggtagtatgatttttgaggaatataaaaaggaaactgaaggagctgaaattaatatttcccaagccataaccttcgtgttcaaacaattaagaaaaatatgcacaggaatacaagcccaaaggtctatgaaacactcggattacaatttctgcaataaaatagttcaaatacccttgtcatatggagaagacaagcctagaagtaaaaggatttataaacatcaaaatagaaaccataataatattagaacaaagaaaaggtatttcttaagaagatcagataatagagcacccttcttacataaaagaaatgtaagaagatataatccaaagaaaacctatgacaaaacatgcagatgttttatatgcaactcgccagatcatttaagtagaacatgcccaaataaagatcaaaagagatattctagtaaatatgaagaacaagagagggttctaattatagatagcgtaaatgaaaatatattagtatgtgatgatgaaataaaagatgacgagtcaatatattctatcatagaaacagacgaagttgaaaccatcaacgaagaatatgaatcatccgatgaagagttagatttaattgacgaattagcaggtttaaaggttgaaatgatggatcaattaaattgtgaacatgattggattagaggaaagggtgactataatatcaaatgtgctttttgcatatattatccaagtcaagaaaatagagtgacttgtagtatatgtctaaaacaagcttgtgctgaatgtataaaagcaaataaacaaaaatggagaaaagaaatagaattagaatcagatgaaaagactttatctagtagagtacgagtgttagaaaatagactaaataaactagaagtagaattagagaacctaaaaaataattgcgatattaaggcactaccagagaataaggacatacaaaacaccgaatttaaagagcaattgataatattaaaagacagtaatactgctaaaataattcaactaagagatgccataactaattttggaaataaatatatagtaagattgcctttcaaagaaatattaggtataagaattcctgttaaaataaaattgacacccaaagtatcttataaaatattagcactagtagacactgggtgtacaaagaatattattcatgacaaatatttcacaagatgtcctgaaatagttcacacaattgacgacaataaggcagaagtttccacagacatgtccggaataaagaaaattcataatcagttagcttataatatggaggtttacattaatgcaactaaatatataatagatgagattacaataagagatttgtcaatgattaatgatgacatgataattggcctaaggttccttcaacaatcagtacaaaccacagtaatacatgagcaaggaattacttttatcccatatcaaaatactgttccatatatctcagaggtacgaaagcgtggtggaacctccccctccccaaaacccgacaaactcgacaacttagaagtacccaatcttgaatatat

SEQ ID NO: 14524 - DNA, 5832 bp, Oryza sativa
  Clone ID: TFbOSC100320j.C1.o1.fg
atggggcgtgaggctctcacctaccacccggcggaccaccattccggtgcccgccggccaccatccaagccgcagttcggctcgtggcgcgacgtcgtgaagaaaggtaggggccctgccgccgctgaggaggcagcttggacggaggtccggcggaaggggagcacggagcattcactgcgggcaggtgacccaacctccaacaaacatgacagagcattcaagccgaggaaggagttcagcaaccatgacagggcattcaattcggagaaggagatccctcgctggcttctggggcgctgcttcaagtgcctaggattgggtcatcgcaagcttgactgcaagggagagacaaggtgtttccattgctggtacccgggtcacctagcgtgggcgtgtccggagaggaaggaggtctctgggggcaatccggggcggcagagccaggggagagcagcgacagaaaagggcgcggtgatagccatggcgggtgctaacctgggcggctaccagatctgtgcggccacgccgccgcagttcgtggaaaagtaccgcatcggcgagcccgactcgcggccagaaagggggcgggtggtgctgtcctggacctccgggatggagcgccatgagaggtacctccaggaactctccctgatggcgtcggtgctcaagggacggccgcccgtctcgccggcagagcttgcggaggcaatcgagctgcacacaggcgtgcagcagcgttacttcagggtggaggtcacgcgcccggaggatttcctgatctcgtttcggaaccagagggagaaggaggcggtcctgcggtgttcaaaggcgctgttctgtaatgaggtgcctgtttcgttcaagccgtggaacatatgctgctgggcggaggcctcggctttccagttcttcaccaagatctccctcgacggccttcccccgcacgcctgggaggaggaagccatgcacaagctggtcaacagcttggacggtcagcttgccgagctgatcccggcggcggacgcgcgctgcctcggtctcttcgcttggttcaagaatccgtccgacctttcccaccatctggacgtggaaatcccggaacgcccggccgcagggcgatggcgggaggggacgagcgcgacaccaccttccccgccgcgggagaagccggccctcacctatccggtcatcatccacgtagaagaagtcattgaccctacgccgttgcatactccgccgacctccttcgacgacaactccgatgatgaagacgtcacccggcggaacactttctcctgctgggcaggtcgctacgatggcgctggtccctggccgacggaggtgggaggcggtcatgtctacgccgctgcggtggtgggggtcgttgacatggcagcggcggaccgggttctagaccgggctgacattgttgttcaagacatggaggcgggggaggtgttggcgtcacagccgcattcgccgacgttggttttgcaagcgccgggtgtgtggttctctccgcaagcggtgcaagcagtggagcaaccaggggccgacgtgggaatcgctaccccgctggcggcgcctgtggttgcaacggcaaaggcgcttatcgttctggacgacgactgcagctgggcgctcgtggccggtggtgtgtcgcctctttcaccgccgctccaactctccctggacgagttaaccggcggtgaactgtcggcgctcggcacggagaaggatggcgaccgtgctgagctcagtgatgaggatacgatggctgaggtgtcgctcgtggagcatgggtgcgagcggccagcattgaaggcgactggcgacgcgctgagctcagcgcaggagagcaggagtgatcgtgggtttgaatcggcggcaaaggcgggagagttccgtgtctatgtgcggaagcaggcccagaagaaaccgagccatgagcaacctgggacggaggggatcggcctcatgggcttggcaggccaggatctggggcaggctgacctgagacgggctgtggctggcctgggacaggaaatgtcggtgggccaagttgtatgtggcgaggacgagccacctcaggcccaccaagaagaagtggcccacagcgatgacgagcggccggtccaggaaactgagatcgagagcagcagggaggcgctcagcggagagatgatgctcccacctcccgcctcgccgtcgacggcactcgcccgcgcgcggccaacctcggaggggtcgccggcgaacacgccgctaccccccgaggcggaccagattcttcagggattcctcgcgtcggtcgctactgagcctcccccctccctgctcgggaggaggccgccggagtcagtccccaaatccaagccttgttggcgcaatgtgatccctgagtggttcacgccgtggcgcagcccacgtctgcaacaacaagggaacggagctcgtcgccattcaacttcaaaagcgcagaaggtaacgatgaagaagatgggcatcattgaagaggaagaagaagcggatcaagacaccttccagcagaacactaccgtgattgatcagccgttatcgacccagcacatgaaggtgctagcggagctgctggatgtggatgttgcgctggaggaagcagatgttccaccgccggacctggcttcgctggtggcggcggggtctaaattagaggtagttgatttgcttgtaatccatgaactgtgtgggccggatttcgatgatttcgttgcccttcccgcgtcacataccaggggcggggttattgtggcctggaaggggtccgtattccgtggatcacaagtgcatttgggacaatggtcggtgacggcgaagttggagtggattgcaggcaaccattcatgtttcctcacttcggtctacgggccacaagatgataacgagaagattctgttcttggaggaactcgccgaaatcagaggaatctgtggggaggtttggcttgtggcaggtgatttcaacttaatagcggcagcggcggacaagaacaactcgcgggtgaacaggcggctcatgaatgctttccgcaacaagattaatgaacttgagctcaaagaactgtatctgttcgggaggaggtatacctggagtagcgagcaacaaattcccaccctggtcaaattggacagggtgcttgtctcaacggaatgggaggatgcgtttccggacgcgcacttgcaagcgctgagttcgtccagttcagatcattgtgcgctattgctttcttgcggggaaaccccgcagggtagaagaaggtttcgttttgaaactttttggacgaagcttgaggacttcgatcaggtggtggcggattcctggcagcaggcggttgagagcacagatccctacgtcatcctgtacgtcaagatggcgcgtcttgctatgtctctctgttcctggggacaaaagaggatcagtcgctttcgcctccagctccagattgcgaatgaattgatcttccgttttgatgttgcgcaagagaacagactcctttcccctcttgaacgccgtttcagggcaatcctgaagggccgctgcctggcattggcgtcgctcgaacgaatcagagtgcgccagcgggctcggatctcccagctccgggagggagacgccaactccaaatacttccatatgaaagtgaatgcgaggcgccgtaagctattcatcccagtccttgagtatgaagggcagacaacaacctcgcaggaagataaaattgctctggccaaggactattttcagggaattttgggtgtgtcggagcccaactcggctgagctccaattcaatcaaatcttccctctggcgccgaacctacaagagctggaagtgcctttctctgaagaggaagtttggaaggtgataaaagagatgccaaacgagaaggcgccgggaccggatggattcaccgggcttttctaccaacggtgttggcaagtcatcaaaggggaagtgctggcggcactgacgaaatttcactctgggaatcatcagaatctcgacaatctcaacacagcggtgattactctgctcccaaagaaggatgcgcccacgttgatcaaggattacaggcccataagcctgatacacagcttttccaagcttgcaacgaagattttggcgtcccggttggcgccgagaatgggcgatctagttgctgaaaaccagactgccttcatccgtggccgatcgatacacgaaaacttcatttttgtcagaggtttagcgctgcaattccaccgaagaaagaagcctatgatcctcctgaaacttgacatcactaaagcgttcgacacaatctcttggtgtttcttgctgaacttgctccgaaacagaggctttgggtccaggtggcgatcgtggatagctgccctgctcctaacttctgaaaccagaatcttgctcaatggccatgaaagtgacagcttcaagccggcacgaggactgcggcagggtgacccgttgtcgccgctactctttgtccttgtcatggatgctctgcaaggcttgctcgccaaagctacttcctgggggcttcttgccaagctggacactcgacgttccatcccaaacacatccatttatgccgatgacaccattgtgttcctgcaaccaatcgagagggaggcaacagtggtaaacgccattcttcagcttttcggaaaagctacagggctcaagaccaacctcagcaagagtgctttgacgccgattaggtgcgatgatgatgtgttggtcggagttcaacagctgcttgggtgtagggttgagaatttcccgatcacttacctcggtcttccactctccctgagaagaccgacgaaggcggaagtgcaaccgattttggatcggctgtccaaaaaagtggccggctggaagcccaaactgctctctcccgacggccgactgcgcctgatcaaatcggtgctgaccgcgctgccagttcatttcatgtctgtgcttgtgctgccaaaatgggcaatcaaagagtttaacaagaaatgccgagcgttcctgtggaaagggcaagaggaggttaatggcggccactgcctagtggcttgggatatcgtctgcagcccgaaggagtgcgggggattgggagttaaaaatctggaattatttggccaagcgatgcgaatgaaatggctcgctagacgattggagcaaagaggaaggccgtggactctgataaactcagtaccgacaaacgacatcaccggtctgttccaatcagtggcgtcgtttcaggtaggggacggtaaagatacggacttttggagggcgaactggttgccgaggggctgcatctctgtctcctcacctttgctcttcacacacctgggcagaacgaagctgactgtggcggaggcgctctcgcagaatcgctgggtgcgcgacattcgagggagtttctctgcgctggccttatcggaatattttcgtttgtgggatgagattcaggaggtacagctgcaagaggatgcccaagactctaccagttggaagctcactcctaacagagttttctgcacagcctctgtgtatgagatgttcttcgcggcacgggagttcgcggactggtggattaaagtcagactctgttttcagacgggctacaggggcgcttttgactccctttgtatcctcatctgctggttcgtgtggcgagaacgaaacctcaggatctttgaacaaaaggcgagaacggcagcggagctcttcagtgatattaaggatgaagttgcagtgtggagggagaccaacattttgagagaagtcggctaa

SEQ ID NO: 14525 - DNA, 969 bp, Oryza sativa
  Clone ID: TFbOSC103j.C1.o1.fg
atgaaggacaccgagtcaatcgacgagtttgccggcaaaatcagtggcctggcaaacaagttgagcgatcttggtgtaaccatggacgatgatgagcaagtcaagaaactactcgattctgtgccagataagtttctgcatgtcatcgctgcaattgagcagttctctgacttggacagcatgccatttgatgaggcaattggtcgcctcaaggcatacgaggaaaggatacgcaagcgtgatgacaagaatggcgagcatctacttttcacgtccggcgacacaagcggtggccgcagccgcgtcaagaagccggacaggtccaagacaatgtgctactactgtcaagaacttggacactttgcgtatgagtgccctgagaaaaagaagaagaaggagatagcgctccttgccgcagcgtcaagttttgcacaaggtagtagtgtgtggcagcaaaggatccgagccaagaggagagattctaacaattggtatcagagccaatttatgcccaagatcctgcgcttcaacaagatggccatcgtcgagcactccgcatcgcgatcgatgagggagggcatcgtgtcgctcccatatccagtgctcacctccaccaactactccacctgggcgatcaagatggaggctaacatggaggcgcaaggcatctgggatgccatcgagcccgcggccgatgaggccgtggacattaagaaggacaagcaggcacgtgcgtgtctcttcggggccgtccccgaagacgtgttgcagcagatcgcgaagaagaagactgccaaggaggtctgggaaagcctcaagacgaggttccttggcgttgagcgtgtgaaaaaggcgcgagtgcaaaccttgaagagcgatttcaaggcattgcacatgaaggacaccgagtcaatcgacgagtttgccggcaaaatcagtggcctggcaaacaagttgagcgatcttggt

SEQ ID NO: 14526 - DNA, 2844 bp, Oryza sativa
  Clone ID: TFbOSC29911j.C1.o3.fg
atggtgggaccacttccagctacgcagccagagggacagcctatcacctgggcccatttcaccgccgccttccggaggacccatgtgcccgccggagtcatggcccttaagaagagggaatttcgggagttgaaacaaggcaaccgctccgtgatggagtatttgcacgagttcaataatttggcccggtacgccccagaggatgttcgtgaagatgaggagaagcaggagaaattcctggcagggatggaccctgagctatctgttcccctggtggacaagagcatccgcctggaagccaagcacaaggaattggagtcgcacaagcgtcgcttggcgaatttccgcaaccaacagggggctaaccaaaggatccgctacaccaatccctatccagggggatcctcctcgcagccgcagcagcaaccccgctccgcgctccgacctcaattcgtggtgcgcgtcccacagccgcagcagcagcagaatcagcaaggggcccatgcaccccgccctcctgcaccagccgtgcagcctggacaaggccgcagggatgctcaaggtcaacagtgtctgtgcttcaactgcttcaagcccgggcactttgcggataaatgcccaaagccgaggcgacagcaaggccaagcgcctccccgccccaacaacggtggtaaggatgtcactcggggccgtgtgaaccacgtgactgccgaggatgtgctgagaactccagacatcatcgttggtacgttcctcattcattccatccctgctaccattttgttcgactctggagcttcccactcgtttatatctgtgccattcatggggagaaatcagctgggggtagaaaggcttaggaaccctctgctcatcaccacccctggaggggttatgacagcaaagtattatagccctgccgttcctatagaaatccagggaattgctttcccctcggatttgattcttctagacaccaagaacttggatgtgatcctcgggatgaattggttggctcaattccaaggagtagtggattgcgcaaggcgcactgtcactgtgtatcggggccctgatcaaccggttgttttctttgcacccccaacttccgccggcagttcagtacttcatcagctaggattgccagaaatacccatcgtcagtgagttcggagatgtgtttccggaagaactacccggtatgccgcccaagcgagagattgagttccagatagatcttgctccaggaaccgctcctctgtacaagcgaccctaccgtatggcggcaaatgaactggccgaaccgagcacttccccctggggtgctcccgtgatttttgtggagaagaaagagaagacaaagaggatgtgtgtcgactacagagctctcaatgaagttactatcaaaaagaagtaccctcttccccggatcgatgatctgttcgatcagcttaaaggtgccactgtattctccaagattgatcttcgttccggatatcaccagttgcgcatccgtgaagaggatatcccgaagaccgcattcaccacgcaatacggactgtatgaattcacggtaatgttgttcggtctaaccaatgctcctgccttcttcatgaacttaatgaacaaagtgttcatggaatacctggataagtttgttgtggtctttattgacgacatactggtgtactcacaatcagaggaagaccatcagcagcatctccgtttagtgttgggaaagctccgggaacaccaattgtatgccaagctcagcaagtgtgagttctggttgcccgaagtcaagttcttagggcacgtgatatctgctaaaggagttgttgtggatcccgaaacgttgctgaagaaggaagaaaaatttgtgtggagccctcaatgcgagaaagcattccaaactctcaaagaaaagctggtttccttgctagtgttaatcttaccggatactcgcaaggacttcctggtgtactgtgacgcttcgcgccaaggattggggtgcgtattaatgcagaaaggtcatgtggtagcctatgcctcacgccagctacggccctatgaaggcaactatcctacccatgatttggagttagccgctgtggttcatgctctaaaaatccggcggcagtatctcattggaaatcgctgcgaaatatataccgatcataagagtttgaaatacatcttcactcagtcggatctgaatcttcggcaaagaaggtggttagagctcatcaaggattatgatgtgggaatccactatcatcctggtaaggccaacgtggtcgccgacactctaagtcgaaaaagccattgcaacactcttggcatccgtggcattccaccggaacttaatcaacagatggaagccctgaacctaagcatagttggtcgtggattcttggctacgctggaagccaagcctaccttgctcgatcgaatccgcgaggctcagaagaatgatccagatatacatgggatcctcaagaatatgaaacagcgtaaagctgctggtttcacagaagatgaacacggaaccctatggaacggaaatcgtgtatgcgtaccggacgacaaggaacttaaacggttgatacttcaggaagctcacgaaagtccttattccatccaccctggcagcacgaagatgtacttagacttgaaagagaaatactggtgggttagtatgaagcgcgtgtcaaagcagagcaccaacgaccggccggacttctccaacctctccaagtaccagaatggaaatgggatgaaattgggatggatttcatcaccggacttccaaaaacccaaggcggatatgattctatatgggtag

SEQ ID NO: 14527 - DNA, 1104 bp, Oryza sativa
  Clone ID: TFbOSC403247j.C1.o39.fg
atggccttgttcgtctctgcaggtgaggatgttgccagcgtgcatgtcggcgttggccagcctgatgtccagcacgcaggtcccatctcgccgagcgctggcctcactatcgtcgactcctccactccggggactgccgccaccgccggaggaggggtggcgaccacctcttcatcacgccgaggttttgcacaaggtagtagtgtgtggcagcaaaggatccgagccaagaggagagattctaacaattggtatcagagccaatttatgcccaagatcctgcgcttcaacaagatggccatcgtcgagcactccgcatcgcgatcgatgagggagggcatcgtgtcgctcccatatccagtgctcacctccaccaactactccacctgggcgatcaagatggaggctaacatggaggcgcaaggcatctgggatgccatcgagcccgcggccgatgaggccgtggacattaagaaggacaagcaggcacgtgcgtgtctcttcggggccgtccccgaagacgtgttgcagcagatcgcgaagaagaagactgccaaggaggtctgggaaagcctcaagacgaggttccttggcgttgagcgtgtgaagaaggcgcgagtgcaaaccttgaagagcgatttcaaggcattgcacatgaaggacaccgagtcaatcgacgagtttgccggcaaaatcagtggcctggcaaacaagttgagcgatcttggtgtaaccatggacgatgatgagcaagtcaagaaactactcgattctgtgccagataagtttctgcatgtcatcgctgcaattgagcagttctctgacttggacagcatgccatttgatgaggcaattggtcgcctcaaggcatacgaggaaaggatacgcaagcgtgatgacaagaatggcgagcatctacttttcacgtccggcgacacaagcggtggccgcagccgcgtcaagaagccggacaggtccaagacaatgtgctactactgtcaagaacttggacactttgcgtatgagtgccctgagaaaaagaagaagaaggagatagcgctccttgccgcagcgtcaagtgatgaggagccaactcttctctga

SEQ ID NO: 14528 - DNA, 1212 bp, Oryza sativa
  Clone ID: TFbOSC23015j.C1.o1.fg
atgtttaacagagaaaaaggaaagaatgtcagcgggtatgcctccagtaactcaagttttcaattcaatccaccactggcctcaagagagttaaccagggcacacccttggtccattccaagcatgctgcttagttcacagctaccattagttggaagtcaagaccaaaatcagtatgtgtttgatcgagcgtttgccacccaggtcaatgagcttccaatgccagaagaggatgtccccttttgtcacgattgtagagagcaaggacactatgccctgaattgtccatgggtatatgtcaaagaagccccttcctttggtttagcagggcagacatcgctaaaccagcctcctcgcaccaagtcaagtttgcagcctagtgtgcaaagtgaagagcccaatggagacaatccattgaatcctagaaaatgctttcctcctagcctttcgcaccacgtggggtcacgtactaagcaagccaaaggcaagaagagtaagaatcagaagagaaaagcaccgatgcgaactgaagaagaagtacgtaagatgactattaccagcaccgaatggcctccagcagggataactattcctagacgtcaaagaggaaataccttccgaggtgcacgacagttgacccagcacctcctaagccatggtggcagagtatctgatagtgaagggtcagatcaagtctcctcggattatgaagatgagtccccccgacatctcggcgaggaagagatggaatcaaaagcatgcccccgttgtggagaaattggacacgttgctagcatgtgtttcacactttgccctcattgtgaggaagaccatccaccaggtgaatgtcccacccgcaaggtacatgttttctctgcgcaggcaaggagtgaaatcttcaactcggtatcagatgctacacggagtgaaaagtgcaagcaccggttaccagttgataacttgtccgaggttgactccgaagatatgaatcatgagaagttctggaacggaagcatcactgcactaccgcaacctagtctgagtcagccaaaaggtgcaccctggtccaagtcaggtgaagggaagattccatccgcaacaggaggtcaagccaagcagttccgagtggtgaagttttgctggaagtttgtcaagacgcgacggaagaagtcagacaagaagagaagaccgcccaacctatcttcttgctag

SEQ ID NO: 14529 - DNA, 697 bp, Oryza sativa
  Clone ID: TFbOSC25610j.C1.o1.np
gcacaaggccttggggtcgcccaagccccgcttggcgaatttccacattcaccgggaggctaaccaaaggatccgctacccgaatccctttccagaaggatcgtcctcgcagcagcaacagcagcagcaacctcgctccgcgccccgacttcatttcgtggtgcgcgtcccgcagccgcagcacaagcagagccagcaagggacccgtgcgccccgtcctcttacgccagccgcgcagtctggtcaaggccgcagggacgttcaaggtccgcagcgtttgtgcttcacctgcttcgagcctgggcactttgcggataaatgcccaaagcagaggcgccagcaaggccaagcgcctccccgctccaacaatggtggtaaggatgtcattcggggtcgtgtgaaccacgtgacggccgaggacgtgctgacaactccagacgtcatcgttggtacgttcctcattcattccatccctgctaccattttgttcgactctggagcttcccactcgtttatatctgtgccattcgtggggagaaatcagttgggggtagaaaggcttaggaaccctctcctcatcaccacccctggaggggttatgacagcaaagtattatagccctgctgttcctatagaaattcagggaattccttttccctcggatcttgtgagactaatcacgaaaaacattgctcaa

SEQ ID NO: 14530 - DNA, 5253 bp, Oryza sativa
  Clone ID: TFbOSC31864j.C1.o2.fg
atgtcatggcacagggccggtgtcctgctgctaggggctcagtcctgcctgcctgtcctgggggttccggccgtaggtgggattgggtcggtactcttgtctatggctaggatgggttggaaactatgtcacgtcttccgtctgtataccgtggtgatggccggcagcgtcagccgtcgtggtctggacatgactggtttcgtcttggagctgcggggcatgtgcgttgtcctggggtatccgcatggagtggactaccagggcaggccgctcccggagcaggagggtgacgatgcagagccccatgctgcttgggaggttactgcagtgatcctcactggctctcccgagcggacttcgttggcagtcaccgcgggtggagattctttccccgccgcttgccagagcgccgctctcctcgccatcggcactcttcaccagggctacccggacgagttgcagcactcgccctaccgctaccaccctcgtcgcggaggagcccgcgacttcgccaccttccgggatgctagctcggaggatgacgctaccatcatgcacctggcgcgcatggtggaggcgtacgatgcggctcgtatcgacttccatcagatggtgcgtcgtgggatggtcgagaacaacatgaagatcctggagctgcgtcaggagaatctgcagctgaagaaggacctagacgcagtggaggcgcagctgcatcagctcaagatcacccagggagaggtctgtcgccccaagtgtcgccgcgtctgccgcagccagaagatcaccgcccgcaagagcacctccaggcccgagcttgttcgtcagtccctggcgtggacttgcttcgtggagacccctcgtgccgagcctgcgcccgtggttccccaggagggggaagcctccggcgttggtagcatggaggatgcgctgttgctcaccttccgtcctggcccgtcgcagcggaaaagtgctgccaccggtgagggcaaccaatctgaaggcagcaaccacaaccaccagggcagcccacctccacttcatcttccgcttccaccaccaccaccagacaccaacgccattctcactcaaatcctcgcccagcaggccaacatgatgactgctttcctccaccacctccaaaatccgccacaacagaatgctccaccaccacccccacaacactctaaactcgccgagttcctccgcatccgtccacctaccttctctagctccaacaaccccgtggatgcgttggattggttgcatgccgtggggaaaaagctagacactgtgcagtgcagcgatgaggagaaagtcatcttcgccgcccaccagctgcaggggcccgcatctctatggtgggaccatttccaggctacgcagccagaggggcagcctattacttgggcccgcttcaccgctgctttccggagaacccatgtgcccgccggagtcgtggcccttaagaaaagggaattccgagagttgaagcaaggcaaccgctctgtgatggagtatttgcatgagttcaacaacctggcccggtacgccccgagattctccggggactatccggatttccaacgtctggtggacaagagcatccgcttggaagacaagcacaaggaactggagtcacacaagcgccgcttggcgaatttccgcaaccaacagggtgctaaccaaagggtccgctacaccaatccctatccagggggatcctcctcgcagcaggaacaacagcagcagcaaccacgctccgcgcctcgacctcaattcgtggtgcgcgtcccacagccgcagcagcagcagagtcaacaagggactcgtgcgccccgtcctcctatgccaactgtgcagcctggtcaaagccgcagggacgctcaaggtccgcagcgtctgtgcttcaactgcttcgagcgggggcactttgcggataaatgcccaaagctgaggcgtcagcaaggccaagcgcctccccgctccaacaacggtggtaaggatgtcattcggggtcgtgtgaaccacgtgacagccgaggacgtgctgacaactccagacgtcatcgttggtacgttcctcattcattccatccctgctaccattttgttcgactctggagcttcccactcgtttatatctgtgccattcgtggggagaaatcagttgggggtagaaaggcttaggaaccctctgctcatcaccacccctggaggggttatgacagcaaagtattatagtcctgccgtccctatagaaattcaggggattccttttccctcggatctgattctgctagacaccaagagcttggatgtgatccttgggatgaattggttggctcaattccaaggagtagtggattgcgcgagacgcactgtcactctgtacccagggccagaacaaccggttgttttctttgcacccccaacctctgtcagtagttcagaacttcatcagataggactgtcagaaatccccatcgtcagagagttcggagacgtgtttccggaagaactacccggtatgccgcccaagcgagagattgagttccggatagatcttgctccaggaaccactcctctatacaagcgaccctaccgtatggcagcaaatgaactggctgaagttaagaaacagttggaagagttgaaagaaaaggggtatatacgtccgagtacttccccctggggtgctcctgtgatttttgtggagaagaaagacaagacgaagaggatgtgcgttgactacagagctctcaatgaagtcaccataaaaaacaagtaccctcttccccggatcgatgatctgttcgatcagcttaaaggtgccactgtattctccaagattgatcttcgttccggatatcaccaattacgtattcgtgaagaagatattcctaagaccgcattcaccacgcgatacggactgtatgaattcacggtgatgtcattcggtttaaccaatgctcctgccttcttcatgaacttaatgaacaaagtgttcatggaatacttggataagtttgttgtggttttcattgatgacattctggtatactcacaatcagaggaagaccatcagcaccatctccgtctggtgttgggaaagttgcgggaacatcaattgtatgccaaacttagcaagtgtgagttctggttgtccgaagtcaaattcttagggcacgtgatatctgctaaaggagttgctgtggaccccaaaacagtgaccgccgtcactgattggaagcaacccaagacagtcactcaaattcgcagtttcttaggtttggcaggatactaccggaggtttatcgagaacttctccaaaatcgctcgacccatgacacagttgttgaagaaagaagagaaatttgtgtggagcccgcaatgcgagaaggcgttccaaactctcaaagaaaagctggtttcctcgccagtgttaatcttgccggatactcgcaaggacttcatggtgtattgtgacgcttcgcgccaaggattggggtgcgtgctcatgcaggacggtcatgtggtggcctatgcctcccgccagctacggcctcatgaaggcaactaccctacccatgatttggagttagccgcggtggttcatgctctaaaaatctggcggcattatctcattgggaatcgctgtgaaatatatactgatcataagagtttgaaatacatcttcactcagtcggacctgaatcttcggcaaaggagatggttagaactcatcaaggattacgatgtgggaattcactatcatcctggtaaggccaacgtggtcgctgacgctctaagtcgaaagagccattgcaacactcttaacgtccgtggctttccacccgaacttaaccaacagatggaagccctgaatctgagcgtagtgagtcgtggattcttggctgcgttggaagccaagcccaccttgctcgatcaaatccgcgaggctcagaagaacgacccggacatgcgtggactcctcaaaaatatgaaacagggtaaagctgcgggtttcacagaggatgaacatggaaccctatggaacggaaatcgggtatgcgttccggatgtcagagaacataaacagctgatacttcaggaagctcatgaaagtccttattccatccaccctggcagtacgaagatgtacttagacttgaaggagaaatactggtgggttagtatgaagcgggaaattgcagagttcgtggccctttgtgatgtgtgccagcgtgtcaaggcagagcaccaacgaccggccggacttctccaacctctccaagtaccagaatggaaatgggatgaaattgggatggatttcatcaccggacttccaaaaacccaaggtggatatgattctatatgggtagttgtggatcgattaaccaaggtagctcgatttattcctgtgaagaccacctatggagggaacaaactagccgagctctacttcgctaggatcgtgagtctccatggcgttcccaagaaaatcgtatctgataggggaagccaattcacctctcacttttggaagaagctccaagaagagctgggtaccagattaaatttcagcaccgcgtatcacccgcagacagatggacagaccgagcgtctaaatcagatcctagaagatatgcttcgcgcatgtgtcctagatttcgggaagacctgggataagagtctcccctatgccgagttctcctacaataacagctaccaagccagtatacaaatggcaccttatgaagcgttgtatgggcgcaaatgccggacaccgctattgtgggaccaagttggggaaagtcaagtgttcgggactgatatcctgagagaagctgaagcgaagacaaaagggaagctcgcacctcggttcgtgggtcctttccgtatcattgctcggcgcgaagaagtcgcttaccagttggagctgcccgcctccttgggcaacgggcacgatgtgttccatgtgtcacaactcaagaaatgtcttcgagtgccatccgagcaggccgactcagagcaaattgaagttcgcgaagacttgacctacgtggagaggccagtgaaaatcctggacaccatggagcgcaggaccaggaaccgggtaatccgtttttgcaaggtccaatggagcaaccacgccgaggaagaagctacttgggagcgtgaagacgagctgaaggcagcccatcccgatctcttcgccagttcttccgaatctcggggtcgagattccgtttaa

SEQ ID NO: 14531 - DNA, 3339 bp, Oryza sativa
  Clone ID: TFbOSC400086j.C1.o12.fg
atgtcgagccggtgcgatcgactacttcctctgcatcgacacgcgctacttcgcgagagttccttcgacttctcagcgtcttcttccgctgcacagcgcgtcgagtggatagatgtcggacatctatatgcggagattattggtttacttgacaagatcatggcagctcctgcaccatccagttttaacttgcggtctattcttgagaaagaaaagttgactggaacaaacttcatggactggtatcacaacctgagaattgttctcaggaaagagcacaaagagtttgtgcttacagagctttttccagctaacttgcccaacaatgctcctgctgctcaacgtagggagcatgaaaagcgatgtaatgattatcttgatataagctgtctcatgcttgctactatgtcccctgagcttcaaaggcaatatgaggcattggatgctcatacgataatcacgggactatgtaacatgtttgaggaccaagcaagagctgagaggtttaatacctcaaagtccttgtttgcgtgcaggcttgcagaaggtaatctagtgagcccacatgtgatcaaaatgattggttacaccgagagtctggataaccttggctttccacttagccgagagttggctactgatttgattctccagtcgctccctcccagctttgagccgttcataataaatttcaacatgaacaacctgaacaggaccttggcagaattgcatgggatgctaaagactgccgaggaaagcattaagaaaaaccccaaccatgtgatggttatgcataagcgcaagcccaacaacaagaagagtggtcaaaagagaaagctaaactctgatgagttcacgagtactagcaactctaagaccaaggttcaaaagacagggcccgctaaggatgcagagtgcttcttttgcaaggagataggtcattggaagagaaactgtaagaaatacctagagcagctcaagcagaagcagcatgatggaaagagttccacctcaggtattaatgttatagaaattattcttgctacttcctctactgattcttgggtatttgataccgggtcagttgctcacatatgcaaatcgttgcaggggctgaaaaaaagtaggagcttagcaagaggcgaagtggacattcgcgtgggcaatggagcaagagttgctgctattgcggtcggcactatgccattatctttaccgtcaggattagttttggagttaaagaattgttattgcattccagctttgtgtaagaacgttatctctgcttcttgttcgcaagcagagggttatggttttagatctgtggacaatggttgttcagtctattataatgacattttctatttccatgcacctatgatgaatggcttatacattgtgaatcttgatggatgttcagtctataacattattgcaaaaaggcaacatcctaatgatttgaatcccacttttatttggcattgtcgcttgggtcatataaatgagaaacgtatggagaagcttcatagagatggacttctacactcgtttgattttgaatcatttgagacatgcaaatcttgtttacttggcaaaatgacaaaggcacctttcacgggtcaaagtgaaagggcaagtgaaccattgggactagtacatattgatgtatgtggaccaatgagctcaactgccagaggtggttttaggtactttattacctttaccgatgactttagtagatatggttatgtctacttaatgaggcataagtctgagtcctttggaaagttcaaggaatttcagaatgaggtacaaaatcatttgggcaagacaatcaagtatctacgatctgatcgtggtggagagtacttgagcctagaatttggcaatcatctaaaggaatgtggaattgttccacaagtcactccgctaggaacgcctcagtggaatggggtgtctgaacggaggaatcgtacattgttggacatggtgcgatcaatgatgagccaaactgatctgccgctaagtttttggggttacgctctagagacagctgcgttcacactaaacagggttccatcaaaatcagtggataagacaccatatgagatatggactgggaagcgtcccattttgtctttcctaaagatttggggctgtgagttgtggaagcaccggttttacgaatgtccgaaaggatacggcgtacacctgcgagtttggaacttggttgatccacctgatggtgtaaaagccattgagtgcaaatgggtctttaagaaaaagacggatgtagatggaaatgttcacatctacaaggcacgattgatggcgaaaggtttcatacaaattcaaggtgttgattatgatgaaactttctcgccagtcgccatgctaaattctattcggattgttttagcgattgctgcctatttcgattatgagatatggcaaatggatgtcaaaacagctttcctcaatggaaatctcgatgaggatgtgtacatgacacaacccaagggatttgttgatccacaatcaactaaaaagatatgcaaattgcagaaatccatttatgggttgaagcaagcatctcggagttggaatattcgttttgacgaagtagtcaaggcgttgggctttgtcaaacacgaagaagagccttgtgtatacaagaagattagtgggagcgcattggtgtttctaatcctatatgtagatgacatattattgattgggaacgatattcctatgcttgaatccgttaagacatcgttgaaaaatagtttttcaatgaaagacttaggggaagcagcatatattctgggcataaggatttatagagatagatcaaaaaggctaattggattaagccagagtacatacattgacaaggtgttgaagaggttcaacatgcaagattctaagaaaagtttcttaccgatgtcacatggcattaatcttggcaagaatcagtgtcctcaaacgactgatgagcgaaacaagatgaatgtttcatatgcacttagtgtaacaagccgataccaatcagatccaggtgagagtcactggatagctgtaaagaatattctaaagtacttgagaagaactaaggatatgttcctagtctatggaggacaggaagagctcgttgtaaatggttacactgacgcaagcttccaaaccgacaaagatgattttagatcgcagtctggatttgtgttctgcctgaatggaggcgctgtgagttggaagagttccaagcaagatacagtggttgattctacaacagaagccgaatacattgccgcttctaaagcagcaaaggaggctgtttag

SEQ ID NO: 14532 - DNA, 2133 bp, Oryza sativa
  Clone ID: TFbOSC400850j.C1.o22.fg
atggcgagttcctcctcctccatagccgccacaaatcctctggttggcatccaggtctctgaaaaactcaccaagcaaaattatgctctctggtcagcgcaagtgctcacagccctgaggggcgcgcggctggaaggattcatctccggcaagactactccaccacctgccgagatagagaagaaagaaggagacaagaaagaaggagagaagacaatcaagattgctaatccggcagtggatgaatggtttgccacggaccaacaggtccttggcttcctgttctcctcactgtcacgtgagatcctgtcccaggtcgccggtgcaacaacggcggcacaggcgtggcaggccatcagcgacatgttcgcgtcgaagtcccgagctggcctcatcaatatgcggctggcactcacctctacacagaagggcaccatgtcagtcacagaatatgtggccaagatgagggcgattgcagatgaacttgcagcagcaggcaagccaattgatcaagatgatcttattgcttatatcattaacggtcttgatgcaaactttgatcctgttgtcgaggctctcgtcgctagggttgaacccatcacagtgcaagagatgtattctcatctgctgaactttgagaacaagatccgtcttcgtcaagcgttcctgactgcctccaccaacgctgcaaatcgcaacaatgtcacccgtggtggccgtggtggcatgccgcgcggacgcggcggtcgtggcggcggtggccgcggcggcaacggaggacgcggcaacaatggcgggggtcgaggcgataatcgccctacctgccaagtctgcaacaaaagaggccatgtggcttcagattgttggcatcgtttcgatgaaacgtatgtccctgatgaaaagattggaggtgcagcaactcatgcctatggcatagacacaaactggtatgtagatactggtgcaacagatcacatcacaagccagcttgacaagcttacaacaaaggagaaatatcaaggcaccgatcagatccacacggcgagtggcgaagaagtttttgaaaaattccatgagttccaaaatatggttgaaagacagttcaatcgtaaaattgttaccatgcaaactgattggggagggcgtgtatatgtttcccgagatgttacctttgatgaacatgagtttcctttttcccaccttcactccaatgcaggggcacgtctccgcgctgaaatttccctcctaccagaacatctcctctctcatgcctatgatcaagggggagagaaacatagcactgaccatatgcatgaatatatcctgcctgtctccactaactcccaagatttgagtcctgtttttacagaaattggcacaggaggaattattccaggtacatcagatggcttgcacccagaaaatgacgatcaggcgggaaaaactgcctcagatcagccgtcgacatcagccgtcttgcctctgcagccgcagcagtcactggagcagcaaccggacggcaccacgtcgtctcatcatccagcatctcctgcgcatgcatctcctccacgccaaccagcagtcgacgtgtcagctggcacacatcatgatgcctccggatcgtctgcatctgatgaaccagtggccacgacagcgccacctgaggtaacactcagacctaaaaccagattgcagagcggtattagaaaggagaaaatttatactgacggtacagttaagtatagctgcttcacatcatctggtgaaccccaaaatttgaatgaggctttaggagataaaaattggaaggagactatggatgcagaatatatggcacttatgaaaaataaaacctggcatttagttcctactaagaaagggattaatataataaattgtaaatgggtgtataagattaagaggaaaactgatgggagtctagatagatacaaagctagacttgtagcaaagagttttaaacaaaggtatggtattgattatgaagacaccttccgtccagtagtaaaggcagctactattagaactattctttctatagcagtgtctagaggatggagtcttcgccagttagatgttcaaaatgccttcttacatggtgttttagaagaataa

SEQ ID NO: 14533 - DNA, 5151 bp, Oryza sativa
  Clone ID: TFbOSC24701j.C1.o1.fg
atggcgcagaaatactcctggcaaagccctagatcggatgatgctgagaagggttcggccgagccccctagttcgactgaaccattggctggcccaacaagcccaggttcaaggttgttcttggcacggcaagaacagcaacaacgtggagtcggtgtaccggttgctaaggcgcagcacccctgtggtagttgtagtcggaccgccaacgtcgtatccttccccaaatcgaagtttatcctcctctcatcgaaagatcgggaacccccgttgctgcatcaagtggtatcagagctcaagttgctcggaggatcgggggagcaccctcaacattcaccacgtacgaggggcatcatacaacattttgagcgccaagtgagggagcatgctgaaggccttgatgaggatgttagggtcgccaatgatcgccttggtcaattggaggctgctcaaattgacaccaactccaagctttcctcattggagaggtcccttgtggctgtgaacacttctcttgcaggtatcttgaatacgttggagagaatgggccaagatggtcatgatggatcggctaggcgcaaccacaatggccatgatgctaatagcagcatcgcagcaagggaagaactggagtacgttgctgacactgagcatgatgaggaggtacttggtcgtccacaaagacaacagcgccggcagcgccatggcttgggcgctccaccacggcgggaggtacgtgataatgatgattctttaggcaagatcaagtttaccattccttgctttgatggaaaatatgaccctgatgcatatcttacttgggagttagccattgatcagaaatttgcttgccatgattttcctgagaataaatgtgttagggctgctactagtgagttcactgattttgcatccatttggtggagtgaatttgttcgttccaatccaaataacactccccaaacctgggatgcaatgaaaagagtcatgcgagctagatttgttccttcatatcatgcacgtgatttgctgcacaaattgcaacaacttagacagggaaacaaatctgtagaggagtattatcaagctttgcaaacaggaatgcttcgttgtggattggtagaaaatgatgatgctggtatggctagattcatgggtgggctgaaccgagaaattcaggacattctaacctacaaagaatataattcaattaatcatttgtttcatcttgcttgtaaagctgaaagggaagtacagggacgaagagctagcttcaggactaacatttctgcaggtcgtgctagctcttggacatcttctaacgctgctgcaccgtcaactcgagcagcagcaccatcgtcctcaagcaacaagctgcgtccctctacaacaaactctacaccatgcccgagtgaaccaacaagaggggttgctgctacaccttccaagacctcatcatcagtagcttcatcaggaaggacaagagatattcagtgcttacgctgcaagggctatggtcacgtgcgcaaggactgcccaagcactcgtgtaatgatcgtgagagctgatggtgggtactcctccgctagtgatttagatggagaaacctatgctttgcttgcaactaacaatgcacgggaaggtgacgcgccccaccaagatgaggaacacattggggctgaagctgcagagcactatgagagcctcgtggtgcagcgagtgctaagcgcacaaatggaaagggctgaacagaatcagcgccacaccttgtttcaaaccaagtgtgtgatcaaggaacgctcttgccgcgtgatcatagatggaggaagctgcaataatttggctagtgctgaaatggtggagaaacttgcattgagcacacagccacatccacagccctactatattcaatggcttaatagcagcggcaaggtaaaggtaacacgattggtaagagtacattttgccattggttcttatcatgattcaatcaactgtgatgttgtgcctatgcaagcatgttctatgttattaggtaggccatggcagtttgataaagattctttacactttggcaaatccaatcaatactcctttgtgcataatggaaaaaaacttgtgttacatcctatgtctcctgaagttattttaaaggatgaacttgctagagctagcaaacaaaaaaatcaggagcatactaggagtgagcatcttattgcggctaatgaacttgagaagcataagaagaaacccaccaactctgttcaaaataataaaaatgagattaagctgaagggatcttgtttcattgcaacaaaatcagatttggatgaagttgacactgacactgttgtttgctatgctttggtttgcaaagaaaccttatttccaattgaggatactcctatttctttgcctcctccggtcactaaccttttgcaggagtatgctgatattttcccaaaggaggttccaccggggctgccaccaattcgagggattgagcaccaaattgacctcattcctggggcctctctgccaaaccgtgcgccatacaggaccaacccggaggaaacaaaggagattcagcgtcaagtgcaagagttactcgacaaggggtatgtacgtgagtctcttagtccttgttctgtccccgtgcttttagttcctaagaaagatggctcatggcgcatgtgtgtggattgtagagcaattaacaacatcacaatcagatatcgtcatcctatccctaggctagatgatatgcttgatgaattgagtggttcacttgtgttctctaaaattgatttgcgtagtggttaccaccagattcgcatgaagttaggagatgaatggaaaacagcttttaaaactaaattcggcctatatgagtggttagtcatgccctttggtctcactaatgcacccagtactttcatgagattaatgaatgaagttttacgtgctttcattggcagatttgtggtggtatattttgatgacattctcatatatagcagatcaatagaggatcatcatggtcatttgcgtgctgtttttgatgctctacgagatgcacgtttatttggtaaccttgagaagtgcacattttgcacagatcgagtctcttttcttagctatgttgtgactccgcagggaattgaagtagatcaagccaaggttgaagccatacataactggccggttccaacaacgatcacacaagtgagaagctttctaggacttgctgggttctaccgccgctttgtgaaggattttagcaccattgcagccccattacatgagcttaccaagagaaatgtcacattcacttgggctgcagcacaaaggaatgcattcgacactttgaaagataagttaacacacgctcctttactccaacttcctgatttcaacaaaacttttgagcatgaatgtgatgctagtgggattggattgggtggtgtgttgttacaagaaggcaaacctgtagcatatttcagcgagaaattgagtgggcctagtttgaattattctacttatgataaggaattgtttgctctagtgcgaacattggaaacatggcagcattatttatggcccaaagaatttgttatacactctgatcatgaatctttgaaacacattcgaagtcaagcaaaacttaaccgtaggcatgctaaatgggttgaatttattgaatcttttccatatgtcatcaaacataagaagggaaaagaaaatgtcattgctgatgctttgtctagacgttacgcaatgctatcccaacttgacttcaaaatttttggcttagaaacaataaaagagcaatatgcgcacgatgatgattttaaaaatgtgttgttgaattgcaaggagggaaggacttggaacaaattcgttctcaccaatgggtttgtgtttagagctaataagttatgcattccagctagctccgtgcgtatgctattattgcaggaagcgcatggtggagggctgatgggacactttggtgtgaagaagacggaggatatccttgctgatcatttcttttggcctaagatgaggagagacgtggagaggttcgttgctcgctgcacaacatgccaaaaagctaagtcacgccttaaccctcatggtttgtatatgcctttgcctgttcctagtgtgccttgggaggatatttctatggactttgttttagggctgcctagaacaaagaaggggagggacagtatctttgttgttgtagatagattttctaagatggcgcatttcataccttgtcataagagtgatgatgctacacatgttgctgatttgttctttcgtgagattgttcgcttgcatggagtgccaaacaccatagtttctgatcgcgatacaaaattccttagtcatttttggagaaccttgtgggctaagttggggactaaatttttattttctactacatgtcacccccaaactgatggacaaactgaggtggtgaatagaacattatctacaatgcttagggctgttttgaaaaagaatattaaaatgtgggaagaatgtttgcctcatgttgagtttgcttataatcgttcacaacattctactactaagaagtgcccttttgagattgtttatggccttctaccccgtgctccaattgatcttttgccccacccaacttcagagagagtgaactttgatgcaaaatatcgcgctgaattgatgttaaaactgcatgagaccactaaggagaacatagagcgcatgaatattaaatataaacttgctgggagcaaaggaaagaaacatgttgcttttgaacctggtgatttggtttggttgcatttgagaaaggataggttccctaatttgagaaaatctaagttgctacctagagctgatggtcctttcaaagtgctacaaaagattaatgacaatgcatacaagcttgagctacctgccgattttggggttagccccacgtttaacattgcagatttaaagccatatttgggagaagaagatgagttagagtcgaggacgactcaaatgcaagaaggggaggatgatgaggacatcctttccaacgatacatccacgcctattgcacagcaaggaccaatgactagagctcgagctcatgaacttaattaa

SEQ ID NO: 14534 - DNA, 3351 bp, Oryza sativa
  Clone ID: TFbOSC27996j.C1.o2.fg
atgccgcatggaaggtggtgggactcgatcaaccctattcctgcaagcaaatcgaagaaacaagacgagcagttcgctcgttttgtgatccagaagatccacatcaaagtgccgttgttggatgctatgcaagtgccaacatacgcccgttatctcaaggacatactcaacaacaagagaccgctgccaacaacggaggtggtcaagctgacggaacaatgcagcaacctgatactccacaagctcccggagaagaagaaagatccggggtgtcctacgatcacctgctcgatcggggcacaacaattcgaccagacctggtgcgaccttggagccagcgttagcgtcatgccaaaagacgtcttcgacaagctcaacttcacagtgttggaaccaacaccgatgcgcctccaactggctgactcatcagttcgttacccagcaggaatagcggagaatgtgccagtcaagatacgggatttcttcatcccggttgattttgtggtgctagacatggacatggggaaggagatgccgctcatcctagggcgtccattccttagtaccgcaggagccaacattgacgtgggaacggggagtatccgtttccatatcaacgggaaggaggaaaagtttgagtttcaaccaaggacggaacaatgctccatgaatttcctggagaaggaaacaacgatgcccaggaaccgttattggaaaacgccggtaaaatcacccgtaccggccaagaagtcagatcagccggctcagaagaagccgccatccgcaccaaaatcaaaaaaggggtgggagaatgaccataatgatgaggacatcccttccaacgatacaaccacgcctattgcacagcaaggaccaatgactagagctcgagctcgtgaacttaattatcaggttcaaggttgttcttggcacggcaagaacagcaacaacgtggagtcggtgtaccggttgctaaggcgcagcacccctgtggtagttgtagtcggaccgccaatgtcgtatccttccccaaatcgaagtttatcctcctctcatcgaaagatcgggaacccccgttgctgcatcaagtggtatgagagctcaagttgctcggatcgtgctgttgtcggctccggaggatcgggggagcaccctcaacattcaccacgtacgaggggcatcatacaacattttgagcgccaagtgagggagcatgctgaaggccttgatgaggatgttagggtcgccaatgatcgccttggtcaattggaggctgctcaaattgacaccaactccaagctttcctcattggagatgtcccttgtggctgtgaacacttctcttgcaggtatcttgaatacgttagagagaatgggccaagatggtcatgatggatcggctaggcgcaaccacatggccatgatgctaatagcagcatcgcagcaagggaagaactggagtacgctgctgacactgagcataatgaggaggtacttggtcgtccacaaagacaacagcaccggcagcgccatggcatgggcgctccaccacggcgggagtgaatttgttcgttccaatccaaataacactccccaaacctgggatgcaatgaaaagagtcatgcgagctagatttgttccttcatatcatgcacgtgatttgctacacaaattgcaacaacttagacagggaaacaaatctgtagaggagtattatcaagctttgcaaacaggaatgcttcgttgtggattggtagaaaatgatgatgctggtatggctagattcatgggtgggctgaaccgagaaattcaggacattctagcctacaaagaatataattcaattaatcgtttgtttcatcttgcttgtaaagctgaaagggaagtacagggacgaagagctagcttcaggactaacatttctgcaggttgtgctagctcttggacatctcccaacgctgctgcaccgtcaactcgagcagcagcaccatcgtcctcaagcaacaagctgcgtccctctacaacaaactctacaccatgcccgagtgaaccaacaagaggggttgctgctacaccttccaagagctcatcatcagtagcttcatcaggaaggacaagagatattcagtgcctacgctgcaagggctatggtcacgtgcgcaaggactgcccaagcactcgtgtaatgatcgtgagagctgatggtgggtactcctccgctagtgatttagatgaagaaacctatgctttgcttgcaactaacaatgcaggggaaggtgacgcgccccaccaagatgaggaacatattagggctgaagctgcagagcactatgagagcctcgtggtgcagcgagtgctaagcgcacaaatggaaagggctgaacagaatcagcgccacaccttgtttcaaaccaagtgtgtgatcaaggaacgctcttgccgcgtgatcatagatggaggaagctgcaataatttggctagtgctgaaatggtggagaaactttcattgagcacacagccacatccgcagccctactatattcaatggcttaatagcagtggcaaggagcatactaggagtgagcatcttattgcggctaatgaacttgagaagcataagaagaaacccaccaactctgttcaaaataataaaaatgagattaagctgaagggatcttgtttcattgcaacaaaatcagatttggatgaagttgacactgacactgttgtttgctatgctttggtttgcaaagaaaccttatttccaattgaggatactcctatttctttgcctcctccggtcactaaccttttgcaggagtatgctgatattttcccaaaggaggttccaccggggctgccaccaattcgagggattgagcaccaaattgacctcattcctggggcctctctgccaaaccgtgcgccatacaggaccaacccggaggaaacaaaggagaatcagcgtcaagttgatgaggacatcccttccaacgatacaaccacgcctattgcacagcaaggaccaatgactagagctcaagctcgtgaacttaattatcaggttcaaggttgttcttggcacggcaagaacagcaacaacgtggagtcggtgtaccggttgctaaggcgcaacacccctgtggtagttgtagtcggaccgccaacgtcgtatccttcgccaaatcgaagtttatcctcctctcatcgaaagatcgggaacccccgttgctgcatcacaagtgcaagagttactcgacaagggtcgtgctccaccagattggggcgcaccccacatgggccccacttgggccggggtcccaaacgaagttacaagcccaaaggcccatga

SEQ ID NO: 14535 - DNA, 4359 bp, Oryza sativa
  Clone ID: TFbOSC31043j.C1.o2.fg
atgacaggaggatcgggggagcaccctcaacattcaccacgtacaaggggcatcatacaacattttgagcgccaagtgagggagcatgctgaaggccttgatgaggatgttagggtcgccaatgatcgccttggtcaattggaggctgctcaaattgacaccaactccaagctttcctcattggagaggtcccttgtggctgtgaatacttctcttgcaggtatcttgaatacgttggagagaatgggccaagatggtcatgatggatcggctaggcgcaaccacaatggccatgatgctaatagcagcatcgcagcaagggaagaactggagtacgctgctgacactgagcatgatgaggaggtacttggtcgtccacaaagacaacagcgccggcagcgccatggcatgggcgctccaccacggcaggaggtacgtgataatgatgattctttaggcaagatcaagtttaccattccttgctttgatgaaaaatatgaccctgatgcatatcttacttgggagttagccattgatcagaaatttgcttgccatgattttcctgagaataaacgtgttagggctgctactagtgagttcactgattttgcatccatttggtggagtgaatttgttcgttccaatccaaataacactccccaaacctgggatgcaatgaaaagagtcatgcgagctagatttgttccttcatatcatgcacgtgatttgctgcacaaattgcaacaacttagacagggaaacaaatctgtagaggagtattatcaagctttgcaaacaggaatgcttcgttgtggattggtagaaaatgatgatgctggtatggctagattcatgggtgggctgaaccgagaaattcaggacattctagcctacaaagaatataattcaattaatcgtttatttcatcttgcttgtaaagctgaaagggaagtacagggacgaagagctagctttaggactaacatttctgcaggtcgtgctagctcttggacatcttccaacgttgctgcaccgtcaactcgagcagcagcaccatcgtcctcaaacaacaagctgcgcccctctacaacaaactctacaccatgcccgagtgaaccaacaagaggggttgctgctacaccttccaagagctcatcatcagtagcttcatcaggaaggacaagagatattcagtgcctacgctgcaagggctatggtcacgtgcgcaaggactgcccaagcactcgtgtaatgatcgtgagagctgatggtgggtactcctccgctagtgatttagatgaagaaacctatgctttgcttgcaactaacaatgcagggaaaggtgacgcgccccaccaagatgaggaacacattggggctgaagctgcagagcactatgagagcctcgtggtgcagcgagtgctaagcgcacaaatggaaagggctgaacagaatcagcgccacaccttgtttcaaaccaagtgtgtgatcaaggaacgctcttgccgcgtgatcatagatagaggaagctgcaataatttggctagtgctgaaatggtggagaaacttgcattgagcacacagccacatccgcagccctactatattcaatggcttaatagcagcggcaaggagcatactaggagtgagcatcttattgcggctaatgaacttgagaagcataagaagaaacccaccaactctgttcaaaataataaaaatgagattaagctgaagggatcttgtttcattgcaacaaaatcagatttggatgaagttgacactgacactgttgtttgctatgctttggagtatgctgatattttcccaaaggaggttccaccggggctgccaccaattcgagggattgagcaccaaattgacctcattcctggggcctctctgccaaaccgtgcgccatataggaccaacccagaggaaacaaaggagattcagcgtcaagtgcaagagttactcgacaaggggtatgtacgtgagtctcttagtccttgttctatccccgtgcttttagttcctaagaaagatggctcatggcgcatgtgtgtggattgtagagcaattaacaacatcacaatcagatatcgtcatcctatccctaggctagatgatatgcttgatgaattgagtggttcacttgtgttctctaaaattgatttgcgtagtggttaccaccagattcgcatgaagttaggagatgaatggaaaacagcttttaaaactaaattcggcctatatgagtggttagtcatgccctttggtctcactaatgcacccagtactttcataagattaatgaatgaagttttacgtgctttcattggcagatttgtggtggtatattttgatgacattctcatatatagcagatcaatagaggatcatcatggtcatttgcgtgctgtttttgatgctctacgagatgaacgtttatttggtaaccttgagaagtgcacattttgcacagatcgagtctcttttcttggctatgttgtgactccgcagggaattgaagtagatcaagccaaggttgaagccatacatagctggccggttccaacaacgatcacccaagtgagaagctttctaggacttgctgggttctaccgccgctttgtgaaggattttagcaccattgcagccccattacatgagcttaccaagagaaatgtcacattcacttgggctgcagcacaaaggaatgcattcgacactttgaaagataagttaacacacgctcctttactccaacttcctgatttcaacaaaacttttgagcttgaatgtgatgctagtgggattggattgggtggtgtgttgttacaagaaggcaaacctatagaatatttcagcgagaaattgagtgggcctagtttgaattattctacttatgataaggaattgtttgctctagtgcgaacattggaaacatggcagcattatttatggcccaaagaatttgttatacactctgatcatgaatctttgaaacacattcgaagtcaagcaaaacttaaccgtaggcatgctaaatgggttgaatttattgaatcttttccatatgtcatcaaacataagaagggaaaagaaaatgtcattgctgatgctttgtctagacgttacgcaatgctatcccaacttgacttcaaaatttttggcttagaaacaataaaagagcaatatgcgcacgatgatgattttaaagatgtgttgttgaattgcaaggagggaaggacttggaacaaattcgttctcaccaatgggtttgtgtttagagctaataagttatgcattccagctagctccgtgcgtatgctattattgcaggaagcgcatggtggagggttgatgggacactttggtgtgaagaagacggaggatatccttgctgatcatttcttttggcctaagatgaggagagacgtggagagggctgttttgaaaaagaatattaaaatgtgggaagaatgtttgcctcatgttgagtttgcttataatcgttcacaacattctactactaagaagtgcccttttgagattgtttatggccttctaccccgtgctccaattgatcttttgcccctcccaacttcagagagagtgaactttgatgcaaaatatcacgctgaattgatgttaaaactgcatgagaccactaaggagaacatagagcgcatgaatataaagtataaacttgctgggagcaaaggaaagaaacatgttgcttttgaacctggtgatttggtttggttgcatttgagaaaggataggttccctaatttgagaaaatctaagttgctacctagagctgatggtcctttcaaagtgctacaaaagattaatgacaatacatacaagcttgagctacctgccgattttggggttagccccacgtttaacattgcagatttaaagccatatttgggagaagaagatgagttagagtcgaggacgactcaaatgcaagaaggggaggatgatgaggacatcccttccaacgatacaaccacgcctattgcacagcaaggaccaatgactagagctcgagctcgtgaacttaattatcaggttcaaggttgttcttggcacggcaagaacagcaacaacgtggagtcggtgtaccggttgctaaggcgcagcacccctgtggcagttgtagtcggaccgccaacgtcgtatccttccccaaatcaaagtttatcctcctctcatcgaacgatcaggaacccccgttgctgcatcagtttgtcgagcaggcataatagaagcagtttgtatgtgttctacttcttactctctccattctcgagaacttgcatatcgaactccattatagtctga

SEQ ID NO: 14536 - DNA, 5127 bp, Oryza sativa
  Clone ID: TFbOSC400192j.C1.o21.fg
atgacaggaggatcgggggagcaccctcaacattcaccacgtacaaggggcatcatacaacattttgagcgccaagtgagggagcatgctgaaggccttgatgaggatgttagggtcgccaatgatcgccttggtcaattggaggctgctcaaattgacaccaactccaagctttcctcattggagaggtcccttgtggctgtgaatacttctcttgcaggtatcttgaatacgttggagagaatgggccaagatggtcatgatggatcggctaggcgcaaccacaatggccatgatgctaatagcagcatcgcagcaagggaagaactggagtacgctgctgacactgagcatgatgaggaggtacttggtcgtccacaaagacaacagcgccggcagcgccatggcatgggcgctccaccacggcaggaggtacgtgataatgatgattctttaggcaagatcaagtttaccattccttgctttgatgaaaaatatgaccctgatgcatatcttacttgggagttagccattgatcagaaatttgcttgccatgattttcctgagaataaacgtgttagggctgctactagtgagttcactgattttgcatccatttggtggagtgaatttgttcgttccaatccaaataacactccccaaacctgggatgcaatgaaaagagtcatgcgagctagatttgttccttcatatcatgcacgtgatttgctgcacaaattgcaacaacttagacagggaaacaaatctgtagaggagtattatcaagctttgcaaacaggaatgcttcgttgtggattggtagaaaatgatgatgctggtatggctagattcatgggtgggctgaaccgagaaattcaggacattctagcctacaaagaatataattcaattaatcgtttatttcatcttgcttgtaaagctgaaagggaagtacagggacgaagagctagctttaggactaacatttctgcaggtcgtgctagctcttggacatcttccaacgttgctgcaccgtcaactcgagcagcagcaccatcgtcctcaaacaacaagctgcgcccctctacaacaaactctacaccatgcccgagtgaaccaacaagaggggttgctgctacaccttccaagagctcatcatcagtagcttcatcaggaaggacaagagatattcagtgcctacgctgcaagggctatggtcacgtgcgcaaggactgcccaagcactcgtgtaatgatcgtgagagctgatggtgggtactcctccgctagtgatttagatgaagaaacctatgctttgcttgcaactaacaatgcagggaaaggtgacgcgccccaccaagatgaggaacacattggggctgaagctgcagagcactatgagagcctcgtggtgcagcgagtgctaagcgcacaaatggaaagggctgaacagaatcagcgccacaccttgtttcaaaccaagtgtgtgatcaaggaacgctcttgccgcgtgatcatagatagaggaagctgcaataatttggctagtgctgaaatggtggagaaacttgcattgagcacacagccacatccgcagccctactatattcaatggcttaatagcagcggcaaggtaaaggtaacacgattggtaagagtacattttgccattggttcttatcatgattcaatcaactgtgatgttgtgcctatgcaagcatgttctattttcttaggtaggccatggcagtttgataaagattctttacactttggcaaatccaatcaatactcctttgtgcataatggaaaaaaacttgtgttacatcctatgtctcctgaagttattttaaaggatgaacttgctagagctagcaaacaaaaaaatcaggagcatactaggagtgagcatcttattgcggctaatgaacttgagaagcataagaagaaacccaccaactctgttcaaaataataaaaatgagattaagctgaagggatcttgtttcattgcaacaaaatcagatttggatgaagttgacactgacactgttgtttgctatgctttggtttgcaaagaaaccttatttccaattgaggatactcctatttctttgcctcctccggtcactaatcttttgcaggagtatgctgatattttcccaaaggaggttccaccggggctgccaccaattcgagggattgagcaccaaattgacctcattcctggggcctctctgccaaaccgtgcgccatataggaccaacccagaggaaacaaaggagattcagcgtcaagtgcaagagttactcgacaaggggtatgtacgtgagtctcttagtccttgttctatccccgtgcttttagttcctaagaaagatggctcatggcgcatgtgtgtggattgtagagcaattaacaacatcacaatcagatatcgtcatcctatccctaggctagatgatatgcttgatgaattgagtggttcacttgtgttctctaaaattgatttgcgtagtggttaccaccagattcgcatgaagttaggagatgaatggaaaacagcttttaaaactaaattcggcctatatgagtggttagtcatgccctttggtctcactaatgcacccagtactttcataagattaatgaatgaagttttacgtgctttcattggcagatttgtggtggtatattttgatgacattctcatatatagcagatcaatagaggatcatcatggtcatttgcgtgctgtttttgatgctctacgagatgaacgtttatttggtaaccttgagaagtgcacattttgcacagatcgagtctcttttcttggctatgttgtgactccgcagggaattgaagtagatcaagccaaggttgaagccatacatagctggccggttccaacaacgatcacccaagtgagaagctttctaggacttgctgggttctaccgccgctttgtgaaggattttagcaccattgcagccccattacatgagcttaccaagagaaatgtcacattcacttgggctgcagcacaaaggaatgcattcgacactttgaaagataagttaacacacgctcctttactccaacttcctgatttcaacaaaacttttgagcttgaatgtgatgctagtgggattggattgggtggtgtgttgttacaagaaggcaaacctatagaatatttcagcgagaaattgagtgggcctagtttgaattattctacttatgataaggaattgtttgctctagtgcgaacattggaaacatggcagcattatttatggcccaaagaatttgttatacactctgatcatgaatctttgaaacacattcgaagtcaagcaaaacttaaccgtaggcatgctaaatgggttgaatttattgaatcttttccatatgtcatcaaacataagaagggaaaagaaaatgtcattgctgatgctttgtctagacgttacgcaatgctatcccaacttgacttcaaaatttttggcttagaaacaataaaagagcaatatgcgcacgatgatgattttaaagatgtgttgttgaattgcaaggagggaaggacttggaacaaattcgttctcaccaatgggtttgtgtttagagctaataagttatgcattccagctagctccgtgcgtatgctattattgcaggaagcgcatggtggagggttgatgggacactttggtgtgaagaagacggaggatatccttgctgatcatttcttttggcctaagatgaggagagacgtggagaggttcgttgctcgctgcacaacatgccaaaaagctaagttacgccttaaccctcatggtttgtatatgcctttgcctgttcctagtgtgccttgggaggatatttctatggactttgttttagggctgcctagaacaaagaaggggagggacagtatctttgttgttgtagatagattttctaagatggcgcatttcataccttgtcataagagtgatgatgctacacatgttgctgatttgttctttcgtgagattgttcgcttgcatggagtgccaaacaccatagtttctgatcgcgatacaaaattccttagtcatttttggagaaccttgtgggctaagttggggactaaacttttattttctactacatgtcatccccaaactgatggacaaactgaggtggtgaatagaacattatctacaatgcttagggctgttttgaaaaagaatattaaaatgtgggaagaatgtttgcctcatgttgagtttgcttataatcgttcacaacattctactactaagaagtgcccttttgagattgtttatggccttctaccccgtgctccaattgatcttttgcccctcccaacttcagagagagtgaactttgatgcaaaatatcacgctgaattgatgttaaaactgcatgagaccactaaggagaacatagagcgcatgaatataaagtataaacttgctgggagcaaaggaaagaaacatgttgcttttgaacctggtgatttggtttggttgcatttgagaaaggataggttccctaatttgagaaaatctaagttgctacctagagctgatggtcctttcaaagtgctacaaaagattaatgacaatacatacaagcttgagctacctgccgattttggggttagccccacgtttaacattgcagatttaaagccatatttgggagaagaagatgagttagagtcgaggacgactcaaatgcaagaaggggaggatgatgaggacatcccttccaacgatacaaccacgcctattgcacagcaaggaccaatgactagagctcgagctcgtgaacttaattatcaggttcaaggttgttcttggcacggcaagaacagcaacaacgtggagtcggtgtaccggttgctaaggcgcagcacccctgtggcagttgtagtcggaccgccaacgtcgtatccttccccaaatcaaagtttatcctcctctcatcgaacgatcaggaacccccgttgctgcatcagtttgtcgagcaggcataatagaagcagtttgtatgtgttctacttcttactctctccattctcgagaacttgcatatcgaactccattatagtctga

SEQ ID NO: 14537 - DNA, 1062 bp, Oryza sativa
  Clone ID: TFbOSC400283j.C1.o30.fg
atggatgctgacaagtgggatgagatgaaggcgcaggcagctgcaacaatacgcttgagtctcttggattctgtcatgtaccaggtcatggatgaaaaaacgccgaaggaaatttgggacaagttggcaagcctgtatatgtccaagtcgctgacgagtaagttgtatctcaaacaacagtcgtatggtttgcaaatgcaagaggagtcagatcttaggaagcacgtggacatcttcaatcagttggttgtggatctaagaaagttagatgtgaaactggatgatgaagacaaggccataattcttctgtgctcgcttccaccgtcttatgaacacttgagaagatcaaagaaaaatgaggcaacggaggcttctcaggctgagagtttgctggtcaaggcaaagcatgattatgaagcgggggtgtcgaagagcaaggagaagggggcacggtgctataagtgtcatgagtttggacatataaggaggatttgcccgttactaaagaagaggaaaggtggcattgcaagtttagcagctcgtggtgatgattcagatagcagcagtcatgagattctcacagtgtctaacgagaagtctggagaagcgtggatgttagactcagctagttcctatcatgtgacatcgaagcgggagtggttctcttcatacaaatctggtgattttggtgttgtttacttgggcgatgacacgagttatcgtgttgttggagtgggcgatgtcaagttcaagatgtatgatggaaacgaggtgctactttcggatgtgagacacatgccgggactaaggaagagtttgatttcgcttgggagcctacatgagacgggttggttgtatcaggtggattctgataggaagaccatgaatatcatgaaggacggcaagactgttatgacttgtgagatgacgagctcatgtttgtacaagttacaagggagtgttgttgcaggtggagtcatggaagatgggtatgttggtgttgcggtacacgatcctgaaggcggcgagcctggcgtaggctcgtcgggcggctcggcatga

SEQ ID NO: 14538 - DNA, 5100 bp, Oryza sativa
  Clone ID: TFbOSC400488j.C1.o2.fg
atgtcatggcacagggccggtgtcctgctgctaggggctcagtcttgcctacctgtcccgggggttccggccgtaggtgggattgggtcggtactcttgtctatggctaggatgggttggagactatgtcacgtcttctgtccgtataccgtggtgatggccggcagcatcaaccgtggtggtctggacctgactggcttcgttttggagctgcggggcatgtgcgttgtcctggggtatccgcatggagtggactaccagggcaagcagctctcggagcaggagggtgacgatgcagagccccacgctgcttgggaggttactgcagtgatcctcactggctcacccgagaggacttcgttggcagtcaccgcgggtggagattccttctccgccgcttgccagaacgccgcactcctcaccatcggtactcttcaccagcgctacccggacgagttgcagcactcgccctaccgttaccaccctcgtcgcggaggagcccgcgactacgccaccttccgggatgctagctcggaggatgacgctaccatcatgcatctagcgcgcatggtggaggcgtacgacgcggctcgtatcgacttccatcagatggtgcgtcgcgggttggtcgagaacaacatgaagatcctggagctgcgtcaggagaatctgcagctgaagaaggacctagacgcagtggaggcgcagctgcgtcagctcaagatcgcccagggagaggtctgtcgccccaagcgtcgccgcgtctgccgcagccagaagatcaccgctcacaagagtacctccaggcccgagcttgttcgtcagtccctggcgtggacctgtttcgtcgagacccctcgtgccgagcccgcgcccgtggttcctcaggaggatggagcctccggcgttggcagcactgatgctcaccttccgtcctggcctatcgcagctgtagacaagcagttagtaggcttgcgcatggtgacgaccaggaaaaatgctgctaccggtgatggcagtcaccccgaaggcagcaaccacaaccaccagggcaacccaccttcacctcctccaccgcctccaccaccaccaccagacaccaacgccattctcacccaaatcctcgcccagcaggccaacatgatggctgctttcctccaccacatccaaaatccgccacaacataatgctccaccaccacccccacaacactctaaactcgccgagttcctccgcatccgtccacctaccttctctagctccaataaccccgtggatgcgttggattggttgcatgccgtggggaaaaagttagacaccgtgcagtgcagcgatgaggagaaagtcatcttcgccgcccaccaactgcaggggcccgcatctctatggtgggaccatttcaaggctacgcagccagaggggcaacctattacttgggcccgcttcaccgccgctttccgaagaacccatgtgcccgccggagtcatggcccttaagaaaagggaattccgagagttgaagcaaagcaaccgctccgtgatggagtatttgcatgagtttaacaacctggcccggtacgccccggaggatgttcgtgaagatgaggagaagcaagagaagttcttggcaggaatggaccctgagctgtccgtccgtctagtctccggggactatccggatttccaacgtctggtggacaagagcatccgcttggaagccaagcacaaggaactagagtcgcacaagcgtcgcttggcgagtttccgcaaccaacagggggctaaccaaagggtccgctacaccaatccctatccagggggatcctcctcacagcagcagcaacagcagcagcaacctcgctccgcgccccgacctcaattcgtggtgcgcgtcccacagccgcaacaacagcagagtcagcaagggacccgtgcgccccgtcctcctacgccagccgtgcagcctggtcaaggccgcagggacgttcaaggtccgcagtgtctgtgcttcaactgcttcgagcctgggcactttgcggataaatgcccaaagccgaggcgccagcaaggccaagcgcctccccgctccaacaacggtggtaaggatgtcattcggggtcgtgtgaaccacgtgacggccgaggacgtgctgacaactccagacgtcatcgttggtacgttcctcattcattccatccctgctaccattttgttcgactctggagcttcccactcgtttatatctatgccattcgtggggagaaatcaattgggggtagaaaggcttaggaaccctctgctcatcaccacccctggaggggttatgacagcaaagtattatagccctgccgtccctatagaaattcagggaattccttttccctcggatctgattctgctagacaccaagaacttggatgtgattcttggaatgaattggttggctcaattccaaggagtagtggattgcgcgagacgcactgtcactctgtaccgagggccagaacaaccggttgttttctttgcacccccaacctctgtcagaagttcagaacttcatcagataggattgtcagaaattcccatcgtcagggagttcggagatgtgtttccggaagaactacctggtatgccgcccaagcgagagattgagttccgaatagatcttgctccaggaaccactcctctgtacaagcgaccctaccgtatggcagcaaatgaactggccgaagtaaagaaacagctggaagagttgaaagaaaaggggtacatacgtccgagtacttccccatggggtgctcctgtgatttttgtagagaagaaagacaagacgaagaggatgtgcgtcgactacagagctctcaatgaagtcaccataaaaaacaagtaccctcttccccggatcgatgatctgttcgatcagctcaaaggtgccactgtattctccaagattgatctccgttccggatatcaccaattacgcatccgtgaagaagatattccgaagaccgcattcaccacgcgatacggactgtatgaattcacggaagaccatcagcaccatctccgtctggtgttggggaagttgcgggaacatcaattgtatgccaaacttagcaagtgtgagttctggttgtccgaagtcaaaatcttagggcacgtgatatctgctaaaggagttgctgtggaccccgaaacagtgactgccgtcaccgattggaagcaacccaagacagtcactcaaattcgcagtttcttaggtttggcaggatactactggaggttcatcgagaacttctccaaaatcgctcgacccatgacacagttgttgaagaaagaagagaaatttgatggtcatgtggtagcctatgcctcccgtcagcttcgaccgcatgaaggcaactaccctacccatgacttggaattagccgcagtggttcatgctctaaaaatctggcggcactatctcattgggaatcgctgtgaaatatataccgaccataagagtttgaaatacatcttcacccagtcggatctgaatcttcggcaaaggagatggttagaactcatcaaagactatgatgtgggaattcactatcatcctggtaaggccaacgtggttgccgacgctctaagtcgaaagagccattgcaacactcttaacgtccgtggcattccacccgaacttagtcaacagatggaagccttgaacctaagcatagttggtcgtggattcttggctgcgttggaagccaagcctaccttgctcgatcaaatccgcgaggctcagaagaatgatccggacatgcatggactcctcaagaatatgaaacaggataaagctgctggtttcacagaggatgaacacggaaccctatggaacggaaagcgggtatgcgttccagataacagagaacttaaacagctgatacttcagcgtgtcaaggcagagcaccaacgaccggccggacttctccaacctctccaagtaccagaatggaaatgggatgaaattgggatggacttcatcaccggacttccaaaaacccaaggtggatatgattctatatgggtagttgtggatcgattaaccaaggtagctcgatttattcctgtgaagaccacctatggagggaacaaactagccgagctctacttcgctaggatcgtgagtctccatggcgttcccaagaaaattgtatctgataggggaagccaattcacctctcacttttggaagaagctccaagaagagctgggtacccgattaaatttcagcaccacgtatcacctgcagacagatggacagaccgagagtctaaatcagatcctaaaagatatgcttcgcgcatgtgtcctagatttcgggaagacctgggataagagtctcccctatgccgagttctcctacaataacagctaccaagccagcatacaaatggcaccttatgaagcgttgtatgggcgcaaatgccggacaccgctattgtgggaccaagttggggaaagccaagtgttcgggactgatatcctgagagaagctgaagctaaagtcagaatcattcgggataatctaaaggtggcacagtcccggcagaaaagttatgcagataaccaacgccgtaatcaggaattcgcagtggacgattttgtgtaccttcgggtcatgccattgcggggtgtacacaggtttcagacgaaagggaagctcgcacctcggttcgtgggtcctttccgtatcattgctcggcgcggagaagtcgcttaccagttggagctggccgcctccttgggcaacgtgcatgatgtgttccatgtgtcgcaactcaagaaatgccttcgagtgccgtccgagcaggccgactcagagcagattgaagttcgcgaagacttgacctacgtggagaggccagtgaaaatcctggacaccatggagcgcaggaccaggaaccggataatccgtttttgcaaggtccaatggagcaaccacgccgaggaagaagctacttgggagcgtgaagacgagctgaaggcagcccatcccaatctcttcgccagttcttccgaatctcggggtcgagattccgtttatggggggtag

SEQ ID NO: 14539 - DNA, 3513 bp, Oryza sativa
  Clone ID: TFbOSC400798j.C1.o4.fg
atgactagagctcgagctcgtgaacttaattatcaggacattctagcctacaaagaatataattcaattaatcgtttgtttcatcttgcttgtaaagctgaaagggaagtacagggacgaagagctagcttcaggactaacatttctgcaggttgtgctagctcttggacatcttccaacgctgctgcaccgtcaactcgagcagcagcaccatcgtcctcaagcaacaagctgcgtccctctacaacaaactctacaccacgcccgagtgaaccaacaagaggggttgctgctacaccttccaagagctcatcatcagtagcttcatcaggaaggacaagagatattcagtgcctacgctgcaagggctatggtcacgtgcgcaaggactgcccaagcactcgtgtaatgatcgtgagagctgatggtgggtactcctccgctagtgatttagatgaagaaacctatgctttgcttgcaactaacaatgcaggggaaggtgacgcgccccaccaagatgaggaacacattagggctgaagctgcagagcactatgagagcctcgtggtgcagcgagtgctaagcgcacaaatggaaagggctgaacagaatcagcgccacaccttgtttcaaaccaagtgtgtgatcaaggaacgctcttgccgcgtgatcatagatggaggaagctgcaataatttggctagtgctgaaatggtggagaaacttgcattgagcacacagccacatccgcagccctactatattcaatggcttaatagcagcggcaaggagcatactaggagtgagcatcttattgcggctaatgaacttgagaagcataagaagaaacccaccaactctgttcaaaataataaaaatgagattaagctgaagggatcttgtttcattgcaacaaaatcagatttggatgaagttgacactgacactgttgtttgctatgctttggtttgcaaagaaaccttatttccaattgaggatactcctatttctttgcctcctccggtcactaaccttttgcaggagtatgctgatattttcccaaaggaggttccaccggggctgccaccaattcgagggattgagcaccaaattgacctcattcctggggcctctctgccaaaccgtgcgccatacaggaccaacccggaggaaacaaaggagattcagcgtcaaatgcaagagttactcgacaaggggtatgtacgtgagtctcttagtccttgttctgtccccgtgcttttagttcctaagaaatatggctcatggcgcatgtgtgtggattgtagagcaattaacaacatcacaatcagatatcgtcatcctatccctaggctagatgatatgcttgatgaattgagtggttcacttgtgttctctaaaattgatttgcgtagtggttaccaccagattcgcatgaagttaggagatgaatggaaaacagcttttaaaactaaattcggcctatatgagtggttagtcatgccctttggtctcactaatgcacccagtactttcatgagattaatgaatgaagttttacgtgctttcattggcagatttgtggtggtatattttgatgacattctcatatatagcagatcaatagaggatcatcatggtcatttgcgtgctgtttttgatgctctacgagatgcacgtttatttggtaaccttgagaagtgcacattttgcacagatcgagtctcttttcttggctatgttgtgactccgcagggaattgaagtagatcaagccaaggttgaagccatacatagctggccggttccaacaacgatcacacaagtgagaagctttctaggacttgctgggttctaccgctgctttgtgaaggattttagcaccattgcagccccattacatgagcttaccaagagaaatgtcacattcacttgggctgcaacacaaaggaatgcattcgacactttgaaagataagttaacacacgctcctttactccaacttcctgatttcaacaaaactttagagcttgaatgtgatgctagtgggattggattgggtggtgtgttgttacaagaaggcaaacctgtagcatatttcagcgagaaattgagtgggcctagtttgaattattctacttatgataaggaattgtttgctctagtgcgaacattggaaacatggcagcattatttatggcccaaagaatttgtaatacactctgatcatgaatctttgaaacacattcgaagtcaagcaaaacttaaccgtaggcatgctaaatgggttgaatttattgaatcttttccatatgtcatcaaacataagaagggaaaagaaaatgtcattgctgatgctttgtctagacgttacgcaatgctatcccaacttgacttcaaaatttttggcttagaaacaataaaagagcaatatgcgcacgatgatgattttaaagatgtgttgttgaattgcaaggagggaaggacttggaacaaattcgttctcaccaatgggtttgtgtttagagctaataagttatgcattccagctagctccgtgcgtatgctattattgcaggaagcgcatggtggagggctgatgggacactttggtgtgaagaagacggaggatatccttgctgatcatttcttttggcctaagatgaggagagacgtggagagggctgttttgaaaaagaatattaaaatgtgggaagaatgtttgcctcatgttgagtttgcttataatcgttcacaacattctactactaagaagtgcccttttgagattgtttatggccttctaccccgtgctccaattgatcttttgcccctcccaacttcagagagagtgaactttgatgcaaaatatcgtgctgaattgatgttaaaactgcatgagaccactaaggagaacatagagcgcatgaatattaagtataaacttgctgggagcaaaggaaagaaacatgttgcttttgaacctggtgatttggtttggttgcatttgagaaaggataggttccctaatttgagaaaatctaagttgctacctagagctgatggtcctttcaaagtgctacaaaagattaatgacaatgcatacaagctggagctacctgccgattttggggttagccccacgtttaacattgcagatttaaagccatatttgggagaagaagatgagttagagtcgaggacgactcaaatgcaagaaggggaggatgatgaggacatcccttccaacgatacaaccacgcctattgcacagcaaggaccaatgactagagctcgagctcgtgaacttaattatcaggttcaaggttgttcttggcacggcaagaacagcaacaacgtggagtcggtgtaccggttgctaaggcgcagcacccctgtggtagttgtagtcggaccgccaacgtcgtatccttccccaaatcgtagtttatcctcctctcatcgaaagatcgggaacccccgttgctgcatcaccgcgcgaatcacgaagtga

SEQ ID NO: 14540 - DNA, 3840 bp, Oryza sativa
  Clone ID: TFbOSC401314j.C1.o4.fg
atgacaggaggatcgggggagcaccctcaacattcaccacgtacgaggggcatcatacaacattttgagcgccaagtgagggagcatgcagaaggccttgatgaggatgttagggtcgccaatgatcgccttggtcaattggaggctgctcaaattgacaccaactccaagctttcctcattggagaggtcccttgtggctgtgaacacttctcttgcaggtatcttgaatacgttggagagaatgggccaagatggtcatgatggatcggctaggcacaaccacaatggccatgatactaatagcagcatcgcagcaagggaagaactggagtacgctgctgacaccgagcatgatgaggagttacttggtcgtccacaaagacaacagcgccggcagcgccatggcatgggcgctccaccacggcgggaggtacgtgataatgatgattctttaggcaagatcaagtttaccattccttgctttgatggaaaatatgaccctgatgcatatcttacttgggagttagccattgatcagaaatttgcttgccatgattttcctgagaataaacgtgttagggctgctactagtgagtttactgattttgcatccatttggtggagtgaatttgttcgttccaatccaaataacactccccaaacctgggatgcaatgaaaagagtcatgcgagctagatttgttccttcatatcatgcacgtgatttgctgcacaaattgcagcaacttagacagggaaacaaatctgtagaggagtattatcaagctttgcaaacaggaatgcttcgttgtggattggtagaaaatgatgatgctggtcgtgctagctcttggacaccttccaacactgctgcaccgtcaactcgagcagcagcaccatcgtcctcaagcaacaagctgcgtccctctacaacaaactctacaccatgcccgagtgaaccaacaagaggggttgctgctacaccttccaagagctcatcatcagtagcatcattaggaaggacaagagatattcagtgcctacgctgcaagggctatggtcacgtgcgcaaggactgcccaagcactcgtgtaatgatcgtgagagctgatggtgggtactcctccgctagtgatttagatgaagaaacctatgctttgcttgcaactaacaatacaggggaaggtgacgcgccccaccaagatgaggaacacattggggctgaagctgcagagcactatgagagcctcgtggtgcagcgagtgctaagcgcacaaatggaaagggctgaacagaatcagcgccacaccttgtttcaaaccaagtgtgtgatcaaggaacgctcttgccgcgtgatcatatatggaggaagctgcaataatttggctagtgctgaaatggtggagaaacttgcattgagcacacagccacatccgcagccctactatattcaatggcttaatagcagcggcaaggagtatgctgatattttctcaaaggaggttccaccggggctgccaccaattcgagggattgagcaccaaattgacctcattcctggggcctctctgccaaaccgtgcgccatacaggaccaacccggaggaaacaaaggagattcagcgtcaagtgcaagagttactcgacaaggggtatgtgcgtgagtctcttagtccttgtgctgtccccgtgcttttagttcctaagaaagatggctcatggcgcatgtgtgtggattgtagagcaattaacaacatcacaatcagatatcgtcatcctatacctaggctagatgatatgcttgatgaattgagtggttcacttgtgttctccaaaattgatttgcgtagtggttaccaccagattcgcatgaagttaggagatgaatggaaaacagcttttaaaactaaattcagcctatatgagtggttagtcatgccctttggtctcactaatgcacccagtactttcatgagattaatgaatgaagttttacgtgcttttattggcagatttgtggtggtatattttgatggcattctcatatatagcagatcaatagaggatcatcatggtcatttgcgtgctgtttttgatgctctacgagatgcacgtttatttggtaaccttgagaagtgcacattttgcacagatcgagtctcttttcttggctatgttgtgactccgcagggaattgaagtagatcaggccaaggttgaagccatacatagctggccggttccaacaacgatcacacaagtgagaagctttctaggacttgctgggttctaccgccgctttgtgaaggattttagcaccattgcagccccactacatgagcttaccaagagaaatgtcacattcacttgggctgcagcacaaaggaatgcattcgacactttgaaagataagttaacacacgctcctttactccaacttcctgatttcaacaaaacttttgagcttgaatgtgatgctagtggaattggattgggtggtgtgttgttacaagaagacaaacctgtagcatatttcagcgagaaattgagtgggcctagtttgaattattctacttatgataaggaattgtttgctctagtgcgaacattggaaacatggcagcattatttatggcccaaagaatttgttatacactctgatcatgaatctttgaaacacattcgaagtcaagcaaaacttaaccgtaggcatgctaaatgggttgaatttattgaatcttttccatatgtcatcaaacataagaagggaaaagaaaatgtcattgctaatgctttgtctagacgttacacaatgctatcccaacttgacttcaaaatttttggcttagaaacaataaaagagcaatatgcgcacgatgatgattttaaagatgtgttgttgaattgcaaggagggaaggacttggaacaaattcgttctcaccaatgggtttgtgtttagagctaataagttatgcattccagctagctccgtgcgtatgctattattgcaggaagcgcatggtggagggctgatgggacactttggtgtgaagaagacggaggatatccttgctaatcatttcttttggcccaagatgaggagagacgtggagagggctgttttgaaaaagaatattaaaatgtgggaagaatgtttgcctcatgttgagttttcttataaccgttcacaacattctactactaagaagtgcccttttgagattgtttatggccttctaccccgtgctccaattgatcttttgcccctcccaacttcagaaagagtgaactttgatgcaaaacatcgcgctgaattgatgttaaaactgcatgagaccactaaggagaacatagagcgcatgaatattaagtataaacttgctgggagcaaaggaaagaaacatgttgcttttgaacctggtaatttggtttggttgcatttgagaaaagataggttccctaatttgagaaaatctaagttgctacctagagctgatggtcctttcaaagtgctacaaaagattaatgacaatgcatacaagcttgagctacctgccgattttggggttagccccacgtttaacattgcagatttaaagccatatttgggagaagaagatgagttagagtcgaggacgactcaaatgcaagaaggggaggatgatgaggacatcccttccaacgatacaaccacgcctattgcacagcaaggaccaatgactaaagctcgagctcgtgaacttaattatcaggttcaaggttgttcttggcacggcaagaacagcaacaacgtggagtcggtgtaccggttgctaaggcgcagcacccctgtgaggtag

SEQ ID NO: 14541 - DNA, 2346 bp, Oryza sativa
  Clone ID: TFbOSC401783j.C1.o2.gm
atggcgttggagatgcccggcaacacaacaaacacgatgacgacccgagaacgactagatctggccataaaaaccccaaataaacaggcacccaagggggctgagggcttgacggccaacgccctacccctcccagatttgtcagccgacgccctccccctcccagctccggtggcagcgggcttgggagaggccggtcatgggtgggagcggcatggcgggcgacagtggcggggggttgagggcaacgacggctgtggacggatccggtggtggggagggtactcggtagtggctggggaactccggatccaccgtgtgggctctggcgactccaacaacaacgatgggagggggagggtctggtggcagtgtgatgaggacatcccttccaacgatacaaccacgcctattgcacagcaaggaccaatgactagagctcgagctcgtgaacttaattatcaggttcaaggttgttcttggcacggcaagaacagcaataacgtggagtcggtgtaccggttgctaaggcgcagcacccctgtgcccaaaagaaaaaccactaaaataggaggatcgggggagcaccctcaacattcaccacgtacgaggggcatcatacaacattttgagcgccaagtgagggagcatgctgaaggccttgatgaggatgttagggtcgccaatgatcgccttggtcaattggaggctgctcaaattgacaccaactccaagctttcctcattggagaggtcccttgtggctcaagggaagaactggagtacgctgctgacactgagcatgatgaggaggtacttggtcgtccacaaagacaactgcgccggcagcgccatggcatgggcgctccaccacggcgggagcagcaccatcgtcctcaagcaacaagctgcgtccctctacaacaaactctacaccatgcccgagacaagagatattcagtgcctacgctgcaagggctatggtcacgtgcgcaaggactgcccaagcactcgtgtaatgattgtgagagctgatggtgggtactcctccgctagtgatttagatgaagaaacctatgctttgcttgcaactaacaatgcaggggaaggtgacgcgccccaccaagatgaggaacacattggggctgaagctgcagagcactatgagagcctcgtggtgcagcgagtgctaagcgcacaaatggaaagggctgaacagaatcagcgccacaccttgtttcaaaccaagtgtgtgatcaaggaacgctcttgccgcgtgatcatagatggaggaagctgcaataatttggctagtgctgaaatggtggaaaaacttgcattgagcacacagccacatccacagccctactatattcaatggcttaatagcagcggcaaggagtatgctgatattttcccaaaggaggttccaccggggctgccaccaattcgagggattgagcaccaaattgacctcattcctggggcctctctgccaaaccgtgcgccatacaggaccaacccggaggaaacaaaggagattcagcgtcaagtgcaagagttactcgacaaggggtatgaagcgcatggtggagggctgatgggacactttggtgtgaagaagacggaggatatccttgctgatcatttcttttggcagagagtgaactttgatgcaaaatatcgcgctgaattgatgttaaaactgcatgagaccactaaggagaacatagagcacatgaatattaagtataaacttgctgggagcaaaggaaagaaacatgttgcttttgaacctggtgatttggtttggttgcatttgagaaaggataggttccctaatttgagaaaatctaagttgctacctagagctgatggtcctttcaaagtgctacaaaagattaatgacaatgcatacaagcttgagctacctgccgattttggggttcaaggttgttcttggcacggcaagaacagcaacaacgtggagtcggtgtaccggttgctaaggcgcagcacccctgtgtcagacaacttaagggaccgcatcaccgcggcgagcaccgcgaacaccaggcaactgatcatcgtcttctccgcgtccgacgtctgggacgcgcaccaccaccagtgtcaatattcattctcgcaggaacatgaattaatgccgccggcgtcgacgccgaggcaatgctgctcaaggctgccgacggccgacctcatctctggacatattgtccacgctgacctcttaactccaagcatcacaatcggtcatgctgttcttccacgccgcgcaggaagcatgcggatgacgtggacggaccaaaaagttagagatggatga

SEQ ID NO: 14542 - DNA, 1171 bp, Oryza sativa
  Clone ID: TFbOSC422885j.C1.o2.np
agcactcgaacagcacccctgaacccaaccttcttatggttatggggcaacgcgaccagcggcaatcaagcagtcagactggcggcggcgagcagtgacaagtagagaggcggtggtcttatcggccagacaacacctgtcagaccagcggcataggagcggtcagatcggtgcgcacatggtggtcagaccgcgttgcactgacttcatcaacaagggtaacttctatgtccgctaaaatttatgacctggccacatgttttttatggagtcaattttccttattggtgcgaaaagaaatcttatattatgtctgagagttatgatatttggcaaaaagttgcaaatccttataaaattcctgcttagattaatactgttgttcttaagactgattttaaaaacaattgcaaagctcgcaatattttgcttaatggaattccttgttcggattttgatcgtgtttctcatctgcaaaccgcgcatgagatttggaagccattatctgattttcaccaagggacttctaatatcaatgaagtgcgcaaagatctttttaaaaggattacgtaaaatttgagatgcaacctgaagagactttggatgattatcttgcacgctttaacaaagttttgagtaatcttagatctgttgattcctcttatgatacttattacacacaatctgagatttctcgacactttttgaatggtcttgatatgtcgatctgggagatgaaagtgacttcaatttaggaatctgttaacatgtccgctttgactttggattctctttacaccaagcttaaaactcatgaggtgaatattctttcccgcaagattgatccttaaattagtgccttgatctcttctgaggacttggtttaggttactaacaaactttctcagggttttgaaaaagtcaagaataggaagcgaggaggatctgttcaatgctttcagtgtggcaagttaaatcacatcaagttcaattgtcctaaccgtcaagaagacaagtcttggaggagaaagtgaacaagtatgacaagtagtaggtgtgcaagtagtttcgcaagcaaaggttaattcaagtattgatagaagcttttgatagtgtagtatcagtggttgtagttgtgtgtcatatagtaggtaaaacaggggttgtaaaa

SEQ ID NO: 14543 - DNA, 4179 bp, Oryza sativa
  Clone ID: TFbOSC900141j.C1.o1.fg
atgacaggaggatcgggggagcaccctcaacattcaccacgtacgaggggcatcatacaacattttgagcgccaagtgagggagcatgctgaaggccttgatgaggatgttagggtcgccaatgatcgccttggtcaattggaggctgctcaaattgacaccaactccaagctttcctcattggagaggtcccttgtggctgtgaacacttctcttgcaggtatcttgaatacgttggagagaatgggccaagatggtcatgatggatcggctaggcgcaaccacaatggccatgatgctaatagcagcatcgcagcaagggaagaactggagtacgctgctgacactgagcatgatgaggaggtacttggtcgtccacaaagacaacagcgccggcagcgccatggcatgggcgctccaccacggcgggaggtacgtgataatgatgattctttaggcaagatcaagtttaccattccttgctttgatggaaaatatgaccctgatgcatatcttacttgggagttagccattgatcagaaatttgcttgccatgattttcctgagaataaacgtgttagggctgctactagtgagttcactgattttgcatccatttggtggagtgaatttgttcgttccaatccaaataacactccccaaacctgggatgcaatgaaaagagtcatgcgagctagatttgttccttcatatcatgcacgtgatttgctgcacaaattgcaacaacttagacagggaaacaaatctgtagaggagtattatcaagctttgcaaataggaatgcttcgttgtggattggtagaaaatgatgatgctggtatggctagattcatgggtgagctgaaccgagaaattcaggacattctagcctacaaagaatataattcaattaatcgtttgtttcatcttgcttgtaaagctgaaagggaagtacagggacgaagagctagcttcaggactaacatttctgcagcagcaccatcgtcctcaagcaacaagctgcgtccctctacaacaaactctacaccatgcccgagtgaaccaacaagaggggttgctgctacaccttccaagagctcatcatcagtagcttcattaggaaggacaagagatattcagtgcctacgctgcaagggctatggtcacgtgcgcaaggactgcccaagcactcgtgtaatgatcgtgagagctgatggtgggtactcctccgctagtgatttagatgaagaaacctacgctttgcttgcaactaacaatgcaggggaaggtgacgcgccccaccaagatgaggaacacattaaagctgaagctgcagagcactatgagagcctcgtggtgcagcgagtgctaagcgcacaaatggaaagggctgaacagaatcagcgccacaccttgtttcaaaccaagtgtgtgatcaaggaacgctcttgccgcgtgatcatagatggaggaagctgcaataatttggctagtgctgaaatggtggagaaacttgcattgagcacacagccacatccgcagccctactatattcaatggcttaatagcagcggcaaggagcatactaggagtgagcatcttattgcggctaatgaacttgagaagcataagaagaaacccaccaactctgttcaaaataataaaaatgagattaagctgaagggatcttgtttcattgcaacaaaatcagatttggatgaagttgacactgacactgttgtttgctatgctttggtttgcaaagaaaccttatttccaattgaggatactcctatttctttgcctcctccggtcactaaccttttgcaggagtatgctgatattttcccaaaggaggttccaccggggctgccaccaattcgagggattgagcaccaaattgacctcattcctggggcctctctgccaaaccgtgcgccatacaggaccaacccggaggaaacaaaggagattcagcgtcaagtgcaagagttactcgacaaggggtatgtacgtgagtctcttagtccttgttctgtccccgtgcttttagttcctaagaaagatggctcatggcgcatgtgtgtggattgtagagcaattaacaacatcacaatcagatatcgtcatcctatccctaggctagatgatatgcttgatgaattgagtggttcacttgtgttctctaaaattgatttgtgtagtggttaccaccagattcgcatgaagttaggagatgaatggaaaacagcttttaaaactaaattcggcctatatgagtggttagtcatgccctttggtctcactaatgcacccagtactttcatgagattaatgaatgaagttttacgtgctttcattggaagatttgtggtggtatattttgatgacattctcatatatagcagatcaatagaggatcatcatggtcatttgcgtgctgtttttgatgctctacgagatgcacgtttatttggtaaccttgagaagtgcacattttgcacagatcgagtctcttttcttggctatgttgtgactccgcagggaattgaagtagatcaagccaaggttgaagccatacatagctggccggttccaacaacgatcacacaagtgagaagctttctaggacttgctgggttctaccgcctctttgtgaaggattttagcaccattgcagccccattacatgagcttaccaagagaaatgtcacattcacttgggctgcagcacaaaggaatgcattcgacactttgaaagataagttaacacacgctcctttactccaacttcctgatttcaacaaaacttttgagcttgaatgtgatgctagtgggattggattgggtggtgtgttgttacaagaaggcaaacctgtagcatatttcagcgagaaattgagtggacctagtttgaattattctacttatgataagcaattgtttgctctagtgcgaacattggaaacatggcagcattatttatggcccaaagaatttgttatacactctgatcatgaatctttgaaacacattcgaagtcaagcaaaacttaaccgtaggcatgctaaatgggttgaatttattgaatcttttccatatgtcatcaaacataagaagggaaaagaaaatgtcattgttgatgctttgtctagacgttacgcaatgctatcccaacttgacttcaaaatttttggcttagaaacaataaaagagcaatatgcgcacgatgatgattttaaagatgaagcgcatggtggagggctgatgggacactttggtgtgaagaagacggaggatatccttgctgatcatttgttttggcctaagatgaggagagacgtggagaggttcgttgctcgctgcacaacatgccaaaaagctaagtcacgccttaaccctcatggtttgtatatgcctttgcctgttcctagtgtgccttgggaggatatttctatggactttgttttagggctgcctagaacaaagaaggggagggacagtatctttgttgttgtagatagattttctaagatggcgcatttcataccttgtcataagagtgatgatgctacacatgttgctgatttgttctttcgtgagattgttcgcttgcatggagtgccaaacaccatagtttctgatcgcgatacaaaattccttagtcatttttggagaaccttgtgggctaagttggggactaaacttttattttctactacatgtcacccccaaactgatggacaaactgaggtggtgaatagaacagtatctacaatgcttagggctgttttgaaaaagaatattaaaatgtgggaagaatgtttgcctcatgttgagtttgcttataatcgttcacaacattctactactaagaagtgcccttttgagattgtttatggccttctaccccgtgctccaattgatcttttgcccctcccaactttagagagagtgaactttgatgcaaaatatcgcgctgaattgatgttaaaactgcatgagaccactaaggagaacatagagcgcatgaatattaagtataaacttgctgggagcaaaggaaagaaacatgttgcttttgaacctggtgatttggtttggttgcatttgagaaaggataggttccctaatttgagaaaatctaagttgccacctagagctgatggtcctttccaa

SEQ ID NO: 14544 - DNA, 4443 bp, Oryza sativa
  Clone ID: TFbOSC900215j.C1.o10.np
atggcggccggacctcccgcgccggtttcctcccttccccggccaccctctctcgaccgggctctatttaaaccctccccgcacctcctccgtccgtttctgcctctcgccgcccttcctcctcgccggaatcgagctcgcgccgtcgctctctctctccgccgtcaccgtcaagctccggtccgccgccgtcgtcgccccggaccacctcccacctcggcgccgcctccttcggattcgccgcatcctcgccgacctcgtccacccctccgtttcgctcgccgaccgccggaacgccgtcgaccccatcgacccgagccgcgccgccgccttcctccgctccggccgcctttttcgtcgtcgccgtcgacctagggtgagccgtggaccgctgcttcttttcccacttcccttcccctctctcggccgccgctccgccgtgcctatggccgctgccggcgaccatagaggcgcgggcgtcgcctcccgccggctgcgccggctgggccgccctcgggcgcgccgggtggctgccgcgtggggcccggccgtcagccgcccgcgcccttaggtgcggctgacgcgtgccggtgtgagcccgggtgcacccggtccaccgtggacccacctcggccatataaggaccggtcttcgggcctctgttgcaaagcactaccgtacttccacatgtctagtggggcaaatgaaggctacacgagctgcggcctggtagtcgagatgtcatggcacagggccggtgtcctgctgctaggggcttagtcctgcctacctgtcccggaggtttcggccgtaggtggggttgggtcaatgtacacctctgatcagagtataatctattcgaatagccgcgccctcggttatgggcaagccgagcaatgtacccaaatggccggcagcatcaaccgtcgtggtctggacctgactggcttcgttttggagctgcggggcatgtgcgttgtcctggggtatccgcatggagtggactaccagggcaagcggctcccggagcaggagggtgacgatgcagagccccacgctgcttgggagattactgcagtgatcctcactggctcacccgagaggacttcgttggtagtcaccgtgggtggagattccttctctgccgcttgccagaacgccgcactcctcgccatcggcactctccaccagtgctacccgaacgagttgcagcactcgccctaccgctaccacccttgccgcggaggagcccgcgactacgccaccttccgggatgctagctcggaggatgacgctaccatcatgcacctggcgcgcatggtggaggcgtacgacgcggcccatatcgacttccatcagatggtgcgtcgtgggttggtcgagaacaacatgaagatcctggagctgcgtcaggagaatctgcagctgaagaaggacctagacgcagtggacgcgcagctgcgtcagctcaagatcgcccagggagaggtctgtcgccccaagcgtcgccgcgtctgccgcagcctgaagatcaccgcccgcaagagtacctccaggcccgagcttgttcgtcagtccctggcgtggacctgcttcgtcgagacccctcgtgctgagcccgcgcccgtggttcctcaggaggatggagcctccggcgttggcagcacggaggatgtgctgctgctcaccttccatggtgacaaccaggagaagtgctgctaccggtgaaggcagtcaccccgaaggcagcaaccacaacaaccatggcagcccacctccacctcctcccccgcctccaccaccaccaccagacaccaactccatcctcacccaaatcctcgcctagcaggccaacatgatggctgctttcctccaccacatccaaaatccgccacaacataatgctccaccaccacccccacaacactctaaactcgccgagttcctccgcatccgtccacctaccttctctagctccaataaccccgtggacgcgttggattggttgcatgccgtggggaaaaagttagacaccgtgcagtgtagcgatgaggagtaagtcatcttcgccgcccaccaactgcaggggcccgcatctctatggtgggaccatttccaggctatgcagccagaggggcagcctattacttgggcccgcttcaccgccgctttccggagaacccatgtgcccgccggagtcatggcccttaagaaaagggaattccgagagttgaagcaaggcaaccgctccgtgatggagtatttgcatgagtttaacaacctggcccggtacgccctggaggatgttcgtgaagatgaggagaagcaagagaagttcttggcaggaatggaccctgagctgtccgtgcgtctggtctccggggactatctggatttccaacgtctggtggacaagagcatccgcttggaagccaagcacaaggaactggagtcgcacaagcgtcgcttggcgaatttccgcaaccaacagggggctaaccaaaaggtccgctacaccgctacaccaatccctatccagggagatcctcctcgcagcagcaacagcagcagcaacctcgctccgcgccccgacctcaattcgtggtgcgcgtcccacagccgcagcaacagcagagtcagcaagggactcgtgcgccccgtcctcctacgccagccgtgcagcctggtcaaggccgcagggacgttcaaggtcagcagtgtctgtgcttcaactgcttcgagcctgggcactttgcggataaatgcccaaagccgaggtgccagcaaggccaagcgcctccccgctccaaccacggtggtaaggatgtcatacggggtcgtgtgaaccacgtgatggccgaggacgtgctgacaactccagacgtcatcgttggtacgttcctcattcattccatccctgctaccattttgttcgactctggagcttcccacttgtttatatttgtgccattcgtggggagaaatcagttgggggtagaaaggcttaggaaccctctgctcatcaccacccctggaggggttatgacagcaaagtattatagccctgccgttcctatagaaattcagggaattcctttttcctcggatctgattcttctagacaccaagaacttggatgtgatccttgggatgaattggttggctcaattccaaggagtagtggattgtgcaagacgcactgtcactctgtaccgagggccggaacaaccggttgttttctttgcacccccaacctctgtcggtagttcagaacttcatcagataagactgtcggaaatccccatcatcagagagttcggagacgtgtttccggaagaactacccggtatgccgcccaagcgagagattgagttccggatagatcttgctctaggaaccactcctctgtacaagcgaccctaccgtatggcagcaaatgaactggccgaagtcaagaaacagttggaagagttgaaagaaaaggggtatatacggccgagtacttccccctggggtgctcctgtgatttttgtggagaagaaagacaagacgaagaggatgtgcgttgattacagagctctcaatgaagttactatcaaaaacaagtaccctcttccccggatcgatgatctgttcgatcagcttaaaggtgccacggtattctccaagattgatcttcgttccggatatcaccagttgcgcatccgtgaagaagatatcccgaagaccgcattcacctcgcgatacggactatatgaattcacggtgatgtcgttcggtttaaccaatgctcctgccttcttcatgaacttaatgaacaaagtgttcatggaatacttggatatgtttgttgtggttttcattgacgacattctggtgtactcacaatcagaggaagaccatcagcaccatctccgtctggtgttgggaaagttgcgggaacatcaattgtatgccaaacttagcaagtgtgagttctggttgtccgaagtcaaattcttagggcacgtgatatctgctaaaggagttgctgtggaccccgaaacagtgaccgccgtcactgattggaagcaacctaagacagtcactcaaattcgcagttttttgggtttggcaggatactaccggaggttcatcgagaacttctccaaaatcgctcgacccatgacacagttgttgaagaaagaagagaaatttgtgtggagcccgcaatgcgagaaggcattccaaactctcaaggaaaggctggtttcctcgccggttttaatcttaccggatactcgcaaggacttcatgttgtactgtgacgcttcgcgccaaggattgggaatattcatatcacatggacattggaatggttggattattgtggaattggattcacaccggggaaatattccccgtgattccctccctctttccccccatttttccctccctctc

SEQ ID NO: 14545 - DNA, 4404 bp, Oryza sativa
  Clone ID: TFbOSC9454j.C1.o21.fg
atgacaggaggatcgggggagcaccctcaacattcaccacgtacgaggggcatcatacaacattttgagcgccaagtgagggagcatgctgaaggccttgatgaggatgttagggtcgccaatgatcgccttggtcaattggaggctgctcaaattgacaccaactccaagctttcctcattggagaggtcccttgtggctgtgaacacttctcttgcaggtatcttgaatacgttggagagaatgggccaagatggtcatgatggatcggctaggcgcaaccacaatggccatgatgctaatagcagcatcgcagcaagggaagaactggagtatgctgctgacactgagcatgatgaggaggtacttggtcgtccacaaagacaacagcgccggcagcgccatggcatgggcgctccaccacggcgggaggtacgtgataatgatgattctttaggcaagatcaagtttaccattccttgctttgatggaaaatatgaccctgatgcatatcttacttgggagttagccattgatcagaaatttgcttgccatgattttcctgagaataaacgtgttagggctgctactagaatgcttcgttgtggattggtagaaaatgatgatgctggtatggctagattcatgggtgggctgaaccgagaaattcaggacattctagcctacaaagaatataattcaattaatcgtttgtttcatcttgcttgtaaagctgaaagggaagtacagggacgaagagctagcttcaggactaacatttctgcaggtcgtgctagctcttggacatcttctaacgctgctgcaccgtcaactcgagcagcagcaccatcgtcctcaagcaacaagctgcgtccctctacaacaaactctacaccatgcccgagtgaaccaacaagaggggttgctgctacaccttccaagagctcatcatcagtagcttcatcaggaagaacaagagatattcagtgcctacgctgcaagggctatggtcacgtgcgcaaggactgcccaagcactcgtgtaatgattgtgagagctgatggtgggtactcctccgctagtgatttagatgaagaaacctatgctttgcttgcaactaacaatgcaggggaaggtgacgcgccccaccaagatgaggaacacattggggctgaagctgcagagcactatgagagcctcatggtgcagcgagtgctaagcgcacaaatggaaagggctgaacagaatcagcgccacaccttgtttcaaaccaagtgtgtgatcaaggaacgctcttgccgcgtgatcatagatggaggaagctgcaataatttggctagtgctgaaatggtggagaaacttgcattgagcacacagccacatccacagccctactatattcaatggcttaatagcagcggcaaggaacgtactaggagtgagcatcttattgcggctaatgaacttgagaagcataagaagaaacccaccaactctgttcaaaataataaaaatgagattaagctgaagggatcttgtttcattgcaacaaaatcagatttggatgaagttgacactgacactgttgtttgctatgctttggtttgcaaagaaaccttatttccaattgaggatactcctatttctttgcctcctccggtcactaaccttttgcaggagtatgctgatattttcccaaaggaggttctaccggggctgcccccaattcgagggattgagcaccaaattgacctcattcctggggcctctctaccaaaccgtgcgccatacaggaccaacccggaggaaacaaaggagattcagcgtcaagtgcaagagttactcgataagggatttgtggtggtatattttgatgacattctcatatatagcagatcaatagaggatcatcatggtcatttgcgtgttgtttttgatgctctacgagatgcacgtttatttggtaaccttgagaagtgcacattttgcacagatcgagtctcttttcttggctatgttgtgactccacagggaattgaagtagttcaagccaaggttgaagccatacatagctggccggttccaacaacgatcacacaagtgagaagctttctaggacttgctgggttctaccgccgctttgtgaaggattttagcaccattgcagccccattacatgagcttaccaagagaaatgtcacattcacttgggctgcagcacaaaggaatgcattcgacactttgaaagataagttaacacacgctcctttactccaacttcctgatttcaacaaaacttttgagcttgaatgtgatgctagtgggattggattgggtggtgtgttgttacaagaaggcaaacctgtagcatatttcagcgagaaattgagtgggcctagtttgaattattctacttatgataaggaattgtttgctctagtgcgaacattggaaacatggcagcattatttatggcccaaagaatttgttatacactctgatcatgaatctttgaaacacattcgaagtcaagcaaaacttaaccgtaggcatgctaaatgggttgaatttattgaatcttttccatatgtcatcaaacataagaagggaaaagaaaatgtcattgctgatgctttgtctagacgttacgcaatgctatcccaacttgacttcaaaatttttggcttagaaacaataaaagagcaatatgcgcacgatgatgattttaaagatgtgttgttgaattgcaaggagggaaggacttggaacaaattcgttctcaccaatgggtttgtgtttagagctaataagttatgcattccagctagctccgtgcgtatgctattattgcaggaagcgcatggtggagggctgatgggacactttggtgtgaagaagacggaggatatccttgctgatcatttcttttggcctaagatgaggagagacgtggagaggttcgttgctcgctgcacaacatgccaaaaagctaagtcacgccttaaccctcatggtttgtatatgcctttgcctcttcctagtgtgccttgggaggatatttctatggactttgttttagggctgcctagaacaaagaaggggagggacagtatctttgttgttatagatagattttctaagatggcgcatttcataccttgtcataagagtgatgatgctacacatgttgctgatttgttctttcgtgagattgttcacttgcatggagtgccaaacaccatagtttctgatcgcgatacaaaattccttagtcatttttggagaaccttgtgggctaagttggggactaaacttttattttctactacatgtcacccccaaactgatggacaaactgaggtggtgaatagaacattatctacaatgcttagggctgttttgaaaaagaatattaaaatgtgggaagaatgtttgcctcatgttgagtttgcttataatcgttcacaacattctactactaagaagtgcccttttgagattgtttatggccttctaccccgtgctccaattgatcttttgcccctcccaacttcagagagagtgaactttgatgcaaaatatcgcgctgaattgatgttaaaactgcataagaccactaaggagaacatagagcgcatgaatattaagtataaacttgctgggagcaaaggaaagaaacatgttgcttttgaacctggtgatttggtttggttgcatttgagaaaggataggttccctaatttgagaaaatctaagttgctacctagagctgatggtcctttcaaagtgctacaaaagattaatgacaatgcatacaagcttgagctacctgccgattttggggttagccccacgtttaacattgcagatttaaagccatatttgggagaagaagatgagttagagtcgaggatgactcaaatgcaagaaggggaggatgatgaggacatcccttccaacgatacaaccacgcctattgcacagcaaggaccaatgactagagctcgagctcgttcaaggttgttcttggcacggcaagaacagcaacaacgtggagtcggtgtaccggttgctaaggcgcagcacccctgtggtagttgtagtcggaccgccaacgtcgtatccttccccaaatcgaagtttatcctcctctcatcgaaagatcgggaacccccgttgctgcatcaaaacccgtatggaaatgttggagaagcacatactcggggcagtaatacgagtaactggaaagaaggcaagacagaatctgtctcgcaacttctcccaactaccgtttacacatccaacggtagaggtgtaccattgctttgctctctcttgaagagagaacgggaacaatttccaccgcacagtttcttgcctcatgccacgaatcttaaggcatga

SEQ ID NO: 14546 - DNA, 2484 bp, Oryza sativa
  Clone ID: TFbOSC400773j.C1.o43.fg
atggctgctcatgctgttgatctgatgaggcctgagaagtttgctggtgaaaactttaagcgttggcaatccaaagttcgtcattatctggtgtcgcagaacttgtggtatgttattccacaagtgaggccgctgacccaacagcagcatgcggactttgagaccagtaatgatgtggctttaggtgtcatgctttcgctcctgtctgaccagctctacgacgtgtatggtgcttacaccagcgccgcagagctatgggaggcactggaccgtaaatattcggtttcagatgcaggacgttggatatatgtcgtggagcaatatcatgactttaagatgattgacaaccaatcagtggtgaagcaggctcatgatcttttaacgattatgggtgagatgtctcagtttggtgctattgtgaatcctaagtttgtggtggggggcattattgccaagcttcctccattttggagggattttgccactgcacttaagcacaaacgggaggacatgatggttgatgacctgattgcccacctggatgtggaggagaaggcgcgtgcgaaagacacgccgactatggcacaagaagggacatcaaatgccaacctagtgcagaagtcaaatgcaaagaacaagggcaaacaagcagtgcagaaccataaggccaaaaacacaaccaattttaagaagaaaattacttgctatgtttgcggcttggaagggcacaaggccaacaaatgccgtgacaggaagggcaagaagaatgttcagcaagggcagaaaattgccaacatggttgtgagcgaggctgggtcttcagggtatgattctactcctgttgcactttcagcgtatcaatcctttgattggtgggttgatacgggagctaacattcatgctgcaaccggttcctccatcttgatgggcaatggttcaggtgctgctgttcttggagtagggaaggttgatctgaagctcacttcagggaaaatcatctctttgaagaatgtgcagcacgccgaggctgaaaaccaactagaaagaaaaattaaacgtctacggtcagatcgtggtggtgaatatgtgtcagatgagttctcccaattctgtgcggatcatggaataattcatgaaattacacctccctattcaccccaatctaatggggtcgccgaaagaaagaaccgcactttgactgacttggttaacgccatgttagacagtgccggtatgtctaaggcatggtggggggaggctgtattaaccgcctgtcacatcctaaatagagtgcccactaaaaatagtgagatcactccatatgaaggatggaaagggagaaagccatcactatcatatttgcgcacttgggggtgcttggcgaaagtcaatgtaccaataacaaaaaagcgcaaacttggaccaaagactattgattgtgtctttctaggatatgcacataatagtgtggcctacaggtttttagtagtgagatccgatgtaccggatgtaccgataaacatggtaacggaatctcgtgatgcaacattttttgaggatatttttcctatgaaagctaacgaaacttgggagatcactgatcgaccatttggttgcaagccagtggggtgtaagtggatctttaagaaaaaacttagacccgatggtactattgaaaagtacaaggtaaggcttgtggcaaaggggtacacgcaaaaggaaggcgaggatttctttgatacttattcacctgttgctagacttactactatccgtgtgcttctgtcgctggctgccttatatggtttcgttgttcatcaaatggatgtgaaaacggctttcctaaatggtgagctagatgaagaaatctatatggagcagcccgatggctttgtagcactcggacaggaaggcaaggtggttaagttattgaaatctttgtatggcctaaagcaagctcctaagcaatggcatgagaagttcgatcgaacattaacatccgctggtttcattgtaaatgaagctgataagtgtgtgtactatcggtttggtgggggagagggtgtgattttgtgtttatatgttgatgacatactcatatttgggaccaatattaatgtggtgtctgaattaaaatcatttttgtcccaaaaatttgacatgaaggatttgggagaagctgatgttatttcaaacattaaattgatcaaaggcgaggatgggattatgctttcgcaagcccattatgtggagaaagtcctaactcgtttcgggttgatggactgtaaaatagctccaacgccttatgacccaagtcttaagcttcgaaagaacaaaggactaggaaaggatcaattgagatactctcaaatcattggctctctcatgtatttggcgtgtgctaccagacccgacatctcatatgctgttagcaagctgagccggtttacttctaacccggagatgatcattggcaagcactag

SEQ ID NO: 14547 - DNA, 3786 bp, Oryza sativa
  Clone ID: TFbOSC406055j.C1.o2.fg
atgtcaacggagattggagacaagaagatgaacgacatcaatggaggcaatactacctcaaaatccagcggtgggacgttctcggggtatactttcattctcccgattttattagatgtttctttgttaatactcttcgcaatggcagcattgcgttactttgtaaatgttgatgcttatttcatattaagcatactcaagttgtatacatctagcactgtcactagatctactcatattgtaaatgtcatgtttattatcttaatattttggattaaaatatgccgaattatgaccaaatttccaacaatccaaaaacttgttaggtctttttcggtagttggctttgctgcatcactaaaaccacatgctttcgatggttcaaattataaaagatggaaagcacgtgcacttttgtggttgacggtgatgcattgtttctttgtctcacggggcaaaccgagtgaaccgcctctctctcttgaggaggaggctaagtttgaggctacagattgcttgttccgtggagcaatgatcagtgtgctcgccgataatattgtggatgtgtatatgcacataccttcagggaaggacatgtgggatgctcttgaggccaagttcggggtttctgacgctggcagcaagctgtatgtcatggaacagttctatgactacaagatggtcgatgaccgttctgtagtggaacaggctcatgagattcagatgctgaaggaacttgagaacaacaacggcgagttgccggacaagtttgtggctggaggcattattgccaaattgccaccttcttggtcggattttgctacttctctaaaacacaagaggcaagagttcagtgtcactgatctcattggctctttgggtattgaggagaaggtgagggcaaaggataaccggtgcaaaaagatcgagggaggttctagcgccaatttgatgcagaagaagaaccctcacgcatccaacaacaacaacaagaaagtcaaacctgacgtcaaacccaaggctacaaccaattttaagaagaaaggcaagggaaaggtaaaaggagatttctttttgtgtggcaagcctgagcattgggccaaggattgtcctgagcacaaggacaagaagtttgcaaacatggttattagtgagggtagaggaacattggggtatggtaaatttttacctacagttctctctgtgtgtcactcacctgattggtgggttgatactggtgctaatattcatgtgtgtgcggacatttccctgttttcttcttatcaagtcgggagaggttcctcctttttgatgggaaacggatcgcttgcggctgttcatggtgttggtacggtcgatctaaagtttacttcgggaaagattgtgcagctgaagaatgtgcagcatgtcccttcaataaagaagaatctagttagcggctctctactgtgtagagatggttttagacttgtgtttgaatccaataaatgtgtcgtatctaaatatggaacgtttattggaaaaggttatgacagcggaggtttgtttcgcttttccttggatgatatgtgtaataaagttgtgaaccatgtaaacgatgatgatgatgagtccaatgtgtggcatttgcgactttgtcatgtgaattttggttgtatgacacgcttagccaatatgagtttaattccaaaattcactttagtcaaaggctctaagtgccatacttgtgttcaatcgaaacaacctcgcaagcctcacaaggcatctgaggcgaggaatttggcaccattagaacttgttcatttcgatctgtgcgaaatgaacggcgtgttgactaaagggggaaagaaatatttcatgacactgatagatgattgcactagattctgctatgtgtacctattgaaaacaaaggatgaagcattacattactttaagatctataaggatgaggtagaaaaccaactggaaaggaaaatcaaacggttaagaattcctactaagcataaggaagtaacaccattcgaggaatgggaaaggaagaaattaaatctctctcacctgcgcacatggggctgtttgaccaaggtaaatgtacttatagccaaaaagcgtaaacttgaaccaaagaccgtagattgtgtgttccttggttatgctatccacagtgtgggatataggttcttaatagtaaattctggagtacccgacatgcgagttggtacaattactgagtccagagatgccacattttttgagaatgaatttcctatgaaaaatgcacctagcacttctagtcaagaacctattttatcccctgagcactttgtgccgatagaacacattgatcaaacgcttgaggaaaatcctgaggaggataacattgtagcaactcgaaagagtaagagacaaaggactgcaaagtcttttggatatgactacattgtatatcttgtggatgatactccaagaaccattgaagaggcatattcatctcctgacgctgactattggaaggaagcggtatgcagtgagatggactcaattatgtctaatggtacttgggaagtcgtcgagcatccatatgggtgtaagcctgtaggatgcaaatgggttttcaagaaaaagcttaggcctgatggtacaattgaaaagtacaaggcaaggcttgtggccaagggttatacccaaaaagaaggcgaggattttttcgacacttattcatcggttgcttgcttgactacgattcgtgtactactcgctctggcagcctctcatggtctactcgtccatcaaatggatgttaagacagctttcctcaatggagagttggaggaggagatctatatggatcaaccagatggcctcaatgtgattgaggaggtcaaggactttctgtccaaaagctttgaaatgaaggatttgggagtggctgatgttattcttaacattaaactactgagaggagttgagggtgggattacacttgtgcaatctcactatgtggacaaggtcttgagtcgctttggttatagtgactgcaaggcagctcctactccttatgatcctagtgtgctattaaggaaaaaccgaagaatagcaagggatcaattgaggtactcccagattattggttcattgatgtacttagctagtgcaacgaggcctgacatctcatttgctgtgagcaagttgagccggcttgtttcaaatccgggagatgatcattggcatgctcttgaaagagtaatgcgctatctaaaaggggcaatgagctatggaattcactacgccaggtacccaaaagtgctggagggctatagtgattcaaactggatatctgatgctgatgatataaaggccacaagtgggtatgtgttcacacttggaggtggcgctgtttcctggaagtcttgcaagcagaccatcttaacgaggtcaacaatagaagcagagctcacagctttagatactgccacagttgaggctgaatggcttcgtgagctcctgatggacttgccggtggttgaaaaaccagtaccagcaatcctgatgaactgtgataatcaaacagtgattattaaagtgaacagttcgaaggacaacatgaagtcatccaggcatgttaaaagaagactgaagtctgtcagaaagcagaaaaattccggagtgatagcattggactatgtccagacggctaaaaatctggcagatcagtttaccaaggggctaccacgtaatgtgatagactgtgcatcgagggagatgggcttgagacccacttag

SEQ ID NO: 14548 - DNA, 1014 bp, Oryza sativa
  Clone ID: TFbOSC420396j.C1.o6.fg
atgctgctgagttcacagctaccattgattcgaagtcaaaaccaaaatcagtatgtgtttgatcaagcatttgccccccaggtcaatgagcttccaatgccagaagaggatgtccccttttgtcatgattgtagagaacaaggacactatgccctgaattgcccatgggtatatgccaaagaagccacttcctttggttcagcagggcagacatcgctaaaccagccaccttgcaccaagtcaagtttgcagcctagtgtgcaaagtggagagcccaatggagacaatccattgaatcctagaaaatgctttcctcctagcctttcgtaccacgtggggtcacgtactaagcaagccaaaggcaagaagagtaagactcagaagagaaaagcaccgatgcgaactgaagaagaagtacgtaagatgactattaccagcaccgaatggcctccagcagggataactattcctagacgtcaaagaggaaataccttccgaggtgcacgacagttgacccagcacctcctaagccatggtggcagagtatctgatagtgaagggtcagatcaagtctcctcggatgatgaagatgagcctccccgacatctcggcgaggaagagatggaatcaaaagcatgcacccgttgtggagaaattggacacgttgctagcatgtgtctcacactctgccctcattgtgaagaagaccatccaccaggggaatgtcccacctcaccaaccattctctgcaccgacagcctcagcaaagaattgtcgtcgatggaagaagttgtgtctctccccgacctactccaggccgagcaaagggcaatcaacctcaggagggcgataccaagcagaagaccgttatccgcttcaaccagcaatcagaaggaagcttctcctgtgaatgatagcaatatgcagtcctatcacatcatcacggaaccaatcaaggatgatgcagtcactagaacaatgccagctatatctctccaaaatcagaatgagtag

SEQ ID NO: 14549 - DNA, 1401 bp, Oryza sativa
  Clone ID: TFbOSC900190j.C1.o18.fg
atggagatggatgaagtcgggggtcgatggacattctctaggacaaatgaaggctacacgagctgcggcccggtagtcgagatgtcatggcacagggttggtgccctgctgctaggggctcagtcctgcctgcctgtcccgaaggttccggccgtaggtgggattgggtcggtactcttgtctatggctaggatgggttggaaactatgtcacgtcttccatccgtataccgtggtgatgtttaacagagaaaaaggaaagaatgtcagcgggtatgcctcaagtaactcaagttttcaactcaatctaccactggcctcaagagagttaaccagggcacacccttggtccattccaagcatgctgcttagttcacagctaccattagttggaagtcaagaccaaaatcagtatgtgtttgatcgagcatttgccacccaggtcaatgagcttccaatgccagaagaggatgtccccttttgtcacgattgcagagagcaaggacactatgccctgaattgtccatgggtatatgtcaaagaagccccttcccttggtttagcagggcagacatcgctaaaccagcctcctcacaccaagtcaagcttgcagcctagtgtgcaaagtagagagctcaacggagagaatccattgaatcccgggaaatgctttcctcctagcctctcgtaccacgtggggtcacatactaagcaagccaaaggcaagaagagtaagaatcagaagagaaaagcaccgatgcgaactgaagaagaagtacgtaagatgactattaccagcaccgaatggcctccagcagggataactattcctagacgtcaaagaggaaatactttccgaggtgcacgacagttgacccagcacctcctaagccatggtggcagagtatctgatagtgaagggtcagatcaagtctcctcggatgatgaagatgagtctccccgacatctcggcgaggaagagatggaatcaaaggcatgcacccgttgcggggaaattggacacgttgctagcatgtgtctcacactctgcactcattgtgaagaagaccatccaccaggggagtgtcccacccgcaaggtcacatgttttctgtgcgaagcaccaaccattctctgcaccgacagcctcagcaaagaattgtcatcgatagaagaagttgtgtctctccccgacctactcccggccgagcaaagggcaatcaacctcaggagggcgataccaagcagaagaccgttatccgcttcaaccagcaatcagaaggaagcttcccctgtgaatgatagcaatatgcagtcctatcacatcatcacagaaccaatcaaggatgatgcagtcaccagaacaatgccagctatatctctccagaatcagaataagtag

SEQ ID NO: 14550 - DNA, 3561 bp, Oryza sativa
  Clone ID: TFbOSC413662j.C1.o7.gm
atggggaggccgcggaagccggcgaagcccgcggccgcggcgtcctcctccgcctccgccgccgccgccttctcgatcggcaactgcaaggtggagatccacgggagcagcctgaggtgccagtccacggagcaggaggaggaggagctcaccatttctgggcccaggggcgcgaagatcgtcgtgtctgtcgacggggccaagagttcttcagttggtgacggttttgatttcatccttctcagtccgagtgatgtcaatgagcgaaacaaggcattgcttcaggtggttaaattatacagcttctgcattaatcatttccagtgcaccagcaaagcaagtgaaagtggttatgaagaggacgccgagctcgccgcagcagaggagcgcaggcgagcaacggctcagactgctgcagcagcagcgagggcggccagactggcggcagcggagttggcagcagccagggcggaggcggaggcagaggtggcggaagatgcggcacgtgcggcggaggtagaggttgagaccttgcgcagcagcatcaacggctccatcgccagcgacatcaccgctgacagggagcttgaggagctggcaagaggaagggcgcgggagcgggcagagcggtgggcagcagtccacccccacggcggcggcggcggcccaagggaccgcgcgcccgccgacgggaacccggacgggcgcgggcgtgccggcggcagcccggagcccgcgcgcggccctcgcaggcagcgcggctctccctcccctgaccggtgccatggtcaccacggcgtccagacggtggtcagggactttggtcccggcggtgggtggcctaccctcaccaaaaccaactacatcgagtgggccgcggtgatgagggtgaggctccaggtgcggcacatgtgggaggcagtctggtacagcgacgtcgactacgacgaggatcggcgggcactggatgccctcatcgctgcagtcccgcccgagatgcagttctcactttcccagaagcggactgccaaggaggcctgggacgccatcgctgcggcacgcatcggcagcgaccgcgcctgcaagtccacactgcaggcactccgcaaggagtgggagaacctggccttaaagccaggtgaggatgttgatgactttgccctccgtctcaacactcttttgcagaagatggtgcagtacggcgacaacacctacaacgaggagagagctgtcgagaagctcttccgctgcgtcctagagaagtacagacagattgctcgctcgatcgagtctctgctggacctctccatgatgtcgatcgaggaggcgttgggtcgcctcaaggtcgtcgacggtgatgagccacagcctctctcggggcctaccaccattggcgggaagctccatctcactcgggagcagtgggaggcctctcagggtgacagaagaaagggggagtcttctccctcgacaggcggcctcaagccacgcaaggcacgcggaggtgtccagctgcggtgggcgcgaagacgcgccgagggtggcgctcgcagaggcgcccagggcggcgccgccggcaaccacaagccggcacgagacgacacctgccgcaactgtggcaagcttggctattgggccaaagactgtcgacagccacgacgtggccaggcgcacgtcgcacaggtggaggaggaagagccggctctgctcctggcacacgcaagcatcgagcttcctccagcggcaccggccgcagtggctttcctccaccttgatgagccgaaggtactcgtctccctctgcaacggctccagcaacgacaaggctgatgggtggtaccttgacaccggcgccacccatcacatgaccggccgacgggagttcttcaccgagatcaagggcgttgtctccgtcaccttcaccgccaagtccggtgagcacaggctgctcaccggagtctactacatccccgcgttgaggaattctatcatcagcgtgggacagctggatgagaacggctcacgcgtgttggtcgaggacggactcatgaggatttgggatcgccgtcgtcgccttcttgccaagtggcacgagcgcttcgggcacctccacttcgaggccctgaagcgcctcagtgccaaggagatggtgcgaggcatgccgtgccttgaccacgtggagcagctctgcgacgtctgcctggtaacgaagcagcggcggctcccttttccccagcagacgaacttccgagccaaggagcggctcgagctcgtgcacggggacttcaagggagaggctgcggatgccatcaggcgcgcgcaggccgctgcagaggcggagtgcggccgcaagctgcgcgtgctgcgcaccgacaacggcggcgaattcacggcggctgaattcgcgtcatactgcgctgatgagggcattcagcgccactacaccgcgccgtacaacccgcagcagaacggcgtcgtcgagcggctcaaccagatggccctcgatggcaggacaccgtacgaggcttggcatgggcgcaagccggcggtctcccacctacgggtcttcggctgcctcgcgttcgccaaggagcttggccacatcggcaagctcgacgacaggagcaccccaggggtgttcattggctacgcggagggctcgaaggcctaccgcatcctcgacccggagacacagcgtgtgcgcacaacgcgcgatgtagtgttcgacgaagggcgagggcagctcttcttcaccgagcgtgtctaccccagtcctcgagcctccaccgactccaacaccaacacactctcgggccacgacttcgactacgacgagctcttcgtcgacaccaccccagccgctcgtgttgagcgcagcccggtggagttcgctacttcgctctcccacgacggggagcgcatcgacgcgtaccacgacggcgagcagctacggtaccgtacgatggaggatcttctcggcgaccagccggtgccgggactggtgcctcgcgacatggaggcgcagttgcaccttgcgtgcgacgacggtgagcctcggtcttttgtagaggtcgagaaacatgcggcatggcgtgccacgatgcagtcgaagatggacgcggttcaggagaaccgcacctgggagcttgctgacctccctcgtggtcaccgcgcgatcacccttaagtgggtgttcaagctgaagagggatgaagccggagccatcgtcaagcacaagactcgcttggtggcacgcggcttcatgcagcaggaggggatcgactacgacgatgccttctctcccgtggcacggatggagtccgtgcgactccttgcgctggctgctcaggaaggctggggtgtccatcacatggacgtcaagtcggcatttctgaacaacttgaaagaggaggtctacgtgcaccagccgccgggattcgtgctccctggcaaggagggcaaggtgctacgcctgcacaaggccctctacggcttgcggcaggcaccgagggcgtggaatgccaagttggattccacgctcaaggggatgggcttcgagtaa

SEQ ID NO: 14551 - DNA, 8937 bp, Oryza sativa
  unsure (1)..(8937): unsure at all n locations
  Clone ID: TFbOSC415120j.C1.o11.fg
atggattatcaacaatcagatggaatttatgacatgccagatgaaccattgtttacactaaatttgaggttgagccacagcaatgacctggatagagttcataaatctttcaccagcaagattgataaggcccgaacgtatctcacgggtaggttcagaaggattgtcaaggtcaaaggttctaagagaaaggagttcgttcttacccctgaaggccctgatgtttttaccattgctttcactgatggtactaacagagtaactgccataattgaagagagaaatatgtggttgagaggtttccaaactgcagacggacacatttttgagtttaatgatgaacacggcaatgaagggaaggatgctaatctggatgacaagactgatgaaatgaataatcagttcaatggtaatgacaaaacaagagatgaggaggtgaaggatgaggaagaggctataaaggaccaaaaactgaaggttataaaggacccaaagatgaaggctataaaggaccgagggatgaacaagcactgcaaacaaaaagaaaagagcaaagcagcatgtggatccaaaaagaagcaagtgaataggaaagaccaactcaatccaaaaaagtatattagaggatctgttctcttacggcatgatagcaattatggttctcttcttggacctaacagactgcctctgtttcaagtagtatacagtacaatgagggatatgctgcagaatttggctcactttgatccaaacaactattcagataaacacaagcgctcgatggctgcactgatcatccatacagctgagactttgaagaataaatatatatcaagtcttgtgttaaattctttcaatccacatattggtgcaaggcttcaagcactggatgatatgggagcagcacatattaacgggtggtctacagcctctgaattaattttgaaatccattcacctcccatcaaaggtttgggactttcaacagcaagaattttccaagtgcaatgaattttacaaaaatcagtgctggactacagatccaaatgtcgcaatgaagtcaattgtgtttttaaaaggcgatgcttacacggacactactgcctctactgtgatggcgccgccctcgggaaaaccgggtgccatttctcttctgaagcctccggtcatcttcaacggactcaacttccgggagtatgcattgcatatgcagatacacatgtgcagccagtggttgtggggctacctcatcggcgatcggccttgcccgccttgtccaaccttgcctgctgagcctgccatctcggcagatgctgatgagaacactaagcgtggtctccttgatgatcttgctgctgctatggaggcgtatcaaacagatctctctctatatgagacttggttagagcaggaggcctatgccaaggctattttggttgggagcatggagcagtacgagcctcgcaacgatgccatgtttcttgccgttgtgaatgaggcacaatctcttcgtcagcttgatgccactgtggatgagttctttcgcaagatgtctgcggtgtggcgtcaaatggacctacagggcgctgatgtttgtcgcacttgtacctgttgtcagcgccagagggtccagactgagaccactcgcctctatgagttcttgtctcgtttgaggcctgagtttgagcctgttcgagctcagctgttggcacgacgccctcgaccttcattgttggagaccttgcctgagctacgggctgaagagactcgttgtcgtgaggctggtataggcattgcacagcagtccacctctgtcttggttgcacagggcttgccttctcaggtccatgtctctgcccagcctgttgtggtgccatcacctttacctgttgcggctggtgctcctagtactccttcaggcattgtttgcgggtactgtagcaagacagggcacaccgcctctatgtgctacaagaagaagagagatcagagtcatcgcacctctcagggctctcgacagggctcttctcagtcaagctctcagcagatcacatcgaccgagcaagagcttgtaaggctccttcgtcgtcttatgactacagcctctacctccacccatgggtctgctgctcaggcttctagtcttccaccaccacctccatcctcttcaggtatattgtcctcgtggtttcttgattctggtgcttccttccatatgacacccgattccacacatctttcttctatgagtcctcctgatacccctctcacagttcagacagctaatggcacctcacttcctgttgttgatcgtggcacactttctacttcttcctttcgagttcctactgtctctcatgttcctaagttaaccatgcagcttatgtccgctggtcagatcactgatcatggttgtcggattatacttgaggctgactcttgttgtgtccaggatcgtcgcacagggctcctggtggggactggtcctaggcgccatgactctcagcgtctttgggagcttgattggctacatctcccttctgatgcttctaccagccagtcagtcggttccactgcttcagcgttagctacttcagccactactacttttgctcagtggcatcgttgtttaggtcatctatccggtgctagattatccacacttattggtagttggggtcttaggtcctgtttctggagacaccgctctacatttcaatttctttctatttatcagcagtttgctactatggttcgcactcagtacgattcttccatacgggtttttcgtgctgactctgttgctcctgctcctgcttctcggtatgatcttcgtgatcgccatgctattaggcctgcgcctaagtatggctttactgctgcggctattgttgagcccacgacttaccgagaggctattgcccaccaggagtggcaacaggcgatggcagaggagattgctgccttagagcgtaccaagacttgggatgttgttcctgcacctactcacgtcactcctatcacttgtaagtgggtctacaagataaagactcgctctgatggctctcttgagcggtacaaagctcgtcttgtagctcgtggttttcagcaagagcatggtcgtgactatggtgagacttttgctccagttgctcacatgaccaccattcggaccctgttagctgttgcctctattcgtcagtggtccatttctcagctcgatgtcaagaatgcctttctcaatggtgagctgcatgaggaggtctatatgcagccccctcctgggtattctgtccctgatggcatggttcttcgtctgtgtcgttctctttatggtctcaaacaggcccctcgtgcctggtttgagcgcttctcctcagttgtcactgatattggcttcaaagccagcgaccatgaccctgctctctttgttcacacttcttcttgtggtcggacccttcttcttctatatgttgatgacatgatcatcactggtgatgactctcggttcattaatcttgtgaagaagcgtcttagtgaccaattcttgatgtctgatttgggtcctctcaggtactttcttgggattgagttctcttccacgtcttctggtttctacctctcccaagagaagtatattcaggatctccttgctcgttcgggcctcactgataagcgtgtggttgacactcctatggagcttgggatacatctacggcccaatgatgctagtgaccactctgatcgtcgctctctctctgcttattgtgtctttcttggttcctctctgattgcatggaagaccaaaaagcagactgcagtttctcgttcaagtgcagaagctgagttacgagctatggcagccttgaccgctgagatcacttggctgcgttggctcctggaggattttggagtttttgtctctcccccgactccactcttgtcggacagtactggtgcaatcagcattgctcgagacccagtgaagcatgagctaaccaaacacatcggcgttgatgcctcatacatgagatcgcaggtgcaaaatgaggttgtggctcttcatctgaatgcatctgttggtgtggttgttatgggtggcattaaccatattctgatgcataattgggaggtaccatgtgcagctgaaatttccttaaaggcaagttcttactcagcaaagatccctatcgttgaaggagaggttaaagttttcaccgaccatcacaatcaactatacacctctcatctaaaactaagttcaaaagaaggtcagaaggaggttaaagtgcgtttgtatgttgatggctttttagcattaacagcgaagtcttgtcaagtggagaatgaagaagttttgcgggatgaaaagggcgaaacatgtacagataatgataaggtgactcgatgtctcgggagagtatttgcggtgatggaccgggagtcggcttggggattagacgacgtccgtggtggtcagagatcatgtgggatacttaggctagagttgatgcacgtggttgatggagattccatatggcatacgatggagttattgtgtgcgtatgggatgcggagtcgaatttggaaggagtccaaatttgagagaagtaataaagtcgtcatccactttaagagttcttcgatttatgtttcaccgggtttcggcggtctaactggcggcgcaccggcggagtacattaaatttgagatgaaatctggagaggctttggatgactatctttctagatttaataaaattttgagtaatcttagatctgttgattcttcttatgatgctaattatccacaatctaagatttctcgtcactttttgaatggtctcgacatgtctatttgggatatgaaagttacatctattcaggagtctgttaacatgtctactttgactttggattcactttatactaaattgaaaacacatgagatgaatattctttctcgcaaagttgattctaaatcgagtgctttggtttcttcttcttcttctttggttgttgatgtttcttcatctatgccttcttttcttgctgcttttaatgccacatccgatgatcaactcgaacaaatcgaggaggaggatttggctttggtcgctaacagaattgctcgagctatgaataatgccaggaacaggaaaagaggtggtccaaatcgttgctttgaatgtgattcaattgatcatcttcgttcgcattgtcctaagcttgggagaggcaaaagagaagacaaagatggtgagaagaccaataacaacaagcccaacaactacaacaagtcaaagggttctaaccaagggaggaagatggagaatcttaggaaggcttttcaacaagtttgcgccgctttcgagccactaagtgatgtagatggtgaaagtggagatgatgataatggaaagaatgtctctgatgtttgcttcatggcacgtggtgaatctgacacagaattaaaatctcttattccaaatgatgatgattgtgaaaattgtgaggttttaatgaatgatatttcaaaaattagagatgttaatgctgcacatgatttgaaaaatagatcttctcttgcttgtagttttgctttgcatacacgcactttggatgagttgtttttaactaaaaagttgttgcaaaaatatcaaattgcttttcatgctagtttgatgtttaacatgatttctgctaaaaagttaaaacaacctcatgatgttttggattgctcaacatgtaatttaaataaaatgaaactaaaagatgctttaggacgtgttgagtatatggaagatgttgtaaaaaacaatgaagtgctttctttccccaaatgtcgtaaaagcaaaggtgtaatggtagattgtgaaaattgtgctaatttggaaaaagaggtttcttatttgaaaaattccttgctaagattttctgatggcaaaaagaatctcaatatgattttggatcaattaaaggtgttggtgctagaggtggctttggtggcaaggaaggagaacgtgtggatcgtggattctggttgttcgcggcacatgaccggtgataaaaattggttctcctccctcaaaaaggcatccaagactgaatcaattgtctttgctgatgcttctactagtgccgttgtcgctataggtttggttaaggtaaatgaaaaatttgaattgaagaatgtagctttggttaaggatttaaaatacaatttgctttcagtttcacaaattgttgatgaaaattctgaggttcactttaagaaaactggaagtaaagtttttgattcttgtggtgattctgtgctgaatatttctcgctatggaagagcgtttaaagctgattttgaaaattctgtttcacctgtgacaacatgtttggttgctaagtttgataaagatgtgatgttttggcattgtagacttggacatgttggttttgatcatctcactaggttaagtggtttggatcttgttcgtggtttgcctaaacttaagaaagatcttgatttggttcagggggaggatggtcgtatttttgaagacgagagcgactacgacgacgacgacgaggtcggctcggccggtcagaccaggcaccaggccggtcagaccgccggcacacctccggtcagaccggcccatgaggagcggtcagaccggccaggtttgtcgggttcgggtactgttgatgtagatcgagatggtcctccagagaattcaacttcgaccagtactggaacaaaacgtggatcaacttcagaagttgctgctcctttgtacattcaacgacgacatccgccggaacaaattattggtaatataggtgagcggactacaaggtctaaggtaacgactcatgatgtttgtgcaaattctgcatttgttgcttcttttgaacccaaagatgtgtcacatgcattaactgatgaatcgtggattaacgccatgcatgaagaacttgaaaattttgagagaaacaaagtttggactttagttgaaccaccttctggacataatattattggaaccaagtgggttttcaaaaataaacaaaatgaggatggtttgattgtgagaaataaagctagacttgttgctcaaggttttactcaagttgagggtttggattttgatgaaacttttgctcctgttgctagaattgaggcaattagacttttgttggcttttgctgcttcaaaaggtttcaaattgtatcaaatggatgtgaaaagtgcttttctaaatggttttatactggaggaagtttctgtcaaacaaccaccgggttttgaaaatcctgattttcccaatcatgtttttaaattgtctatagctttgtatggtttgaaacaagctcttagggcatggtatgataggcttaagaactttttgcttgcgaaaggttttacaatgggaaaggttgacaaaacgctttttgttcttaagcatggtgataatcaacttttcgttcagatttatgtggatgatattatctttgtttgttcgactcacgccttggttgtagattttgctgagactatgcgcagggaatttgagatgagcatgatgggtgagttatcgtactttttgggattgcaaattaagcaaacacctcaaggtacttttgtgcatcaaacgaagtatacgaaggatcttttgcgacggttcaagatggagaatttgcagccaatttcaacaccaattggntctacagctgtgttggatcctgatgaagatggtgaagctgttgatcaaaaggaatatagaagtatgattggatctttgttgtatctaactgcttctaggcctcacatacaatttgctgtgtgtttgtgtgcgggctttcaagcttctcctcgtgcttcacatcgtcaagcggtcaaacgaataatgaggtatttgaatcatacacttgagtttggaatttggtcttctacttcatcttctatatgcttaagtggatattccgatgctgattttggaggttgtagaattgataggaaaagtactagtggaacatgtcattttcttggtacatcattgattgcatggtcttctaggaaacaatctagtgttgctcaatcaactgctgaatctgaatatgttgctgctgctagttgttgttcacagattctctggcttttatctactttgaaagattatgatcttacttttgagaaagtacatctcttttgtgataatactagtgctatcaatattgctaagaatcctgttcaacactcacgcacaaagcacattgatattcgttttcactttttgagggatcatgttgagaaaggagatgttgaattgcagtttttggacacaaagttgcaaattgctgatattttcactaaacctttggattctaatcgctttgcttttcttcgtggtgaattgggtataattcatccttttggcatggtgactcgatgtctcgggagagtatttgcggtgatggaccgggagtcggcttggggattagacgacgtccgtggtggtcagagatcatgtgggatacttaggctagagttgatgcacgtggttgatggagattccatatggcatacgatggagttattgtgtgcgtatgggatgcggagtcgaatttggaaggagtccaaatttgagagaagtaataaagtcgtcatccactttaagagttcttcgatttgtgtttcaccgggtttcggcggtctaaccggcggcgcaccggcggtcagaccggtggcatcgcggcagtccgaccggcgaacacacggcggtcagaccggcggcgacaggagtcgtcggcaggctttctcggcggttcgaccgatcaatctacatcggtcagaccgacgttcatcaggcggtcagaccggcgcaactacttcggttagaccgcgatccatcgatttcgagggtaacttttatttccgctaa

SEQ ID NO: 14552 - DNA, 1101 bp, Oryza sativa
  Clone ID: TFbOSC406457j.C1.o9.fg
atgtcctgggactggtaccgagatcgcggtttcgtaggaagcggttcgcgccgttttccctacgacacgctcctatcaggtgccgttatacggcggtatcagattgggttctcagttcctctgaagcaaatggcacctcaaccaacctgtcagacttgtgtccgcaactaccttggttctgaggaagacccagctttgtcagaaaatccaaatcaactagctgaacaagtcaccaaccaagtcgccaagactggtaatgctgttcctggaccaaacaaggaagttgcaaccagaaaccaacactcctcaatggatatttatcagattctagccaatcagactcagatgctacaagaaatagctcaaaatttggcttctatacaacaacaactgctactaccacagcccaaggtgaatccagacaagagtaagaatgaggccgcagaaatacaaggaacacaatcagtagaaggcactgatacccataaagagaagaacaaagaattcttaaatgtgatgattacagggatgaaaaccccacttcgagctaataattgccccaaccttcagaactcaatcaatgaatccgtatcgcaagaaaatagcatggttaaagaaggaagttgtcacaaaagaaagaccttgccatcagaagttgacatgcaagatgtcccacaatgtcagacactgcaatcttgccaaaacttatccaagacccccaccctcaaatcaaagaagatcagacacgttcccggattcatatgcttcatttgccacgaaattggccattacatgagacactgcccccaaaaaccctatatggatgcactactacaagctaatatgagcatctcaaggatgcccttctatccccaaggaagcccgaattcgccaaatgttaatgcagtacgtccaaccttccctgatgacaaaagagcaaaagcatcctgcgacatgtgccaagacatccaagaaaagaaagagatgcaagaatacaagagacgcaaagtaatgtccctagagattcaagcaaaagaagatttgtgtcgaaaaaacaaactcgccagcacaatactatcagaaagcatctcattcaactag

SEQ ID NO: 14553 - DNA, 1215 bp, Oryza sativa
  Clone ID: TFbOSC408556j.C1.o1.hg
atgatgaaggagatccttcaggttgttgttgagccaatcacttggctcgagtttactgttgctttcaagaagattcatgtaccatcgggagtggtggctctcaagaagagggagttcagggcactcactctgagatcttgttctatcaccgagtttctgcatgagttcaattgtctggcccgttatgctcctgaggatgtttgcatggacgagaagttggtggacaaggctattcgccaggaagacaagtacaaccgaatggaagagaagaaacacaagattgctcacaaccagcctatcaaggagcaaggaaacatgccagtggtgtgcttcaactatgatgagccaggccattttgctgacaagtgtccgaaacctcgacgtgtggagactgcccctattcagaacaagtccattgcaccagcaccgaaggctcgtgtcaatcatgttgctgccgcagaagctcaaggcgcaccagatgtgatttcgatgcgggactatccaaatgtgttcccagttgatctacgtggcataccgcctaagagagatatagaattcaggatagatctggtgatgaggacatctcccaccattacccgctggcaaagacgcaacaaggggtcaagtgggggtgggaatgatgaggacatcctctactattacccgctggcaaagactcgcgacacaaatcgatctggcttcttgaacgaacacgctcttgagccccgcaatcgcagcaccacgtcttctcttgttatcacccgtgtcgaaacgcggatgacctcgccgagaaggctaatccctgtttgcgaattgaagaacacaaacaaggacaagattctggacgtcaaattgttcagtcaagtcccgttgactcggaaagaatttggacgtgggaccaagaccattggaaaatttatcttcttagctttccatccatataaagaatgccccaacatgagcacaaaggatccggcggcggtgcgggaagaggaggagaggcgctggtcagggttgctccaccgtggcacctggtcgagcgtcacggctggctccaccccgcccacgcctgccgtcgccgccaccaaggaggccttggccgacgcggccgtcggcgagcgctggatcagagccctgagcgcgagggtttggggaaagaagaggaacaagatttggactggtgggtggtctggacttgaatttggaatcagctag

SEQ ID NO: 14554 - DNA, 5436 bp, Oryza sativa
  Clone ID: TFbOSC100811j.C1.o5.fg
atggaggaaaaatactctgcgaaaccatttgttttcgatggacacaattttgtcatttggaaggcacgaatggaggcctacctccagtcgcaagggcataatgtgtggaataaggttaaatcaccttacactatgcccgatgatgctgacatcacgcctgcaaatgtggctcaagttgattttaattatcgtgcaagaaatgcaatcattggtggaatttcttctggtgaatttaatcgtgttcaacaccaccagtccgctcatgacatgtggactgctctgtgcaatttccatgagggaaacaatgatattcaattggttcgtcagaatcaatttcataaagaatatcaaagatttgagatgcacccaggagagtccattgattcttatttcaagcgttttgaagaaattgtttcgaagttgagatctgttggaaaagaattttctgataatgataatgctcgccatcttttgaattgtcttgattatggtgtttgggaaatgaaagttacttccatcacagagagtgcacctctgagtgaccttaccatggacaagctttactcaaagctaaaaacccatgagatggatgtcttccatcggaaaggcctcaaacactcgatggctttggtagctgatccctctggtagtacttcttctaatgacttagcttttgtgtgtggtggcttctctcttgccgctttacactcagtcactgaggagcaattagagaagatccctgaagatgatcttgctctttttactagaaaattctcaagagcttacaaaaatgtgagagatagaaaaggaggaaaaaccaatgaaccatttgtgtgttttgagtgtggagagcctaaccacataagagtgaattgtcccaagttgaagaagaagagtgacaagacaaccaagaagctcgagggacaagggcgaaaggggaagaaggatttgataaagaaggcgatccacaaggtcttggcggctcttgaggaggtgcagcttagcgacatcgactccgacgacgatgatcaagaaaagggggacaaggacttctccgggatgtactgtctcgccaacaacgaggacttcatcaacctgtgtctcatggcacttgaggataaggatgactcatcggagcatcatgaggtatgtcttgatgatatcccttccttggatggttctctttgtgatgattcttgctcagataatgactctgttgatgatgaactaagcaaagaaagaatgacacacttgatgattgaaattagtgacaagtataggtcttctaagtataaaattgagaaactaaaatatgaaaatgatggaatggcgctagaaattgctaggcttcgatccatgattcctgaggaggatacctgttctacttgtgcttcatatctttctgaaattaatctcctcaaggataagttgaaatcatgtgctttaggagctgggaatccttctagtgctagtgctgcttgctctacttgctatgaaatgaaagttgatatgagtttgcttgagatggaattgaaagaactaaaagaaaattttgttcatgataggataagtagttgtgaaaattgtcccattctcactagtgacaatgatgaattaagacaacaagttgacatgcttaggaccaagaatgatttgctagaatcttatgctactaaggagcctgttcattcttcatgtgctaattgtgttatcctggaaactgaactaaaagatactaaaattgtcattgattatgtcaaatctgttgattcatgttcatcatgcatttctctgaaagttgatcttgagtccgctaagagagagaactcgtacctacaacaatctttagagaggtttgctcaaggaaagaaaaagttgaacatgatcctagaccaatccaaagtgtccataaacaatcaaggtataggctatgattttgctgagtctttgaggataggtacccatgagattttaggtgtcacagatgggatgatagaactagctcaaaaacctataaccttcaagtctgcaggtttcattggaaacactagttctagtacacccaaaacctcagaaccaaagatggtacctatgactagcaagtctaagtctgtagagttacctagacccaaaaatccaaaacaagttgagcacaagcaaaaccagaaacaaaccaagcctgtagagaaaaccaagtatgagtgcacctattgtgggaaagctggtcatttggtaggtttctgctttagaaaggctagaaaaaagcgacaagaacgtcttaggactagaagagctgctagagtccctgagaggttcgagtgtgcgtgtcattgtcattcaagtggtgtatctcgctttcctcgccgagatgtgcaccctcgatgtgacctagcagggttggggcaaaacagacatggtcatcttgcatataattatgctcataacactaaagatgcttgtactcctcgcatggattttggagtggggagaagtaattcttggcttgtagactccggttgctcacgccacatgaccggtgaagccaagtggtttacttctctcactcgtgcatccggtgatgagaccatcacttttggggatgcgagcagtggacgcgtgatggctaaaggaacaatcaaggtcaatgacaaattcatgctaaaggatgtcgcgcttgtaagtaagcttaagtacattttgctctctgttttacaactctgtgatgaaaatctggaagttcgtttcaaaaaggacaggtctcgagttcttgatgcttctgaatctcctgtttttgacatttctcgagttggtcgagttttctttgctaacttcgactcttctgctcctggtccttctcgttgtctcattgcctcagagaatagggatttgtttttctggcatcgacgtcttggtcatattggctttgaccacttgtctcgcattagtggtatggatttgattcggggtttgcctaagttgaaagctccgaaagatcttgtgtgtgcaccatgtcgtcatgggaaaatgacatcttcctcccacaagcctgttacaatggttatgacagatggaccgggacaactgcttcacatggatacggttggtcctgctcaggtccagtcagttggggggaagtggtatgtcttggttgtagtggatgatttctctcgctactcttgggtctattttcttgaaacaaaggaggaaacatgtggcttctttcagtctcttgctcgtagtttggctttgcagtttcctggtgctcttcgagccattcgcagtgataatggctctgaattcaaaaattctgcatttgaatctttctgtgattcttctggagtcgaacatcagttttcttcaccatatgtcccacaacagaatggggtggttgagaggaagaaccgcacccttgtggagatggcacgaactatgcttgatgagtttacgactccaagaaagttctggactgaagctatttctactgcttgttttatctccaatcgtgtgtttttgagaactatcttgcacaagacgccatatgagctcagatttggtcgtcgaccaaaagtttcacatctcagggtcttcggttgcaaatgctttgttcttaaatctggaaatttggacaagtttgaatctcgatcattggatggcattttccttggctatgctactcattctcgggcttatcgagtttatgttctttcaactaacaaaattgtggagacttgtgaagtcacttttcatgaggctagcccaggagctagaccagaaatttcaggtgttccagatgaaagcatctttgtggataaggattcagatgatgatgacgatgattccattcctccacctctagacagtacaccaccagtgcaagaaacagcatttgttgcctcttttgagcccaaaaatgtttgtcatgctttatctgatgagaattgggttaatgccatgcatgaagagttagaaaattttgaaagaaacaaagtttggtctttggtagaacctcccttgggttttaatgtgattggaacaaaatgggttttcaaaaacaaactaggtgaagatggttcaattgttcgaaacaaagccagactggttgcacagggtttcacccaagtcgagggcttggattttgaagaaacctttgcaccagttgctagattagaagctattcgaattcttttggcttttgctgcttcaaaaggtttcaagctttttcaaatggatgtgaaaaatgcttttctgaatggtgttattgaggaagaggtctatgtcaaacaacctcctggttttgaaaatccaaaatttccaaatcatgtgttcaaacttgataaagctctttatggtttaaaacaagctcccagagcctggtatgaaagattgaaaacctttttgcttcaaaatggttttgaaatgggggcagttgataaaactctctttactcttcatagtggcattgattttcttcttgtccagatatatgttgatgacatcatatttggtggctcttctcatgcacttgttgcccagttttctgatgtgatgagcagggaattcgaaatgatcatgatgggagagctgactttcttccttggacttcaaatcaagcaaaccaaggaaggaatctttgtacatcagaccaagtactccaaagagctcttgaagaagttcgacatggccgactgcaagccaatcgccactcccatggcaactacttcatcgcttggtcctgatgaggacggtgaagaagttgaccagcgcgagtacagaagcatgatcggctccctcctctacttgactgcgtcaaggccggacatccacttctccgtgtgcctgtgcgcaaggtttcaggcttctccaagaacatcacatcgccaagcagtcaagcgcatcttccgctacatcaagtctacacttaagtacggtatttggtactcctgctcttctgccctttcagttcgagctttttcagatgctaattttgctgggtgtaagattgatcgcaaaagtacttctggcacttgtcattttcttggcacttctttggtctcttggtcctctcgtaagcagtcttctattgctcaatcaacagctgaggctgagtacgtagctgctgctagtacatgtagtcaagttctttggatgatttcaactctaaaagattatggtctgtctttctctggtgttcctttgctttgtgataatataagtgcaatcaatattgcaaaaaatccagttcaacactccaggaccaagcacattgagatacggtaccactttctccgagacaatgttgagaaaggtaccattgtgctagagtttgttgaatctgaaaaacaattggcagacatttttacaaaaccacttgatcgctctcgttttgagttcttgcggagtgagttaggggtgatccacccctatggcttgatttga

SEQ ID NO: 14555 - DNA, 3021 bp, Oryza sativa
  Clone ID: TFbOSC28501j.C1.o1.fg
atggtgaagacaaggaatggttcccgtgactccaacaacgccagcggcagcggagagcaaatcaatggaccacgtgccagcggtgcatctgacagcagttcatctccaccgcccgagaacccaacgattgctcaggtgttggacaatcagactcagatgatgacaatgatgatgcaacagatgcaacaacagtaccatcaggtgttgcagcagtctaagctgttagagtttctccgtgtcaagccaccgactttctcaggcaccaccaacccaatcgaggccaacgactggcttcatgctattgagaagaagctgaaccttttgcaatgcaacgaccaggagaaggttgcttttgctacacaccagctgcaaggtcccgcttctgtttggtgggacaactacatggtgacccgtccagctgggacagaggttacttgggcagagttttgtaagagtttcaataaagcacaggttcccgaggggattgtggcacaaaagaagagagagtttcgttctctgcaacaaggaaccagaacagttatagagtatttgcatgagttcaaccgccttgcgcgctacgctcctgaggacgtgcgcactgatgccgagaggcaggagaagtttttgtctggtcttgatgatgaattgaccaaccagttgatctctagagattatgaggactttgagaagcttgtggacaaggctatccgtcaagaggagcaatgcaacaaaatgaaccgtaagaggaaggcagctcagctcaggactccccaggggaagagtcagaagccttgcttcacgatgggacatcaaggtgaaccttccaccatgattatccggcagcaccgtccctaccacccgggtagcttcaacaagaactacaagagtggcagtcacagcaacagtgagcagcacagcctcaaccctactccaagtccactaatgattccagctcagtcagttcagtcagctctgccagctcagccagaacagcccaagaagtttggagaaaagcccaaactctgcttcaattgtaacgagcccggacacatggttggtacgtgcccgaagccaagacgtgccagactcaagttcgttcaggcccatgtcaatcatgcatctgcagaggaggcgcagtcagcaccagaggttatattgggcacatttcccgtcaactcgacaccggcagtaatattgtttgattctggtgcaactcattccttcatttccaagcgttttgctggtgcacatgggttatctttagtgaagcttaagatacctatgcgagttcatactcctggaggtggcatgaccacatctcactattgcccatccgtgacagttgaaattcaagggttgatttttccagccaacctcattcttctcgaatccaaggacctagatgtcatacttggaatggattggttgacaaggcacagaggagtgattgattgcgctagccgcaccatcaagttgaccaatgcgaaaggagaagtggtaacagtggagaaaaccactaagaagttggaggatattcccatagctagagattatccagaggttttcccggaggatctaacaacaatgccaccaaaatgggatatcgagttcaagattgacttggtacctggaactgcaccgatccacaagaggccttacagaatgggagccaacgagttggcggaagtcaagaagcaagttgatgaacagttacagaagggatacattcgcccgagcacgtcgccttggggtgctccggtaatttttgtggaaaagaaagacaaaaccaagaggatgtgcatcgactaccgcgcactcaatgaggtcactattaagaacaagtaccctttgtcaaggattgatgatctgttcgatcagttgaaaggagctattatgttctctaagatagacctgcgatcaggctatcaccagttgaggatccgtgaagaggatattccaaagacaacattcatcactcgttatgggttgttcgaatgcacagttatgtctttcggactcaccaacgcacctgccttcttcatgaatttgatgaacaagtccgaggaagaacatgaacagcatcttcggttggtgcttgaaaagctaaaagagcaccaactatatgccaagttcagcaagtgtgacttctggctaaagaaagttcagtttcttggtcatgtcgtaagtgctcaaggagtggctatggatccaggaaatgtggagtcagttaccaagtggaccctaccaaggacggtcactcaggttcggagtttcttaggacttgcgggctattaccgtcggttcattgagaacttctctaaaattgccaagccaatgacacagcttctgaagaaggaagaaaagtttatctggtctgctgaatgcaatagagttttgaagaactcaaacgacggcaactacctgacccatgatctggagttagccgcagttgttcatgctttaaagatctggcggcactatcttatcggtaaccgttgtgagcgaagatggttggagctaatcaaagattataatatgggaatacactaccatcccggcaaggctaatgtggtagcagatgccttgagcaggaagagctactgcaatgttgcatgggtagaaaaactatgttgtgaggttcaacgcgatttggaacacctgaaccttggtatagttgagcatggattcgtggctgccctagaggcacaacccacacaggtggagcaggttcgcatagctcaagcaagtgatcctgagatagcagaactcaaaaagaacatgagggttggaaaagcccgaggttttgttgaggatgaacaagggacaatctggatgggagaaagattatgtgtacctgaaaataaggagttaaaagacctgatactgacaaaagctcatcaaactcagtattccattcatcctggcagtaccaaaatgtaccaagacctcaaagaaaagttctggtgggtcagcatgagaagggaaatagctgaatttgtcgcactctgtgacgtctgttag

SEQ ID NO: 14556 - DNA, 5166 bp, Oryza sativa
  Clone ID: TFbOSC900160j.C1.o4.fg
atggagggcatgcggtggcaccgagttgttactgtagtatgcattccaaatgagcttcacccaagcagcagcaggagtaccgtctctaatgtttttcctgcattggagtctctgaagttcagggacatgggagcctgggaggaatggtcagaattcaaggatgaacacttcccacagctcaagtatctcagcattgttaggtgtgcaaagctgacggtgctgcccaacttcacttcaggaccaaaacagagaatcaggagttgtgagaaactgctccagcctctatgtcagaatatacggcggaatttgatgaagtacataccaccaccaagtgaactgtcatatgcatgcatggcagaaggttctaccccctctttcttcttcttaagagatattttacggtgtatgcattccaaaaagggtaaagatccaatgctcctcaatcacaggtaccatgttaaagaactaccaaatggtaaaatcccaatcaatcctaaatgtgtcaacattgtgtttggtatccctcgtactggagtgactataaaaccaaacaatccaaagcatgagtttatcaagatactaaagcacttgtttagggtttcatcgggtactcaaatttctgttcaacaattacaagtgcatttgaaggagatcattgccccaacaacatcaaaccaacctagtatgcaatatgccaatgtttgcttggatgttaacaacattgcaaagtacaattgggctgaggacatgctttcaactataagaaatgcagtgctgcagctactatatttagattatatagatgcatctggatgtaatgtgccatggggagagcctagggtggcattttggacagatcaagcagcaaaaccattgaaaaatgctgatatgggatctgggctttatgcagtttatggatcatgcaaggacagcatctactctttaagcatattttcagttactaggacagctgcggtagaggttgagaccttgcgcagcagcatcaacggctccatcgccggcgacatcaccgccgacaaggagcttgaggagctggcaagaggaagggcacgggagcgggcagagcggtgggcagcagcccacctccacggcggcggcggcggcggcggcccaagggaccgcgcgcccgctgacgggaacccagacgggcgcgggcgtgccggcggcatcccggagcccgcgcgcggccctcgcaggcagcgcggctctctctcccctgaccggcgccatggccaccacggcgtccagacggtggtcagggactttggtcccgggggtgggtggcctaccctcaccaaaaccaactacatcgagtgggacgcggtgatgagggtgaggctccaggtgcggcacatgtgggaggcagtctggtacggcgacgtcgactacgacgatgatcggcgggcactggatgccctcatcgctgcagtcccgcccgagatgcagttctcgcttttccagaagcggattgccaaggaggcctgggacgccatcgctgcggcacgcatcggcagcgaccgcgcccgcaagtccacactgcaggcactccgcaaggagtgggacaacctggccttcaagccaggtgaggataagatggtgcagtacggcgatgacacctacgacgaggagagagctgtcgagaagctcttccgctgcgtccgagagaattacaggcagatcgctcgctcgatcgagtctctgctggacctctccacaatgtcgatcgaggaggcgttaggtcgcctcaaggtcgtcgacagtgatgagccacagcctctctcggggcctatcaccattggcgggaagctccatctcactcaggagcagtgggaggcctctcagggtgacaagaggaagggggagtcatcttccccgacaggcggccgcgcccagggcggcgccaccggcaaccacaagccggcacgagacgacgcttgtcgcaactgtggcaagcttggccattgggccaaagaccgtcgacagccacgacgcggccaggcccacgtcgcacgggtggaggaagagccggctctgctcctggctcacgcaagcatcgagctacctccagcggcaccggccgcagcggctttcctccaccttgatgagccgaaggtactcgtctccctctgcaacggctccagcaacaacaaggctgatgggtggtacctcaacactggcgccacccatcacatgaccggccgacgggagttcttcaccgagttcgactccagcgtccgaggctccgtcaagtttggggacgcctccggcgtggagatcaagggcgttggctccgtcaccttcaccgccaagtccggtgagcacaggctgctcaccggagtctactacatccccgcgttgaggaattctatcatcagcgtgggacagctaaatgagaacggctcacacgtgttggtcgaggacggactcatgaggatttggaatcgccgtcgtcgccttcttgccaaggtaaccagaggcactaatcgactctacatcctcagcgcacaggtcgcacaaccagtttgcctcgccgctcgtcgggacgacgaggcgtggcagtggcacgagcgcttcgggcacctccacttcgaggccctaaagcggctcagtgccaaggagatggtgcgagacatgccgagccttgaccacgtggagcagctctgcgacgtctccgtggtaacgaagcagcggcgactcccctttccccagcagacgagcttccgagccaaggagcggctcaagctcgtgcacggggacttgtgtggcccagtgacaccggccacaccaggaggacggcgttacttcctgctgctcgttgacgacctctcctgctacatgtgggcggagtgcggccgcaagctgcgcgtgctgcgcaccgacaacggcggcgaattcacggcggctgaattcgcgtcgtactacgctgatgagggcattcagcgccactacaccacgccgtacagcccgcagcggaacggcgtcgtcgagtgtcgcaaccagacggttgtggggaaggctcaggctctcctcaagcagagggggatgccggccatcttctgggggaaggcggtggtgacggctgtctacatcctcaaccgctcgtctaccaaggccctcgatggcaggacaccgtacgaggcttggcatgggcgcaagccggcggtctcccacctgcgggtcttcggctgcctcgcgttcgccaaggagcttggccacatcggcaagctcgacgacaggagcaccccaggggtgttcatcggctacgcgaagggctcgaaggcctaccgcatcctcgacccggagacagcgtgtgcgcacagcgcgcgacgtagtgttcgacgaagggcgagggtgggtatgggacaaggtggtggacgatggttcgactccgacgtacgacgacttcaccatcaaccggcgaccccacgcgctccagcaccaacagccactcctccgagcacgtctactccgacgccagctcgtgttgagcgcagctcggtggagttcgctactctgctttcccacgacggggagcgcatcgacgcgtaccacgacggcgagcagctacggtaccgtacgatgaaggatcttctcggcgaccagccggtgccgggactggtacctcgcgacctagaggcgcagttgcaccttgcgtgcgacgacggtgagcctcggtctttcacagaggccgagaaacacgcggcatggcgtgccgcgatgcagtcggagatagacgcggttcaggagaaccgcacctgggagcttgctgacctccctcgtggtcaccgcgcgatcacccttaagtgggtgttcaagctgaagagggatgaagccaaagccattgtcaagcataaggcccgcttggtggaacgcggtttcgtgcagcaggaggggatcgactacgacgatgccttcgctcccgtggcacagatggagtccgtgcgactccttgcgctggctgctcaggagggctggggcgtccatcacatggatgccaaatcggtgtttctgaacgacgacttgaaggaggaggtctacgtgcaccagccgccgggatttgtgatccccggcaagaagggcaaggtgctacgcctgcacaaggccctctacggcttacggcaggcaccgagggcgtggaatgccaagttggattccacgctcaaggggatgggcttcgagcaaatggaggaaatgccttgctggtgggatgtggaggtcgcagcgttcaaggaggagatgaaggccaccttccagatgagtgatctagggcctctctcctcctacctggggatcgaggtgcaccaggacgactccaggatcacgcttcgacagaccgcctacgccaagcgcatcgttgagctggctaggctcaccgattgcaacccagctctcactccgatggaggagagactgaagctgaaccgcaatagcatgacggaggaagtggatgctacacagtaccagcgtcttgtggggagccttcgctacctcacccacacacggccggacttggccttctccgtcggctacgtcagtcggttcatgcagcgaccgacgacggagcaccagcaggctgtgaagaggatcatccgctacgttgcggggactctcgaccacggtctctactacccgaggtgtcctggcaaggcacacttcgtcgggtacagcgacagcgaccacgccggcgacatcgacactagcaagagcacgagcgggattctcttcttcctcggcgagtgcctcgttagctggcagtcggtcaagcagcaggtggtggccctgtccagctgcgaggccgagtacatggcagcttccgccgcttcgacccaggcgctctggcttgctcgactgcttagtgatctcctcggcagagacactggagcagtggagctcagggtggatagcaagtccgctctggccctggcaaagaaccccgtttttcacgaacggagcaagcacatccgggtgaggtaccacttcatccgaagctacttggaggaagggagcatcaaggcgagctacatcaacaccaaggaccagcttgcggacttgctcaccaagcctcttgggaggatcaagttcctcaagcgctgctccaggatcgggatggcccaacttccccacaagacgacacacaagacttag

SEQ ID NO: 14557 - DNA, 2799 bp, Oryza sativa
  Clone ID: TFbOSC15292j.C1.o1.np
cctctcaaataattattgatgctataactgtcggtattctcgggcctgtgtacctactgatgcggacatcactacctcggatacacacaacaatcctccaacggtcattcaaggaccgataacaagagctcgaacaatggaggggacaaggagacacttggagaaggacttagagccatggaggatcatctgggacgtccaagtcaaggtggaggcccaaaccaagtcgacgtcgggtgcaattcggagtccaggaccagtctgcactaaaacgggcgcccagcattactatctgtcattggattgtgtaccactcatatacatatatttggccttcctagctccacatattacttctgcacagcacaggttcttgatccctgcaatcgctgactacgccttctaggtatcctttgctttgctgactcaaaaggacatcacggaggccgttgcaaagtctgttcaagatgccttcactaaaatcggtttcctgaaccacatggagaggttggacaagcggatatccacgctatctgatcaggtcgccgcgttggagacaccttccaatgaggaagtggtgagtggtgacgacgatgctcatcctgaagacacggtgtatgattccagtggctatattgatgcactggctacaaggcaagcatggctacgacatcgcctacgcacaaaccgcacaggtatgggtggcactcgccaccaacaaggtaataataataatcatgtgcccgatgatccttatgctaaggttaagtttaaaataccatctttttcgggatattatgatgctgagaaataccttgattgggagatgacggtagaacaaaagtttaatgcccaccttgtacccgagcaacatagagttagacaagccagtagtgagttcaaggattttgctattatgtggtgggctgggttatctgatgagggggtactacctactgcttgggaagaacttaaggtagctatgcgcgataggtttgttcctccatcttatcatagagatttacgcaagaaactgatgcgtttggaacaaggggataaatctgtacaggattactatggtgagctacaaaagggtttgtttcgatttgttatgcttgcagagaaggaattacaggggtgcgaccatcagggcaagagcaaggcaagcacatacactccgcgcacgacgccatctgcgggactgcccaaggccatttcgtttcgggcatccttccagccagcgggcaagcgaccagcagcattcggagcttctgcggcaccaaaaccatctccaccaccacgaccagcagagtcaggtaaaggatcctcgcaggtacccgccaagagtgcctcatatgtcgcctcgacgggacgcattcagtgccaccgttgttaagggtttgggcatgtgcagaaagattgccctagtcaacgggcctatgttgctacagaagatggctacatcaccacctccgacgtggaagaggaagaggaggaagaagaagttgaggatgaggatggcgaagctttggtcgtgatgacacaacggactacagaaccatcattgtgcagcgggtgctcagcacgcagattttctttgtcatcaacaaccgtcgtgcacgtgtgatcattgatggaggaagctgcaacaacttcgtggttaaacgattccggaagagcaaagattctgttgattgcgatgtggttcctatgcaagcttgttcacttttgttgggccgtccttgggaacatgataatgatgcttcacaccatgcaagtggctaaaactgtttttccacctaaaaaggataatctttcacctagttctaaggctaagggaattaagtcgaagggtggtgttatgcttgcaacgaaatgtgacattgctgaaaattcagatgatgatatgtgctatttcttgatatgcaaacaagccttggtttctttagatgatattgctagttcgatacatcttgttgttactaaccttttacaggagtatgaggatgtctttccagccgagatacccccaggattgccaaaccgtgctgcttatcgaactaacctagaggagactaaggaaattcagcggcaagttcaagaccttttagaccacgggtatgtacgtcaaagacttagtccctgtgcagttcctgtaattttggttcctaagaaagatggttcttggcgaatgtgtgttaattgtagagccattaataatattactatctgatatcgtcatcctattcctaggttagatgacatgcttgatgagttgtgtggctctataattttcacaaagattgacttgcgtagtggctatcaccaaattagaatgaaacttggagatgaatggaaaacagcttttaaaactaaatttgggttgtatgagtggttagtaatgccttttggtttgattaatgcacctagtactttcatgcgcttaatgaatgaggttttaaggccttttattggacgatttgtggtagtgtactttgatgacatattgatttacagcaagtctttgaatgaacacatggatcatttacgtgctgtttttaatgctctacgcgatgcacgtttgtttgctacccttgaaaagtgcatcttttgcacggaacgagtctcctttcttggatatgttgttactccacaggggaattgaggtggatgagtcgaaaattgaagccataaggagttggccggttcccgaaaccatcacacaggtgaggagctttcttgctctgtgtgatcctagccgctccgccgccactcacggttgtcggagtaacacttccg

SEQ ID NO: 14558 - DNA, 7056 bp, Oryza sativa
  Clone ID: TFbOSC18058j.C1.o2.fg
atgtcatggcacagggccggtgtcctgctgctgggggctcagtcctgcctacctgtcccgggggttccggccgtaggtggggttgggtcggtactcttgtttatggctaggatgggttgggaactatgtcacgtcttccgtccgtataccgtggtgatgtttaacagagaaaaaggaaagaatgtcagcgggtatgcctcaagtaactcaagttttcaactcaatccaccactggcctcaagagagttaacaagggcacacccttggtccattccgagtatgctgcttagttcacagctaccattggttcgaagtcaagaccagaatcagtgtgtgtttgatcgagcatttgccacccaggtcaatgagcctccaatgccaaaagagcatgtccccttttgtcatgattgtagagagcaaggacactatgccctgaattgtccatgggtatatgccaaagaagccccttcctttggtttaacagggcagacatcgctaaaccagcctcctcgcaccaagtcaagcttgcagcctagtgtgcaaagtagagagcccaatggagagaatccattgaatcccgggaaatgctttcctcctagcctttcgtaccacgtggggtcacgtactaagcaagccaaaggcaagaagagtaagaatcagaagagaaaagcgtcgatgcgaactgaagaagaagtacgtaagatggctattagcagcaccgaatggcctcccgcagggataactattcctagacgtcaaagaggaaataccttccgaggtgcacgacagttgacccagcacctcctaagccatggtggcagagtatctgatagtgaagggtcagatcaagtctcctcggatgatgaagatgagtctccccgacatctcggtgaggaagagatggaatcaaaggcatgcacccgttgtggagaaattggacacattgctagcaggtgtctcacactctgccctcgttgtgaagaagaccatccaccaggggagtgtcccacccgcaaggtttctctgaaaggcagcaggctcaagtaccacatcgtcaccagaagcatccacaactctcggagtgaaaagtacttagttgacaaaggtcgaaaggtgatcaagatgtttaacagagaaaaaggaaagaatgtcagcgggtatgcctcaagtaactcaagttttcaactcaatccaccactggcctcaagagagttaacaagggcacacccttggtccattccgagtatgctgcttagttcacagctaccattggttcgaagtcaagaccagaatcagtgtgtgtttgatcgagcatttgccacccagatggatcgacaatggatgtacgctgaccggcggtccaaagagtttattgacggcgtgcactattttttgagagtggccgaagctaacaggcaaaggggttttatttgttgtccatgcaataagtgtaagaatcagaaggagtattctgcatacaggactattcatttccacttgtttgagtcggggttcatgccaagctataattgttggacatcccacggagagcaaggtgttgaaatggaagaagatgaagtggaagacgacaatattccggactttgctcagtatgttggatttgaaggaaatcaaacgggcgaggaggaaatagctgctgatggtaacgacgttgcggatgatcttggtcagatgttgcaggacgccaaggaggtctgcgaaagtgaaaaggaggcccataaattggacaagatgttggaggaccacagaacttcgttgtacccaggttgcgagcaggggcacaaaaagttggataccactctggagttcttgcaatggaaggcaaaaaatggggttagtgacaaggcatttggcgatttattgaaactcgtcaagaacattcttccggagggaaacaaattgcccgagacaacgtacgaggctaagaagatagtctgcctgctaggactggaagttcagaagattcacgcatgtccgaatgattgtatcctatatcgcggtgaggagtatgagaacctagaagcatgccatgtttgcaaagcactacgatacaagattagacgagacgatccaggaaaagttgacgggaacaaggggaatgctagaatgatgcggtggcacactgaagagcgtcaacaggacgggatgctgagacaccccgccgatggttcgcagtggcgaaacatcgacagaaaatttaaagaatttggaaaggacgcacgaaacatacggtttggtttgagtacggatggcatgaatccttttggagagatgagcagcggccatagcacttggcccgttacgatgtgtatctacaacctccccccctggttatgcatgaagaggaagtacataatgatgtcgattattattcaaggccccaagcaacctggtaacgacatcgatgtgtacctaagaccactggtcgaagatcttaaactgttgtggaagaaggaagaaagtacgtatcttaagcactgtaggaaggttgtatacatgggtcatcgtcgattccttgcagcaaaccacccagtacggaagaaaggcaagcacttcgaacataaggccgaccaccgtacgaagcctaaacatcgcagcgggaaaacagtgttcggaaaggggcctggaagccagcctatagagagcgaagatggtcacgcggcgatgtggaaaaagaactctatattttgggagttaccatattgggaattcttggacgtacgccacgcaatcgacgtgatgcacctcactaagaacctttgcgtaaaccttcttggcttcctaggtgtatacggaaagtcaaaagatacactggaagcacgtaatgatctaaagcatatggaacaacgaggcgaccttcacccggaaccaaaggagaaaggaagtcattacttgagtgcagccagctacactcttagcaaggcagagaaggaaagtatgtttggatgcttggagagcataaaggtaccatctggatactccacgaatatcaagcgaataataagcacgaaggagaagaagttcacaaacctaaagtctcatgactatcacgtgttgatgacacaactgctaccagttgtaataaggggtatacttccagacaatgtccgggcaacaataacaaagctatgtgcattcatgaacgcaatttcacagaaggtcatcgatccggatagattagaagcccttcaaaatgaagtggtgcaatgtctcgtcagttttgagttgatatttccaccttcatttttcaatatagtgacgcatctgctttgtcaccttgtgaaagagatcagtattctcgggcctgtgtatctacacaacatgtttcctttcgagaggtacatgggcgttctgaagaagtatgttcgtaaccatgctcgtccagaggcaagcatcgccaagggttatggaacagaggaggccatcgaattttgcatagaatttatcgaagaccttcgcccaatcggggtacctgaatcacgccatgaggggagactacggggaaagggaactctcggaaggaaagcaataatgacggtagacaacaatttattccgcaaagcccatttcactattctgcaacactcttcattggtagctccttacaacgaggagcacttggctctagttcgcgccaggaacatcgcccaagacatgaagagcacgaaccaaaacagcgctgttcgtgtcgatgccatgggacacgatggaacaactgccacgtattacggtgctatcgaggacatatgggaatttgactatggtcctctcaaggttcctctgttccggtgccaatgggttaggttgactggtggaggcgtaatgattgatgacagtgggatggcaactgttgaccttaacaaggttggatactcggacgaaccttttgtccttgccaatgatgtaacgcaagtctttttcgtgaaggacatgtctagcaaaggaaagaagggcagagggcctgacgagcctaagcgtcaagtggttctcccaggcaaaagaaaaatcgtcggagttgaggacaacactgacgaggattacgatcagttggatgggcaaccccctttcacggtgacgattgaccctagcatcctcctatcaattgaagacaccccttactcatatagcgatcacaaggagggaacaatagtgaggagaaaatggctgaccgcgatgagtaacagatattatacgtacttgaatgaggaagggaacgtggagagggatgcggaggggaaccagcaggggcacgtggaaagggatgtggaggggaaccaggaggaggaggctagtggaagtcaaccctccgttggacagaagagggcacgcgggcaacgaggtgcagcgaagaagcttgagggtcggcacatcataacggaagtggaagaagatggacgtcctagtgccccggccgaagctgccaagaactatgtacgtcacagcggttgggttgtgcgggataacgtgcctatcagtacggtgtactggcgaagaacaagggcacgcggagatcatgagagctttgtcctagattcggagaaagagatgctgtggaccacaatgctcgagacattcacccttcctgcgggtacagaggacaaagtgaaaaggtggactctgaagaaaatggcagaacagtttcagagcttcaagggagatctgtaccagaagtatatcctgaaggggcagacaccgaacttcgacacattcccaaagctaagggatcactgggacgagttcgttgtatataagacaggtgaacaagggcaggtgatgatggaaagaaacaaagaaaatgccgccaagaagaagtaccatcaccacttggggtcaggaggctatagcgtcgcgatgccgaagtgggaggagatggaggctagcttgcttgagaggggtatcgaaccggcaactgctaattggccgaaacgatcgaagttctggtactatgctcacggtggaacgctcaacccagctgatggctcactggtcttcggcgatcagatacgagaggctgcgcgacgactaacagatgtagtggaagcctcctcacagggcacattccaaccggacagagatagggacgagctgacactcgccctacagactccagagcatctaggacgaacacgagggaaaggggtgattccttggaagattggtttcaaggaggacatccagacgtacaggagtcggatgaggagcaagagagataccgaggcgaagattgcagatttagagtcctgggtatcgagctatgagctcaacatgcaagaggaggtggcaaggaaggttgatgaacgcatggccgcacatcggtcccatgatccccagccgaccattcctcctgcaatgttgagcccgtcaggaaaccatagcagctacgcctcaacggggcaagtaggatcacagagcatggacgccatgcaaacccaggatgaatcgacctgtcctgttgatgacatcactcagcggacaccatgtgagctgtatattcctttcaagaacttatcaataaaggtggcgtcgggcatggccatcccaacggacccttcaggtacttaccactgcaggccgattccagcaggatactcgaaggtcgaagttgagttggtcgaaggagcgtacgaggacctcgagctagattaccctggaggagacggcggtacatcatcctccctgggcgacaagcggcgtctcatggaccatctcctccggctccgccatctcctcctcaggatcctgcaccgtctcctcctcatgctccgccagcaccgtctccacttcaggctccagcaccgactgctcctcaggctcctgcaccgactcctcctcgggctcctacacctactcctccgcaagctcctcttccggcaccttcaaagtcaagggccccctccagctccaccgcctgcccacacaagggcaacaaagaaggcgaaagttgacgccgccaagaacaaggacccggggtacgattgcacgcaagaggagcttgacgtttacgtggcatcagaagtcaagagacaattcaagcctcgaagtccagaaaagaagattcctatagacccgagtgtcaggaacttcttcaggggtatgtctgcacctgtcaaggaggccatcaagctatcggactatgagcgaacgctgaagaaagcatcttctggaaagtccaaaccagtccctcagcttggagagcaaccaaaccatgatatcgagccgttggtgaccggggaagacatgacgatagaagaatttattactgacaccggtctaactacggatcaattgctaggagtcgaaccaatagaaaaggcggaagtgaaatacatgtacaaactcggcaaaccgcttgtcaagcccgagctggtgcagtccctacccacacaaatgtacaagttccatcagctgtacatggagatgagcgccaccggtagagagatgatcggagcgaggatcagggacccggacttcttgcaaggagatgacattctctggatcaatttcaagggaatctacgaactataccagctggacgccctcgacgtctctattatgagttgctggattttattccactgggtgcttttactcttcgacctgtcggcctgcaccgtcaacgtatatgactcaatggataaaaaagagtctacgtttgacaaggttttcgaacttatagacagggcttggtatcagttccgtcatttggtccgcggcaactggagagaaagacttaagcggaagttcaaatttccttgcgcaaagcaaaagcagggaactaacttgtgcggctactacgtgtgcgagtattgccactgccttgtagaccaaatcatcaccacaagagagctcgattttattcgcatgagggataacctgaccacacacaaggaatttatcgcggcggttcaagaacaactcatgggattcatcaacgaagaaatccttgatcccaagggtgaattttactacgacggaaacacaattcataggtccttagcttctgagctagtgactactactacgtcgaaatcgtag

SEQ ID NO: 14559 - DNA, 2797 bp, Oryza sativa
  Clone ID: TFbOSC401958j.C1.o2.np
cctctcaaataattattgatgctataactgtcggtattctcgggcctgtgtacctactgatgcggacatcactacctcggatacacacaacaatcctccaacggtcattcaaggaccgataacaagagctcgaacaatggaggggacaaggagacacttggagaaggacttagagccatggaggatcatctgggacgtccaagtcaaggtggaggcccaaaccaagtcgacgtcgggtgcaattcggagtccaggaccagtctgcactaaaacgggcgcccagcattactatctgtcattggattgtgtaccactcatatacatatatttggccttcctagctccacatattacttctgcacagcacaggttcttgatccctgcaatcgctgactacgccttctaggtatcctttgctttgctgactcaaaaggacatcacggaggccgttgcaaagtctgttcaagatgccttcactaaaatcggtttcctgaaccacatggagaggttggacaagcggatatccacgctatctgatcaggtcgccgcgttggagacaccttccaatgaggaagtggtgagtggtgacgacgatgctcatcctgaagacacggtgtatgattccagtggctatattgatgcactggctacaaggcaagcatggctacgacatcgcctacgcacaaaccgcacaggtatgggtggcactcgccaccaacaaggtaataataataatcatgtgcccgatgatccttatgctaaggttaagtttaaaataccatctttttcgggatattatgatgctgagaaataccttgattgggagatgacggtagaacaaaagtttaatgcccaccttgtacccgagcaacatagagttagacaagccagtagtgagttcaaggattttgctattatgtggtgggctgggttatctgatgagggggtactacctactgcttgggaagaacttaaggtagctatgcgcgataggtttgttcctccatcttatcatagagatttacgcaagaaactgatgcgtttggaacaaggggataaatctgtacaggattactatggtgagctacaaaagggtttgtttcgatttgttatgcttgcagagaaggaattacaggggtgcgaccatcagggcaagagcaaggcaagcacatacactccgcgcacgacgccatctgcgggactgcccaaggccatctcgtttcgggcatcctcccagccagcgggcaagcgaccagcagcatccggagcttctgcggcaccaaaaccatctccaccaccacgaccagcagagtcaggtaaaggatcctcgcaggtacccgccaagagtgcctcatatgtcgcctcgacgggacgcattcagtgccaccgttgctaagggtttgggcatgtgcagaaagattgccctagtcaacgggcctatgttgctacagaagatggctacatcaccacctccgacgtggaagaggaagaggaggaagaagaagttgaggatgaggatggcgaagctttggtcgtgatgacacaacggactacagaaccatcattgtgcagcgggtgctcagcacgcagattttctttgtcatcaacaaccgtcgtgcacgtgtgatcattgatggaggaagctgcaacaacttcgtggttaaacgattccggaagagcaaagattctgttgattgcgatgtggttcctatgcaagcttgttcacttttgttgggccgtccttgggaacatgataatgatgcttcacaccatgcaagtggctaaaactgtttttccacctaaaaaggataatctttcacctagttctaaggctaagggaattaagtcgaagggtggtgttatgcttgcaacgaaatgtgacattgctgaaaattcagatgatgatatgtgctatttcttgatatgcaaacaagccttggtttctttagatgatattgctagttcgatacatcttgttgttactaaccttttacaggagtatgaggatgtctttccagccgagatacccccaggattgccaaaccgtgctgcttatcgaactaacctagaggagactaaggaaattcagcggcaagttcaagaccttttagaccacgggtatgtacgtcaaagacttagtccctgtgcagttcctgtaattttggttcctaagaaagatggttcttggcgaatgtgtgttaattgtagagccattaataatattactatctgatatcgtcatcctattcctaggttagatgacatgcttgatgagttgtgtggctctataattttcacaaagattgacttgcgtagtggctatcaccaaattagaatgaaacttggagatgaatggaaaacagcttttaaaactaaatttgggttgtatgagtggttagtaatgccttttggtttgattaatgcacctagtactttcatgcgcttaatgaatgaggttttaaggccttttattggacgatttgtggtagtgtactttgatgacatattgatttacagcaagtctttgaatgaacacatggatcatttacgtgctgtttttaatgctctacgcgatgcacgtttgtttgctacccttgaaaagtgcatcttttgcacggaacgagtctcctttcttggatatgttgttactccacagggaattgaggtggatgagtcgaaaattgaagccataaggagttggccggttcccgaaaccatcacacaggtgaggagctttcttgcgcaagccaaacccttgcgccaccaactccgcctcaccgaggtgattccatttttc

SEQ ID NO: 14560 - DNA, 1692 bp, Oryza sativa
  Clone ID: TFbOSC101997j.C1.o12.gm
atggagcagctttgctgcccggggcggagggtggcgtcggcgtccagccgtggtgaggaaggtcgccctcccgcagtggcgcaccaggggggctcctcgcaagctgggagtgagcaatccaccaaggctggaggtggagagatgaggggccagatgaacaaaggggggaagctgcagcaatatcgtccagttcagaaggagaagaatcaaactgaagagaagattgcgacatctgcagtgactcctcagactgcaacccagcaaccaactccaccacccaattctcgcactggtatgcaaactaacccacagagaattttctgccacagatgcaaaggttttggccacatggctagggattgtagcaatgttgtcttctgtataaattgtgccaaacccacacataggacagaggattgcatctatgacaagcagccgaggcctatggcaaagctagtagggtatggtgctccaggtttaggttgcatcttaattcaaaacactaagcctgacccacctaaggagcataataatcctctggctatgatctctactgtctttggtggagaattgacagaagctcaacttgagcaaggtttcacgcaacaatttaagtggaattgggtttggaaagctaaagcaatgcctaatggaagctttcagatgagatttcgtaacaagataaagtttgatgagcttgcaaactttgattatttcaatgtcaagggcactgatgtgcaagttaatgtgaaagaatggacccagaaatctgaagcagttgggaagttgcatattgtctgggtcaaaatcactggaattcctgaggaaatgaagggttaccaagctttgtatgaaattgggtcaaatctagggcctgtcttggaggttgatatggctactttcagagctagcaatgtgatcagggcaaaagttggaatgatggagctggtcagagagaggaagcaagtcctggtgccagaattgatgctgggagaacataagatcaaatgtgcacagatcttgagagacatggagttggcaatgcaactgcagaaaggagactgggataaggagaatagagtcagttttgatatgggtttgaatcaagaagacaaggacaaagtagatccgggggacagtgaagattacatggattctcaggagtctaagggaagttttgctaagaggttggggattaatctaactgaagaagctcttggaagtcaagatgaagagatgaggagaagcaagagactgaaagacaaggaagataagaggatgaaggcctttgaaggtcaagctgagctgttgagatacatcactgctttctacaaggatctttttggtcattcaaaactgaacaacataaaattagatatgggagcagaagctttgactgttttgatacaaagagctgaagataataagttgattgaaggttggtggcaagatatactaagagataagtatctcaaaaacaaaaatcttgctggtatctctgtcaaagctggtgattcacacttctggcaagggctcatggaagttaaaaacatcttctacaagttctgttcgaagaaagttggtgatggggaaaatacatgcttttgggaagacaattggattggtgaagttggaagcaaatcgaagaagattggtactgggagccagactcataaagcaggtggcaagtga

SEQ ID NO: 14561 - DNA, 299 bp, Oryza sativa
  Clone ID: TFbOSC3190j.C1.o1.np
ccatgccatttcgggtctttgggatgagagagtggtgaattttggttgtacgatgcgcttagctgacataagttttatgtcgaaattcactttcatcaaaggttttaagtgtcatgcttgtgttcaaacgaaacaatgtcgcaaggctcacaacacatttgaggcaagaaatttggcaacgctagaacttattcatttcgatatgtgcaaaatgaatggggaaagaaatacttcgtgatacttatagataattgcactagattctgtgaacttgttttgacatggacagtagaaagcaa

SEQ ID NO: 14562 - DNA, 1050 bp, Oryza sativa
  unsure (1)..(1050): unsure at all n locations
  Clone ID: TFbOSC32359j.C1.o1.fg
atgccccgttttgacagtaatggatccccccaaatccactcacctccaacagttggttccccatctccatcatctgtggggagagagcccgagaaatttagggttgagagggtgtggaggcgaaggagtggcctcgattggggatcggaggtggtgaatctcggtggagaggcacaatccaaggcgataagcgtcgatttgcaagggtggttcgtgggcgaatggcgaatcaagggcatccaggcggagggtggcgtcggcgtccaccgtggtgagaaaggtcgccctcccgcagtggcgcaccaggggggctcctcgcaagctgggagtgagcaatccaccaaggctggaggtggagagatgaggggccagatgaacaaaggggggaagctgcagcaatatcgtccagttcagaaggagaagaatcaatctgaagagaagattgcgacatctgcagtgactcctcagactgcaacccagcaaccaactccaccacccaattctcgcattggtatgcaaactaacccacagagaattttctgccacagatgcaaaggttttggccacatggctagggattgtagcaatgttgtcttctgtataaattgtgccaaacccacacataggacagaggattgcatctatgacaagcagccgaggcctatggcaaagctagtagggtatggtgctccaggtttaggttgcatcttaattcaaaacactaagcctgacccacctaaggagcataataatcctctggctatgatctctactgtctttggtggagaattgacagaagctcaacttgagcaaggtttcacgcaacaatttaagtggaattgggtttggaaagctaaagcaatgcctaatggaagctttcagatgagatttcgtaacaagataaagtttgatgagcttgcaaactttgattatttcaatgtcaagggcactgatgtgcaagttaatgtgaaagaatggacccagaaatctgaagcagttggaagttgcatattgtctgggtcaaaatcactggaattcctgagnaaatga

SEQ ID NO: 14563 - DNA, 2476 bp, Oryza sativa
  Clone ID: TFbOSC417104j.C1.o2.np
agaagatgagggcaaaggacaccgccaagcaaaaaggtcgagtgaggttctagcgcctatttggtgtagaagaagaacccttgtgcatctcacaacaataagaagaaggtcaaacccaaggctacaaccaattttaagaaaaaagacaaggaaaaagcaaagggcaactgctttgtgtgcggtaagcctgtgcattgggtcaagaattgtcctgatcacaaggacaaaaaagtctgcaaatatggttattagcgatggaggaggaacatcagggtacggtgactttttacctacagttctctttgttctcactcaccagattggtgggttcatactggtgcaaatattcatgtgtgtgcgaacattttcctattttcttcttatcaggtcggcagaggttcctccttgctgagggggaacggtttgcttgtagctgctcatggtgttggtacggtcaatctgaagtttacttcaggaaagaccgtgcaacatgtcacctcaataaaaaaagaatcttgttagcggctctttattgtgtagagatgattttagacttatgtttgaatttaacaaatgtgttgtatctaaatattggtaaaggttatgacagcggaggcttgctccacttttacttagatgatatgtgtaataaagatgtgaatcatgtaagtaatgatgatgagtctaatgagtggcattcgcgactttgtcatatgaattttggttgtacgacgcttagctaacatgagtttaatcttgaaattcactttggtcaaaagttctaagtgtcatacttgtgttcaagcgaaacaacctcgcaagcctcataaggcatcagaggtcagaaatttgacacctctagaacttgtttattccgatctatgcaaaatgaacagtgtgttgactaaagagggaaaaaatatttcatgacacttatagaggattgcactagattttgctatgtgtatttcatgaaaacaaagaataaagcattgcagtactttaagatctataaggttgaggtagaaaacctacttgaaaggaaaatcaaatggtcgaggtctaaacgaggcgaagagtattttcctaatgagtttatttcatcctgcgaagagtctggatttattcatgagaggacgcatacctattcaccctagtcaaacggggtagccaaaagaaagaaccacactctaaatgtgtttgtgaatgccatgttagacactgtagaactttcaacggaatggtggggtgaggcaatattgactgtttgtcatgtcctgaatagaattcctactaaaaataaacaagtaacaccattcgagaaacggaaaaagaagaagttaaatctctcatacttgcgcatatggagatgtttggctaagattagtgtgtctatagttaaaaagtgcaaacttggaccaaagactatagattgtgtgttccttggttatgccatccacaatgtgagatataaactcctaagagtaaattttggagtatctgacatgcgtgttggtacaataacacagtatagagaagttacattttttgagaatgaatttcctatgaaagatacacatagcacttctagtcaagagcctatttatcccctagtcttttgtgctgatagaacacaatgaatcgaacgcctgaggaaaatcctgaggaggacaatattgtagctactcgaaagagtaacagacaaaggactacaaagtcttttggtgatgactatattgtataccttgtggatgacactccaagaacaatagaagaggcatattcatctcctgacgctaactattggaaggaagctgtgtgcgatgagatggactctattatgtctaatggtacttgggaagtcgtcgagtgtctatatgggtgcaatcatgtaggatgcaagttggttttcaagaaaaagcttaggcctaatggtataattaaaaattacaaggcaagacttgtggctaagggttatacccaaaaggaaggcgaggattttttttacacttattcaccagttgctcgcttgaccacaattcgaatactacttgctctgggagcctctcatggtcttctcgttcaccggatggacgttaagataactttccatagtggagtgttggaggagaagatctatatggatcaaccagatcgggtatgtattaaaaggtcaagagggattgatgtgcaagctgctgaagtcttttcatggctacagagaagcgcctaagcagtggcatgagaagtttaacaaaactctgatatttgttggctttgttttgaacgaggctaacaaatgtgtatactactgatacggttggggagagacagtgatcttgtgtttatatgacgatgacatattgatctctaggaccagccttaatgtggttgaggaggtcaaggactttctgtccaaatgctttcagatgaaggatttgcgaatggctagtgttattcttaacattaaactaca

SEQ ID NO: 14564 - DNA, 1218 bp, Oryza sativa
  Clone ID: TFbOSC101188j.C1.o2.fg
atgtccttccccgacgaggaggaggacgaggccttcctcctcgccgtagcggccacggaggaagcggcgctggcctcctccgactcctccaagcgccgccgcctctccatgacctcgtcgacctcctcgtcaccgacttcggccactcctccccccgccgccgtccccgaggggccctacctggccgcgctcaagggaagccacagctccgcctggaagcagcagcaggagacgctgagccaggcgcgcaagcgtcccggtgggtcccaaaccctagccaccccaggtagcggcagcggcagcggcggcgcgcaggtcgcgaggggcggcgcgtgcttcaagtgcggggactcttgccactgggcaagagaatgcccgcaatccgtgccagctactggcggcggaggaggaggcggggcctttggtggaagcggaggagggggtggtgggtatggggacgcgggtggggcggtggaggagaaggcttgcccctgcggcgccgggagttgcctagtgctcacatccaacacgcccaggaatccgggccgcaagttctacaggtgccccatgcgggacaatggaggttgcaactactttgagtggtgtgataacccatctccaggtcctgcaaatgtcagtggcaatactgtttttcagtcagatacatcagttgcgcatatgctttgcccctgtggtgctggagcttgcttaattctcaccacaaagacaggaaagaatgttggaaggcagttttatcgttgcccagctaatcagggcatttcatatctctttcttaatgtacgatcgggacatatctccagggaggtagctcttgtggctatttcaagtggtgtgatgaacaacagcttaggacagctgctccactgcaagcttcaacacaatatcatactgatgttgcttcaagtggccaaattcccagcaagaggagctcctccgcctgcttcaaatgcgggcaagagaaccattgggcaaaggactgcccaaatcaatcttcagatccttatcctgacaaaggtgggagaacatttacttctgcaagctctcccgatgcgtgtttcaagtgtggtaagagcgggcactggtcccgtgattgccccaccgcaaattgtggttctagtaccgtctccagccatgtcaagtcctcttctactttgggctcatggaacagccacagatactgatagccggtacctgtga

SEQ ID NO: 14565 - DNA, 3150 bp, Oryza sativa
  Clone ID: TFbOSC400742j.C1.o1.fg
atggcagctcctgcaccatccagttttaacttgcggtctattcttgaaaaagagaagttgactggaacaaacatcatggattggtatcgcaacctgagaattgttctcaggcaagagcacaaagagtttgtgcttacacagccttttccagctgacttgcccaacaatgctcctgctgctcaacgtagggagcatgaaaagcgatgtaatgattatcttgatattagctgtctcatgcttgctactatgtcccctgagcttcaaaggcaatatgaggcattggatgctcatacgataatcacgggactgcgtaacatgtttgaggaccaagcaagagctaagaggtttaatacctcaaagtccttgtttgcgtgcaggcttgcagaaggtaatccagtgagcccacatgtgatcaaaatgattggttacaacgagactctggaaaagcttggttttccccttagccaagagttggctactgatttgattctccagtcgctccctcccagctttgagccgttcatattaaatttcaacatgaacaacatgaacaggaccttgacaaaattgcctgggatgctaaagactgccgaggaaagcattaagaaaaactccaaccatgtgatggttatgcataagcgcaagcccaacaacaagaagagtgggcctgctaaggatgcagagtgcttcttttgcaaggaggcaggtcattggaagagaaactgtaagaaatacctagagcagctcaagcagaagcagcaggatggaaagagttccacctcagagggttatggttttagatctgtggacaatgattgttcagtctattataatgacattttctatttccatgcacccatgatgagtggcttatacattgtgaatcttaatggatattcagtctataacattaatgcaaaaaggcaacgtcctaatgatttgaatcccacttttatttggcattgtcgcttgggtcatataaatgagaaacgcatggagaagattcatagagatggacttctacactcttttgattttgaatcatttgagacatgcgaatcttgtttacttggcaagatgacaaaggcacctttcacgggtcaaagtgaaagggcaagtgaactattggcactagtacatactgatgtatgtggaccaatgagctcaactgccagaggtggttttgggtacttttttacctttaccgatgactttagtagatatggttatgtctacttaatgaggcataagtctgagtcctttgaaaagttcaaggaatttcataatgaggtacaaaatcatttgggaaagacaatcaagtatctacgatctgatcgtggtggagagtacttgagccttgaatttggcaatcatctaaaggagtgtggaattgttccacaactcactccgccaggaacgcctcaatggaatggggtgtccgaatggaggaatcgtacattgttggacatggtgcgatcaatgatgagccaaactaatcttctgctaagcttttggggttacgctctagagacaactgcgttcacactaaacagtgttccatctaaatcggtggataagacaccatacgagatatggacagggaagcgtcccagtttgtctttcctaaagatttggggatgtgaggtctatgtaaaacgtttgcaatcggacaaactcacacccaaatcagataaatgcttctttgtggggtatcctaaagaaacgaaaggatattatttttataatcaggaagagggcaaagtgtttgtcgcccgacacggtgttttcttggaaaaagagtttatttcaagaaaggatattgggagcatgttgtggaagcaccggtttcgcgaagatccgaagaaaaagacagatgtagatggcaatgttcacatctacaaggcacgattggtggcgaaaggtttcagacaaattcaaggtgttgactatgatgaaactttctcaccagtcgccatgctaaaatttatttggattgttttagcgattgctgcctatttcgattatgagatatggcaaatgtatgtcaaaactgctttccttaatggaaatctggatgaggatgtatacatgacacaacctaagggatttgacgatccacaatcagctaaaaagatatgcaagttgcatcaatccatttatgggttgaagcaagcatctcggagttggaatattcgttttgacgaagttgtcaaggcgttgggctttgtcagaaacgaagaagaaccttgtgtatacaagaagattagtgggagcgcactagtgtttctaatcttatatgtagatgacatattgttgattgggaatgatatttctatgcttgaatccgttaagacatcgttgaaaaatagtttttcaatgaaggacttaggggaagcagcatatattctgggcataaggatctatagagatagatcaaagaggctaattggattaagccagagtacatacattgacaaggtgttgaagaggttcaacatgcaagattctaagaaaggtttcttaccgatgtcacatggcattaatcttggcaagaatcagtgtcctcaaacgactgatgagcgaaataagatgagtgtgattccatatgcttcggcaattggatccatcatgtatgctatgctatgtacacgtccagatgtttcatatgcacttagtgcaacaagccgataccaatcagatccaggtgagagtcactggatagctgtaaagaatatcctgaagtacttgagaagaactaaggatatgttccttgcctatggaggacaggaagagctcgttgtaaatggttacactgacgcaagcttccaaatcgacaaagatgattttagatcgcagtctggatttgtgttctgcctgaatggaggcgctgtgagttggaagagttccaagcaagatatagtcgttgattctaccacagaagccgaatacattgccgcttctgaggctgtttggataaagaaatttgtttctcaactgggtgtgatgacgagtgcttctagctctatggacctctattgcgataatagtggtgccattgcgcaagccaaggagcctaggtcgcatcaaaagtccaaacacattttacggcagtatcacctcattcgcgagaagtgggtagaggagatgtga

SEQ ID NO: 14566 - DNA, 4119 bp, Oryza sativa
  Clone ID: TFbOSC26817j.C1.o2.np
atgattatttcaggtggctactgcttgatgggttgcattaaagatattccgaccctgaagggagataactacgcagaatggaaaagaaaactcgacattgctttcatcttgggagaggtggactgggtgttgactaccccatgtcctatagaacctgctgcacttgtcagagttgaaaatgagtcagatgctgactggcaaagaagacagagggacaatgctcccctcataatgtcgtattacattgagcaaaagaaatggtccttagtcaacaagaaatgtttggctgtggtaaagaacacgattgagccaaccttattgggctcaatcccagagtgtgacaccatctctaagtaccttgaaagaataaagagccaatttactggttcttcaaagacttatgctacacagctaataaagcagcttgtgacagaaaggtaccatggaggtggtgtaagagaccacattcttaggatgagcaacatggcttccaagttgaagccaatggatttgggcatctcagatgactttcttgtccatttggttatggcctcattgccaaagcactttgacaactttgttgtcaactacaatataagtccagagaaatggaactttgaaaagctcatcgctaattgtgtgcaagaggaggaaagaatcaaagagtccaatggagactctattaactatgttaaagataacaagaaaaagaactacaagtcaccctcctcaaaagcaaaacagcctcagcatctgccttagcaacaacagttcactgttgaaaaggatcagtgtctccactgcaagaagacagggcattacaagaatgattgtcctgacttcctgaaaataatcatggcaaagaaaggtgagaacattattacatttgtaaatgaatctcattatgttggttattccagatccacatggtggattgattctggagcaactattcatgtgtctaattgtttaaagggattccgttcgacgagaactacgtaaagaagcgaaagctccattagagtcgccaatggagttgaagcaaaagttgaagctgttggagatcttcgcctagagctcgcgaatggcttcacacttttacttagagatgatttttatgttccttctttgcaaagaaatttaataagtgtatcgaaattggatttcggtggataggattgccattttggaaatggaaaatgtaaactatggtataataatgcatgtattggtcttgctgtgttgcaagacgagctttatttgttatctcttcctgagaatgtgaatgttgtgtcctcgttgacaaaagaaaacaagaaaagaaagagaactcctgatgtctcatcgaaattatggcactgtcgtttaggccatatttcaagggggagaattgagagactagttaagaatgaaattcttcctccattagagttatcagatttagaacaatgcattgaatgcattaaaagaaaatttgtaaagagcataaaaaagtgtgcaaaacgaagcgtaggaattttcgagatcattcacacagatatttgtggtccatttcctgtgaaaagtgtagatggctatgactcgttcataacattcacagatgattactcccgatatggttatatttattcaattaaagaaagatcagaagcattggataaatttaagatattcaaagctgaagttgaaaatcagcatgacataaagattaaagtagtaagatctgaccgtggggggagtactatggtcggcatacgccttatgggcaattccatggaccttttgcaaggttcttgctagagaatggtatagtagcccagtattcaacaccaggtgaacctcaacagaatggggtagtgaaaggtgtaaccgtacccttatggatatggtgcgcagcatgatgagctactccaccttaccattgggtttatggatggaggcattaaaaacctcaattcatatcctcaacatagttccaagcaaattggtgcccaaaacaccgtatgagctatggacaggaagagtaccctcgctagctcacctccatgtgtgggggagtcctgcagaggctaaaatatttaacccaaaccttgggaaattggatcccaaaacagtaagctgtcattttattggctatcctgaaagatcgaagggttatcgtttctactgtccaaacagttatacaaagtttgtagaaatgagacacgccgtcttcttggaagacgaaatgattaggaggagctcggtagttcgagaaattgatcttgaggagaggcaggtgtctgtaccggctccgtcgactcaagagccttttttctctctacctgctgatgttgtgcctgcaatgcatgacgttgcggtactagcacctattgttacccctcctgtggcaacattgaatgaaagtgaggaacctgttctacaggattcaacaaaaattattgccatacaagaggaggaggtgcaacagcctcaaacagagaatgtgccaaatgtggaggcccctagaaggtctgaaagagtcagaagatcggctatctgtgatgactatgaagtttataatatagatagtcgcatatggaggatgatcccacctcatatgaagaggccatgagaagcgttcgctcatctgaatgattggaagccatgaaagatgaaatgaaatcaatgaaactaaacgatgtctgggatttagaagaaattcctaaaggagccaagacagtaggctgtaaatgggtctataaaaccaaatatgagtccagagggaatatagaaaagtttaagacgcggcttgtggcaaaagttttcacgcaaagagaagaaattgattacaatgagacattttctccagtctcttgtaaagattccttcaggattataatggctttggtggcacattatgatttggaattacatcagatggatataaaaacggtatttctaaatggagatttgaaggaaaaagtatacatggcacaaccgaaaggttttgtcgtgaaaggaaacgaaaatatgggatgtcgtctaaagagatccatttatggattaaaacaagcttcgagacagtggtacttgaagtttgatgggacaataaagaaatttgggtttcgagagaatattgaggacaactgtatttatacaaagtttaagaatgggagattcattttcctagttctgtatgtaaatgacattctactggctagtagtgatgtcagtgtactgcaggaaacaaagaaattcttgtcctcaaactttgacatgaaagacctcggtgaggcttcatatgttttgggcatagagattcaccgagacaaaacaaagtatgtattgggactttctcaaaagacatatatagaaaaggtgttgaagaaattcaacatgtacagatgcagtgccacacctgctcctatagtcaagggtgaaaagtatgggacatggcgatgtcccaaaaatcagtatgagctcaacgaaatgaaaacaaagccatatgcgtcagctgtgggaagcctacagtatgcgtaagtgtgcacacgtcctgacttggcatttatcaccgggttacttggcagatttcagagtaatccaggcccagagcactggaaattggtaaagaaagtcttgcgttatttgcaaggtacaaaaggcctcatgttgtcttatagaagatcagagccgctccggatagtggggtattcaggttctgattttgcaaaagataatacaaagtcaacatcaggatacgtgttcacccttgcagggggagctatttcatggaaaagctccaaacagactatcactgcagggtctactatgtatgccgagtttatagcatgctatgaggccacggggcaggtaaactagcgaaagaagttcatacccggtttaaaggtggttgacagtattgagaaaccactaaagttatgctgcgacaacgaacccacagtaatgtacgctcacaacaatcagtcaagtggtgctgccaaacacattgacataaagtactattttgtgaaggacaaagtccgggattaaacaatcagtctcgagcacattagaacagaaaggatgctcgtggatccgctcacgaaaggcctaccacccaacgtgttcaaggaacat

SEQ ID NO: 14567 - DNA, 5928 bp, Oryza sativa
  Clone ID: TFbOSC409754j.C1.o2.fg
atggatcggcaatggatgtacgctgaccggcggtccaaagagtttattgacggcgtgcattattttttgagagtggccaaagctaacaggcataagggttttatttgttgtccatgcaataagtgtaagaatcagaaggagtattctgcatccaggactattcatttccacttgtttgagtcggggttcatgccaagctataactgttggacatcccatggagagcaaggggttgaaatgaaaaaagataaagtggaagacgacaatattccggactttgctcagtacgctggatttgaaggaaatcaaacaggcgaggaggaaagggatgctgatggtaacgacgttgcggatgatcttggtcagatgttgcaggataccaaggagtactgcgaaagtgaaaagggggcccataaattggacaagatgttagaggaccacagaacgtcgttgtacccaggttgcgagcaggggcacaaaaagttggatccaactctggagttcttgcaatggaaggcaaaaaatagtgttagtgacaaggcatttggcgatttattgaaactcgtcaagaacattcttccggagggaaacaaattgcccaagacaacgaacaaggggaatgctagaatgatgcgatggcacgctgaagagcgtcaacaggacgagatgctgagacaccccgccgatgattcacagtggcgaaacatcaacagaaaatttaaagactttggaaaggacgcacgaaacatacggtttggtttaagtacggatggcatgaatccttttggagagatgagcaacggctatagcacttggcccgttacgatgtgtatctataacctccccccttggctatgcatgaagaggaagtacataataatgccgattattattcaaggccccaagcaacctggtaacaacatcgatgtgtacctaagaccactggtcgaggatcttaaactgctgtggaaaaaggaaggtgtccccgagttaccctattgggaattcttggacgtccgccacgcaatcgacgtgatgcacctcactaagaacctttgcgtaaaccttcttggcttcctaggtgtatatggaaagtcgaaagatacactggaagcacgtaatgatctgaagcatatggaacaacgcggcgaccttcactcagaaccaaaggagaaaggaagccattacttgagtccagccagctacactcttagcaaggctgagaaggaaaatatgtttgaatgcttggagagcataaatgtaccgtctggatactccacgaatataaagcgaataataagcacaaaggagaagaagttcacaaacctaaagtctcatgactgtcacgtgttgatgacacaactgctaccagttgtaataaggggtatccttccagacaatgttcgggcaacaataataaagctatgtgctttcatgaacgcaatttcgcagaatgtcatcgatccggatatattagaagcccttcagaatgatgtggtgcaatgtcttgtcagttttgagttgatatttccaccgtcatttttcaatataatgacgcatctgctttgtcactttgtcaaagagattggtattctcgggcctgtgtacctacacaacatgtttcctttcgagaggtacatgggcgttctgaagaaatatgttcgtaaccgtgctcatccagaggcaagcatcgccaaggggtatggaacagaggaggtcatcgaattttgcgtagaatttattgaagaccttcgcccaatcgggggatatgagatcaatgggtacacattctacacgagagcccaagacataaagtgcacgaaccaaaacagcgttgttcgtatcgatgccatgggacacgatggaacaactggcacgtattacggtgccatcgaggacatatgggaacttgactatggtcctctcaaggtccctccgttccggtgccaatgggttaggttgactggtggaggcgtaacgattgatgacagtgggatgacaatggttgatcttaacaaggttggatactcggacgaaccttttgtcctttccaatgatgtaacgcaagtcttttacgtgaaggacatgtctagcaaaggaaagaagggcagaggtgaagcatctaggcccccgttgttaattttggctcggcctgaccaggggcggtcagaccggccacatagtggcggtatgaccggcgtgccctggcagtcgacatctcaatactacaagtggtatcagagcttggtctctcttgattgggcttcaccgcctagagtgaagatgttgaacgaggtgaaccatgtagggaaggctcccatgtttaatggcacaaactactccacttggaaaattaaaatgtctactcacctcaaagctatgagcttccatatttggagtattgtggatgtaggctttgctatcaccggcacgcacttgacggggattgatcaccgcaacctccaactcaatgcccaagctatgaatgctttgttcaactgtttgagccaagaggagtgcgatagagtgagcaaccttgagaccgcatatgagaattggaacaagttggcggagatccatgagggcacaagcgagtacaatgatgccaagcttcatttcctcaaaatccaatatgagacattctccatgttgcctcatgagagtgtaaatgccatgtatgggaggctcaatgcctcatggggaaagatcaacaccaatgacatgtacaagttgaagaagaaggagatggaggaaacctcaccttccaagaagtgcattgctccccaagccgaagttgaagacaagggcaagggcaagtgctttgagtgtggtgagaagagacactttgcttccaagtgcccttccaaggatgatgatggagacaagtcatccatgaagaagagtggaggctacaagctcatgaagaagctcaagaaggaaggcaagaagattgaggtcttcatcggggattgggtcacaaatgaggagagctccgcctcatccgggtccgaggaagaaggtggtgatgatgcaagctccaagaagaagaagatggccgttgttgccatcaaggaggctccatcacccttcgctccactttgtctcatggcaaagggctcctctaaagtaacatctcttagtgatagtgagagtgatgatgattgtgattatgcttcctatgatgagcttgtgagtatgtttgaggagctccatgcttatagtgagaaggagattgtcaagttcaaggctctaaagaaggaccatgcttctttggaggtcttgtatgaggagctaaagacttctcatgagagactcaccatttctcatgagaagcttaaggaagctcatgacaacctcctttctacttatcaacatggagctctcattgatgttggcatatcttgtgttttgcttgatgatagtgctacttgccatattgctcatgttgcatcatctagcatttctacctcttgtgatgatcttgtggatatgcctagctctagctctagcccttgtgtttctatttgcgatgcctcacttgttgagaacaatgagcttaaggagcaagtggctaagctcaacaagagtttggagaggtgcttcaagggtaagaacactcttgacaagattttgagtgagcaacggtgcatccttaacaaggagggacttggattcattccaaagaagggtaagaaaccttctcaccgtgccactcgttttgtcaagagcaatggaaggctcatgatggtagcattgttgctagatatgtgggttctcctatactcggtggtgaactaccgcaccggtgggagccattgggtgcttgatagtggatgcactcaacacatgaccggtgatagggctatgttcaccacatttgatgtaggagggaatgaacaagagaaaggtgttagactaaccaaatttgaaagtcggtgtgatgaagggtttcttctaggttatgtctcaaatagcaaggcatatcgggtctacaacaagaacaaaggtattgtggaagaaaccgccgatgttcaatttgatgagactaatggctcccaagaggggcacgagaatttggatgatgtaggtgatgaaggcttgatgagagctatgaagaacatgtcaattagagatgtcaagcctattgaagtggaagacaagccatccacctccactcaagatgagccatctactttcgctacgccaagtcaagctcaagttgaagtggaggaggagaaggcacaagatccacctatgccacaaaggatacacactgctctttccaaggatcacccaattgaccaagtgttgggtgacattagtaaggatgttcaaactcgatctcgtgtcgcttcgatttgtgaacattactcgtttgtttcttgtcttgagccaaaacatgtagatgaagctctttgtgatctggattggatgaatgctatgcatgaagagctcaacaactttgcaagaaacaaggtgtggactttggttgaaagacctagagaccacaatgtcatagggacaaagtgggtctttaggaacaaacaagatgagaaagggttggtggtgagaagcaaggcaagattggtggcacaagatttcacacaagttgaaggtttggactttggtgaaacttttgcccccgtggcaagacttgaggctattcgcatccttcttgcatttgcatcatgctttgatataaaactatttcaaatggatgtgaaaagtgcttttctaaatggtgaaattgccgaacttgtctttgttgaacaacctcccggttttgaagatcctaaaaatcctaaccatgtttacaaactctcaaaagctctttatggtttaaaaccagctcctagggcttggtatgaaagattgagagattttcttttgccaaaggatttcaaaattggaaaagttgacaccaccctttctacaaaaatcattgatgatgatttcgttgtgtgtcaaatttatgttgatgatatcatattcggttctactaatgaagtattttgcaaggaatttggtgatatgatgtctagggaatttgagatgtccatggttggagagttgagcttcttccttggacttcaaatcaagcaacttaaggatgggacgttcgtgagccaaaccaagtatatcaaggatctactcaagaggtttggcttggaggatgcgaagcccatcaagacacctatggcaaccaacgggcatcttgaccttgatgagggaggtaaaccggtagatttaaagctttatcattctatgattggtagcttgctttaccttaccgcatctaggccggatatcatgtttagtgtttgcatgtgtgcacggtttcaagccgctcctaagaagtgtcacttagtagccgtgaaaaggattctaagatatttaaagcattcctctactattggcttgtggtacccaaaaggagctaaatttaagattgttagctattccgatttggattatgccgtttgcaaagtggatagaaagagcacatccggtagttgccaaatgcttggtagatcccttgtgtcatggtcatccaagaaacaaaactccgtagccctctctaccgccgaggcggaatatgtttcggcgggtagttgttgtgcccaattgctttggatgaaacaaacattgttggactatggcatatccttcaccaaaaccccacttctatgtgacaatgatagtgccataaagatagccaataacccggtccaacattctagaaccaagcatattgacatacgctatcacttcctaaaagaccatgttgttgccaagagtgacatagtcattagccacataagaaccgagaatcaactagccgacatatttaccaagcctcttgatgaaacccgcttttgcaagttgagaaatgagttaaatgtcatagacttctctaatgtggcttga

SEQ ID NO: 14568 - DNA, 4494 bp, Oryza sativa
  Clone ID: TFbOSC101289j.C1.o1.fg
atggacatctctagggcaaatgaaggctacacgagctgcggcccggtagtcgagatgtcatggcacagggccgatgtcctgctgctaggggctcagtcctgcctacctgtcccggaggttccggccgtaggtggggttgggtcggtactcttgtgtatggctaggatgggttggaaactatgtcacgtcttccatccgtataccgtggtgatggccggtagcatcaaccgtcgtggcctggacctgactggcttcgttttggagctgcggggcatgtgcgttgtcctggggtatccgcatggagtggactaccaaggcaagcagctcccggagcaggagggtgacgatgcagagccccacgctgcttgggaggtcactgcagtgatcctcactggctcacccgagaggacttcgttggcagtcaccgcgggtggagattctttctccgctgcttgccagaacgccgcactcctcgccattggcactcttcaccagtgctacccggacgagttgcagcactcgccctaccgctaccaccctcgtcgcggaggagcccgtgactacgccaccttcagggatgctagctcggaggatgacgctaccatcatgcacttggcgcgcatggtggaggcgtacgacgcagcccgtatcgacttccatcatatggtgcgccgtgggttggtcgagaacaacatgaagatcctggagctgcgtcaggagaatctgcagctgaagaaggacttggacacggtggaggcgcagctgtgtcagctcaagatcgcccagggagagatggtgacaaccaggagaagtgctgctaccggtgaaggcagtcaccccgaaggcagcaaccacaacaagcatggcagcccacctccacctccttccccgccaccaccaccaccaccagacaccaactccatcctcacccaaatcctcgcccagcaggccaacatgatggctgctttcctccatcacatccaaaatccgccacagcataatgctccacctccaccaccacccccgcaacattctaaactcgctgagttcctccgcatccgtccgcctaccttctctagttccaataaccccgtggatgccttggattggttgcatgccgtggggaaaaagttggataccgtgcagtgcaacgatgaggagaaagtcatctttgctgctcaccaactgcagggacccgcatctctatggtgggaccacttccaggctacgcagccaaaaggacagcctattacttgggcccgcttcaccgccgctttccggaggacccatgtgcccgccggagtcatggcccttaagaaaagggaattccgggagttgaagcaaggcaaccgttccgtgatggagtatttgcatgagtttaacaacttggcccggtacaccccggaggatgttcgggaagatgaggaaaagcaggagaagttcttggcaggaatggaccctgagctgtccgtgcgtctggtctccggggattatcctgatttccagcgtctggtggacaagagcatccgcttggaagccaagcacaaggaactggagtcgcacaagcgtcgcttggcgaatttccgcaatcaacagggggctaaccaaaggcctagtcaaggccgcaaagacgctcaaggtcagcagcgtctgtgcttcaattgcttcgagcccgggcactttgtggataaatgcccgaagccgcggcgccagcaaggccaagcgcctccccgccccaacaacggtggtaaggatgtcattcggggtcgtgtgaaccacgtgactgccgaggatgtgctgacgactccggacgtcatcgttggtacgttcctcattcattctattcctgctaccattttgttcgactctggagcttcccactcatttatatctgtgcccttcatggggagaaatcagttgggggtagaaaggcttaggaaccctctgctcatcaccacccctggaggggttatgacagcaaagtattatagccctgccgttcctatagaaatccagggaatcccttttcccttggatttgattcttctggacaccaataacttggatgtgatccttgggatgaattggttggctcaattccaaggagtagtggattgcgcaaggcgcactgtcactctgtatcgggggccggaacaaccggttgttttctttgcaccctcaacctctgtcggcagttcagaacttcatcagataggactgtcagaaatacccatcgtcagagagttcggagatgtgtttccggaagaactacccggtatgctgcccaagcgagagattgagttccggatagatcttgctccaggaaccactcctctatacaagcggccctaccgtatggccgcgaatgaactggccgaaaaggacaagacaaagaggatgtgtgttgactacagagctctcaatgaagttactataaaaaacaagtaccctcttccccggatcgatgatctgttcgatcagcttaaagctgccactatcttttctaaaatcaatcttcgctccggatatcaccaattgcgtattcgtgaagaagatatcccgaagaccgcattcaccacgcgttatgggctgtatgaattcacggtgatgtcgttcggtctgaccaatgctcctaccttggataagtttgttgtggttttcatcgacgacattctggtgtactcacaatcagaggaagaccatcagcagcatctccgtctagtgttgggaaagctgcgggaacatcaactttatgccaagtttagcaagtgtgagttctggttgtccgaagtcaagttcttagggcacgtgatatctgctaaaggagttgctgtggaccccgaaacagtgaccgccgtcactgattggaagcaacccaagacagtcactcaagtccgcagctttttgggtttggccgggtactatcggaggttcatcgagaacttctccaaaatcgctcgacccatgacacagttgctgaagaaagaagaaaaatttgtgtggagcccgcaatgcgagaaggcattccaaactctcaaggaaaagctggccaacgtggtcgccgacgctctaagtcgaaaaagccgttgcaacactctcggcgtctgtggcattccaccggaacttaatcaacagatggaagccctgaacctaagcatagttggtcgtggattcttggctacgctggaagccaagcctaccttactcgatcaaatccgcgaggctcagaagaatgatccagatatgcatggactcctcaagaatatgaaacagggtaaagccgctggtttcacagaggatgaacacggaatcctatggaacggaaatcgggtatgcgttccagacgacagggaacttaaacagttgatacttcaggaagctcacgaaagtccttattccatccaccctggctgtacgaagatgtacttggacttgaaagagaaatattggtggggcggttatgattctatatgggtagtcgtggatcgactaaccaaggtagctcggtttattcctgtgaagaccacctatggagggaacaaactagccgaactctacttcgctaggatcgtaagtctccatggcattcctaagaaaattgtatctgatcggggaagccaattcacctctcatttctggaagaagctccaagaagagttgggtacccgattaaatttcagcaccgcgtatcacccgcagacagatggacagaccgagcgtctaaatcagatcctagaagatatgcttcgcgcatgtgtcctagatttcaggaagacctgggataagagtctcccctatgccgagttctcctacaataacagctaccaagccagcatacaaatggcaccctacgaagcgttgtatggccgcaaatgccggacaccgctattgtgggaccaagttggggaaagccaagtgttcgggactgatatcctgagagaagctgaagctaaagtcagaaccattcgggataatctaaaggtggcacagtcccggcaaaagagttatgcagataaccgacgccgtaacctagaattcacagtggacgattttgtgtacctacgggtcacgccattgcgaggagtacacaggtttcagacgaaagggaagctcgcacctcggttcatgggtcctttccgtatcattgctcgacgcggagaagtcgcttaccagttggagctgcccgcatccttgggcaacgtgcatgatgtgttccatgtgtcgcaactcaagaaatgtcttcgagtgccatcggagcaggccgattcagagcaaattgaagttcgcgaagacttgacctacgtggagaggccagtgaaaatcctggacaccatggagcgcaggaccaggaaccgggtaatccgtttttgcaaggtccaatggagcaaccacgctgaggaagaagctacttgggaacgtgaagacgagctgaaggcagcccatcccgatctcttcgccagttcttccgaatctcggggtcgagattccgtttaa

SEQ ID NO: 14569 - DNA, 2130 bp, Oryza sativa
  Clone ID: TFbOSC400523j.C1.o2.fg
atgtcatggcacagggccggtgtcctgctgctaggggctcagtcctgcctgcctgtcccgggggttccggccatggccggcagcgtcacccgtcgtggtttggacatgactggcttcgtcttggagctgcggggcatatgcgtggtcttggggtacccacatggagtggactaccaggccaggccgcttccggagcaggagggtgacgacgcggagccccacgctggttgggaggtcactgcagtgatcctctctggctatcccgagcggacttcgctggcagtcaccgcgggtggggattccttccccgccgcttgccagaacgacgctctcctcgccatcgtcactcttcaccagcgctacccggacgagttgcagcactcgccctaccgctaccaccctcgtcgcggaggagcccgcgactacgccaccttccgagatgctagctcggaggatgacgctaccatcgtgcacctggcgcgcatggtggaggcgtacgacgcggctcgtatcgacttccatcagatggtgcatcgcgggatggtcgagaacaacatgaagatcctggagctgcgtcaggagaacctgcagctcaagaaggacctagacgtggtggaggcgcagctgcatcagctcaagatcgcccagggagaggtctgccgccccaagcgtcgccgcgtctgccgcagccagaagatcaccgcccgcaagagcacctccaggcccgagcttgttcgtcagtccctggcgtggacttgcttcgtcgagacccctcgtgccgagcccgcgcccgtggttccccagaagggggaagcctccggcgttggtagcacggaggatgcgctgttgctcaccttccgtcctggcccgtcgcagcggagaaatgctgctaccggtgatggcaaccaacctgaaggcagcaaccacaaccaccagggcaacccacctccacctcctcctccacctccaccaccaccaccagataccaatgccattctcacccaaatcctcgcccagcaggccaacatgatgactgctttcctccaccacctccaaaatccaccacaacataatgctccaccaccacccccacaacactctaaactcgccgagttcctccgcatccgtccacccaccttctctagctccaacaaccccgtggatgcgttggattggttgcatgccgtggggaaaaagctagacacggtgcagtgcagcgatgaggagaaagtcatcttcgccgcccaccagctgcaggggcccgcatctctatggtgggaccatttccaggctacgcagccagaggggcaacctattacttgggcccgcttcaccgccgctttccggagaacccatgtgcccgccggagtcatggcccttaagaaaagggaattccgagagttgaagcaaggcaaccgcttcgtgatggagtatttgcatgagttcaacaatctggcccgttacgccccggaggatgtgcgggaagatgaggagaagcaagagaagttcttggcaggaatggaccccgagctgtccgtccgtctagtctctggggactatccggatttccaacgtctggtggacaagagcatccgcttggaagccaagcacaaggaactggagtcgcacaagcgccgcttggcgaatttccgcaatcaacagggtgctaaccaaagggtccgctacaccaatccctatcccgggggatcctcttcgcagcagcaacaacagcagcagcaaccccgctctgcgccccgacctcaattcgtggtgcgcgtcccacagccgcagcagcagcagaatcagcaagggactcgtgcgccccgtcctcctacgccaacggtgcagcctggtcaaggccgcagggacgctcaaggtcagcagcgtctgtgcttcaactgcttcgagcccgggcactttgtggataaatgcccgaagccaaggcgccagcaaggccaagcgcctccccgctccaacaacggtgggaaggatgtcattcggggtcgtgtgaatcacgtgacggccaaggacgtgctgacaactccagacgtcatcgttgggagttcggagatgtgtttccggaagaactacccggtatgccgcccaagcgagagattgagttccggatag

SEQ ID NO: 14570 - DNA, 4074 bp, Oryza sativa
  Clone ID: TFbOSC400610j.C1.o9.fg
atgtcatggcacagggccggtgtcctgctgctaggggctcagtcctgcctacctgtcccgggggttccagccatggccggcagcatcaaccgtcgtggtctggacctgactggcttcattttggagctgcggggcatgtgcgttgtcctggggtatccgcatggagtggactaccagggcaagcagctcccggagcaggagggtgacgatgcagagccccacgctgcttgggaggtcactgcagtgatcctcactggctcacccgagaggacttcgttggcagtcaccgcgggtggagattctttctccgccacttgccagaacgccgctctcctcgccatcggcactcctcaccagcgctacccggacgagttgcagcactcgccctaccgctaccaccctcgtcgcggaggagcccgtgactacgccaccttcagggatgctagctcggaggatgacgctaccatcatgcacctggcgcgcatggtggaggcgtacgacgcgcctcgtatcgacttccatcagatgtcatgggtgattagttttaatagtcagctctctctgtttgccgggtctgtgtgggattttcatatggtgacaaccaggagaagtgctactaccggtgatggcaaccaacccgaaggtagcaaccacaacaaccatggcagcccacctccacctcctcccccgcctccaccaccaccaccagacaccaactccatcctcatccaaatcctcgcccagcaggccaacatgatggctgctttcctccaccacatccaaaatccgccacagcataatgctccacctccaccaccacccccgcaacattctaaactcgcagagttcctccgcatccgcccgcctatcttctctagctccaataaccccgtggatgctttggattggttgcatgccgtggggaaaaagttagacaccgtgcagtgcaacgatgaggagaaagtcatctttgccgctcaccaactgcaggggcccgcatctctatggtgggaccacttccaggctatgcagccagaaggacagcctattacttgggcccgcttcaccgccgctttccggaggacccatgtgcccgctggaatcatggcccttaagaaaagggaattccgagagttgaagcaagacaaccgctccgtgatggagtatttgcatgagtttaacaacctggcccggcacgccccggaggatgttcgaatggaccctgagctgtccgtgcgtctggtctccggggactatccagatttccagcgtttggtggacaagagcatccgcttggaagccaagcacaaggaactggagtcgcacaagagtcgcctagcgaatttccgcaatcaacagggggctaaccaaagggtccgctacaccaatccctatccagggggatccttctcgcagcagcagcagcagcaaccacgctccgcgccccgacctcaattcgtggtgcgcatcccacagccgcagcaacagcagagtcagcaagggacccgtgcgccccgtcctcctacgccagccgtgcagcctggacaaggccgcagagacattcaagttcagcagcgtctgtgtttcaactgcttcgagcccgggcactttgtggataaatgcccaaagccgaggcgccagcaaggccaagcgcctccccgccccaacaacggtggtaaggatgtcattcggggtcgtgtgaaccacgtgaccgccgaggatgtgctgacaactccagacgtcatcgtgggtacgttcctcattcattctacccctgctaccattttgttcgactctggagcttcccactcgtttatatctgtgccattcgtggggagaaatcagttgggggtagaaaggcttaggaaccctctgctcatcaccacccctggaggggttatgacaacaaagtattatagccctgccgttcctatagaaatccagggaattccttttccctcggatctgattcttctagacaccaagaacttggatgtgatccttgggatggattgtgagttcggagatgtgtttccggaagaactacccggtatgccgcccaagcgagagattgagttccggatagatcttgctccaggaaccactcctctgtacaagcgaccctaccgtatggcagcaaatgaactggccgaagtcaagaaacagttggaagagttgaaagaaaaggggtatatacggccgagcacttcgccctggggtgctcccgtgatttttgtggaaaagaaggacaagacaaagaggatgtgtgttgactacagagctctcaatgaagttactatcaaaaacaagtaccctcttccccggatcgatgatctgttcgatcagcttaaaggtgccactgtcttttcaaaaatcgatcttcgctccggatatcaccaattgcgtattcgtgaagaagatatcccgaagacctcattcaccacgcgatacgggctgtatgaattcacggtgatgtcgttcggtctaaccaatgctcctgccttcttcatgaacttaatgaacaaagtgttcatggaatatttggataagtttgttgtggttttcattgacgacattctggtgtactcacaatcagaggaagaccatcagcagcatctccgtctggtgttgggaaagttgcaggaacatcaattgtatgccaagcttagcaagtgtgagttctggttgtccgaagtcaaattcttagggcacaagcaacccaagacagtcactcaagtccgcagctttttgggtttggccgggtactaccgaagattcatcgagaacttctccaaaatcgctcgacccatgacacagttgctgaagaaagaagaaaaatttgtgtggagcccgcaatgcgagaaagcgttccaaactctcaaagaaaagctggtttcctcgccagtgttgatcttaccggatactcataaggacttcctggtgtactgtgacgcttcgcgccaaggattggggtgcgtattaatgcaggaaggtcatgtggtagcctatgcctcacgccagcttcggcctcatgaaggcaactaccctacccatgatttggagttagccgctgtggttcatgctctaaagatctggcggcactatctcattgggaatcgctgtgaaatatatactgatcataagagtttgaaatacatcttcactcggtcggatctgaatcttcggcagagaagatggttagaactcatcaaggattatgatgtgggaatccactatcatcctgaggatgaacacggaaccctatggaacggaaatcgggtatgcattccagacgacagagaacttaaacagttgatacttcaggaagctcacgaaagtccttattccatccaccctggcagtacgaagatgtacttagacttgaaagagaaatactggtgggttagtatgaagcgggaaattgcagagttcgtggccctttgtgatgtgtgccagcgtgtcaaggcagagcaccagcgaccggccagacttctccaacctctccaagtagcccggtttattcctgtgaagaccacctatggagggaacaaactagctgaactctacttcgctaggatcaagaaactccaagaagagttggatacccgattaaatttcagcaccgcgtatcacccgcagacagatggacagaccgagcgtcttaatcagatcctagaagatatgctctgtgcctgtgttctagattttgggaagacctgggataagagtctccccaatgccgagttctcctacaataacagctaccaagccagcatacaaatggcaccctatgaagcgttgtatggacgcaaatgccggacaccgctattgtgggaccaagttggggaaaaccaagtgttcgggactgatatcctgagagaagctgaagcgaagaaatgtcttcgagtgccatccgagcaggccgattcagagcaaattgaagttcgcgaagacttgacctacgtggagagaccggtgaaaatcctggacgccatggagcgcaggacaaggaaacgggtaatcagtttttgcaaggtccaatggagcaaccacgctgaggaagaagctacttga

SEQ ID NO: 14571 - DNA, 5367 bp, Oryza sativa
  Clone ID: TFbOSC400722j.C1.o34.fg
atgtcatggcacagggccggtgtcctgctgctaggggctcagtcctgcctgcctgtcccgggggttccggccgtaggcgggattgggtctgtactcttgtctatggctaggatgggttggaaactatgtcacgtcttccgtctgtataccgtggtgatggccggcagcgtcacccgtcgtggtttggacatgactggcttcgtcttggagctgcggggcatgtgcgtggtcttggggtatccacatggagtggattaccaggccaggccgctcccggagcaggagggtgaggacgcggagccccacgctggttgggaggtcactgcagtgatcctttctggctctcccgagcggacctcgctggcagtcaccgcgggtggagattccttccccgccgcttgccagaacgccgctctcctcgccatcggtacccttcaccagcgctacccggacgagttgcagcactcgccctaccgctaccaccctcatcgcggaggagcccgcgactacgccaccttccgggatgctagctcggaggatgacgctaccatcgtgcacctggcacgcatggtggaggcgtacgacgcggctcgtatcgacttccatcagatggtgcgccgcgggatggtcgagaacaacttgaagatcctggagctgcgtcaggagaacctgcagcttaagaaggacctagacgcggtggaggcgcagctgcatcagctcaagatcgcccagggagaggactgccgccccaagcgtcgccgcgtctgccgcagccagaagatcaccgcccgcaagagcacctccaggcccgagcttgttcgtcagtccctggcatggacctgcttcgtcgagacccctcatgccgagcctgcgcccgtggttccccaggagggggaagcctccggcgtaggtagcacggaggatgcgctgttgctcaccttccgtcctggcccgtcgcagcggagaaatgttaacaccggtgatggcaatcaacctgaaggcagcaaccacaaccaccagggcaacccacctccacctccccctccgcctccaccaccaccaccagacaccaacgccattctcacccagatcctcgcccagcaggccaacatgatgactgctttcctccaccacctccaaaatccgccacaacagaatgctccaccaccacctccacaacactctaaactcgccgaattcctccgcatccgcccacctaccttctcgagctccaacaaccccgtggatgcgttggattggttgcatgccgtggggaaaaagctagacacggtgcagtgcagcgaagaggagaaagtcatcttcgccgcccaccagctgcaggggcccgcatctctatggtgggaccacttccaggctacgcagccagaggggcaacctatcacttgggctcgcttcaccgctgctttccggagaacccatgtgcccgcgggagtcgtggctcttaagaaaagggaattccgagagttgaagcaaggcaaccgctccgtgatggagtatttgcatgagttcaacaacctggcccgttatgccccggaggatgtgcgggaagatgaggagaagcaagagaagttcttggcaggaatggaccctgagctgtccgttcgtctagtctctggggactacccggacttccaacgtctggtggacaagagcatccgcttggaagccaagcacaaggagctggagtcgcacaagcgccgcttggcgaacttccacaatcaacagggtgctaaccaaagggtccgctacaccaatctctacccagggggatcctcctcacagcagcaacaacagcagcagcaacctcgctccgcgcctcgacctcaattcgtggtgcgcgtcccacagccgcagcagcagcagaatcaacaagggactcgtgcgccccgtcctcctacgccaactgtgcagcctggtcaaggccgcagggacgctcaaggccagcagcgtctgtgcttcaactgcttcgagcctgggcactttgtggataaatgcccaaagccgaggcgtcagcaaggccaagcgcctccccgctccaacaacggtgggaaggacgtcatacgaggtcgtgtgaaccacgtgacggccgaggacgtgctgacaactccagacgtcatcgttggtacgttcctcatccattccatccctgctaccattttgttcgactctggagcttcccactcgtttatatctgtgccattcgtggggagaaatcagttgggggtagaaaggcttagaaaccctctgctaatcaccacccctggaggggttatgacagcaaagtactatagtcctgccgtccctatagaaatccaggggattccttttccctcggacctgattctgctagacaccaagaacttggatgtgatccttggaatgaattggttggctcaattccaaggagtagtggattgcgcgggacgcacggtcactctgtaccgagggccggaacaaccggttgttttctttgcacccccaacctctgtcagaagttcagaagtgcatcagatagggctgtcagaaatccccatagtcagagagttcggagacgtgtttccggaagaactacctggtatgccgcccaagcgagagattgagttccggatagatcttgctccaggaaccactcctctgtacaagcgaccctaccgaatggcagcaaatgaactggccgaagtaaagaaacagttggaagagttgaaggaaaaggggtatatacgtctgagtactttcccatggggtgctcctgtgatttttgtggagaagaaagacaagacgaagaggatgtgcgttgactacagagctctcaatgaagtcaccatcaagaacaagtaccctcttccccggatcgatgatctgttcgatcagcttaaaggtgccactgtattctccaagatcgatcttcgttccggatatcaccaattacgtatttgtgaagaagatattccgaagaccgcattcaccacgcgatacgggctgtatgaattcacggtgatgtcgttcggtctaaccaatgcacctgccttcttcatgaacttaatgaacaaagtgttcatggaatacttggacaagtttgttgtggttttcatcgatgacattctgatatactcacaatcagaggaagaccatcagcaccatctccgtctggtgttgggaaagttgcgggaacatcaattgtatgccaagcttagcaagtgtgagttctggttgcccgaagtcaaattcttggggcatgtgatatctgctaagggagttgctgtggaccccgaaacagtgaccgccgtcaccgattggaagcaacccaagacagttactcaagtccgcagtttcttaggtttggcaggatactaccggagattcatcgagaacttctccaaaatcgctcgacccatgacacagttgttgaagaaagaagagaaatttgtgtggagcccgcaatgcgagaaggcgttccagactctcaaagaaaagctggtttcctcgccggtgttaatcttgccggatactcgcaaggatttcatggtgtactgtgatgcttcgcgccaaggattcgggtgcgtgctcatgcaggatggtcatgtggtggcctatgcctcacgccagctacggcctcatgaaggcaactatcctacccatgatttggagttagccgcggtggtgcatgctctaaaaatctggcggcactatctcattgggaatcgctgtgaaatatatactgatcataagagtttgaaatacatcttcactcagtcggacctgaatcttcggcaaaggagatggttagaactcatcaaggattatgatgtgggaattcactatcatcctggtaaggccaacgtggttgccgacgctctaagtcggaaaagccattgcaacactcttaacgtccgtgacatcccacccgaacttaatcaacagatggaagccctgaacctaagcatagttggtcgtggattcttggctgcgttggaagccaagcctaccttgctcgaccaaatccgcgaggctcagaagaatgacccggacatgcatggactcctcaagaatatgaaacagggtaaagccgctggtttcacagaggatgaacacggaaccctatggaacggaaagcgggtatgcgttcccgataacagagaacttaaacagctgatacttcaggaagctcacgagagcccttattccattcacccgggcagtacaaagatgtacctagacttgaaggagaaatactgcgtgtcaaggcagagcactagcgaccggccggacttctccaacctctccaagtaccagaatggaaatgggatgaaattgggatggatttcatcaccggacttccaaaaacccaaggtagctcaatttattcctgtgaagaccacctatggagggaacaaactagccgagctctacttcgctaggatcgtgagtctacatggcgttcccaagaaaatcgtatctgataggggaagccaattcacctctcacttttggaagaagctccaagaagagctgggtacccgattaaatttcagcaccgcgtatcacccgcaaacagatggacagaccgagcgtctaaatcagatcctagaagatatgcttcgcgcatgtgtactagatttcgggaagacctgggataagagtctcccctatgccgagttctcctacaataacagctatcaagccagcatacaaatggcaccttatgaagcgttgtacgggcgcaaatgccggacaccgctcttgtgggaccaagttggagaaagccaagtgttcgggactgatatcctgagagaagctgaagctaaagtcagaatctttcgggataatctaaaggtggcacagtcccggcagaaaagttatgcagataaccgtcgccgtgacctggaattcgcagtgggtgattttgtataccttcgggtcacgccattgcgaggtgtacacaggtttcagacgaaagggaagcttgcacctcggtatgtgggtcctttccgtatccttgctcggcgcggagaggtcacttaccagctggagctgcccgcctccttgggcaacgtgcatgatgtgttccatgtgtcgcaacttaagaaatgtcttcgagtgccatccgagcaggccgactcagagcaaattgaagttcgcgaagatttgacctacgtggagaggccagtgaaaatcctggacaccatggagcgctggaccaggaaccgggtaatccgtttttgcaaggtccagtggagcaaccacgctgaagaagaagctacctgggagcgtgaagacgagctgaaggcagcccatcccgatctcttcgccagttcttccgaatctcggggtcgagattccgtttaa

SEQ ID NO: 14572 - DNA, 1989 bp, Oryza sativa
  Clone ID: TFbOSC900139j.C1.o9.fg
atgtctgcacctggagccgccgccgccgctggagccactgtcgccatccctgaagatggcgcgccgggagccggagccgctgcgaacgtcaacgtcaacggaggcagttctgcctcacaatccagcggagggacattctcggggtcattttcggtagttggctttgctgctgcactgaaaccacatgcatttgatggttctaactataagaggtgtaaagcacgtgcactattgtggttgacagcgatgcaatgcttctatgtttcacgcggtatacgaagtgaaccacctctctctcctgaggaagaggttaagttcgaggcttcggattgcctgttccgtggggcattgatcagtgtactcgctgacaacatagtggacgtgtacatgcacatgccttctgggaaggacatgtgggatgcacttgaggccaagtttggagtttccgataccggcagtgagctgtatgtcatggagcagttctatgactataagatggtcgatgaccattctgtagtagaacaagctcatgagattcagatgctggctaaggaacttgagaacaacaactgtgagttgccggacaagtttgtagcgggtggcattattgccaagttgccaccttcttcgtcggactttgccacttctctaaagcacaagagacaagagttcagtgtttctgatctcattggctctttgggtgttgaggagaaggcgagggcaaaggacaaccggggcaaaaaggttgagcgaggttctagtgccaatatggtacagaagaagaacccacatgcatcccacaacaacaagaaagtcaagcctgatgtcaaatccaaggctacaatcaattttaagaagaaaggcaagggaaaggcaaagggagactgctttgtgtgtggcaagtctgggtattgggccaaggactgtcctgagtgcaaagacaggaagtctgccaacatggtcgggagaggttcctccttgttgatgggaaacgggtcgcttgcggctgttcatggtgttggtacagtcgatctgaagtttacttcgggaaagaccgtgcagctgaagaacatgcagcatgtcccttcaataaagaagaatcttgttagcggctctctattgtgtagagaaggttttaggcttgcgtttgaatccaataaatgtgtcgtatctaaatatggaacttttgttggaaaaggttatgacagaggaggcttgttccgctcttctttggatgacatgtgtaataatcataatgttgtgaaccatattagcaagaatgatgagtctaatgtgtggcattcgcaactctgtcatgacgcctccctattcaccccaatcaaattgggtggccgaagaaagagccgtactctaactgagatggtgaatgccatgttagacactgcggggctttccatggaatggtggggtgaggcaattttgactgcgtgtcatatcctgaataaaattccaatgaagcataaggaagtgacaccattcgaggaatggaaaaggaagaaattaaacctcccatacctacgaacatggggctgtttggccaaggtaagtgtacctatagccaaaatgcgaaaacttagaccaaatactgttgattgtgtgttccttggttatgttattcatagtgtgggttatagattcttaatagtaaactctggagtacccaacatgcgtgttggtacaattattgagtccagagatgctacattctttgagaatgaatttcccatgaaacatacacctagcacttctagtcaagaaactgtcataccccatgagcactttgcaccgatagaacacaatgatcaaacgcctgaggaaaatcctgaggaggacaacattgtagatactcgtaagagtaagagacaaagggttgcaaaatcctttggagatgactacgttgtatacctcgtggatgacaccccaagaatcatagaagaggcatattcatctcctaacgctgactactga

SEQ ID NO: 14573 - DNA, 260 bp, Oryza sativa
  Clone ID: TFbOSC100123j.C1.o2.np
atgtcgagaatcagacttatgtataaatgggctcagaattgacacgatgaactgggccaaaattcacaagtttgcgcatgggagcaatagaggaggccacttgccgattttgggccaggctggcccagcccatggttcggccaaacccaccacggcgccattcgatccagggttctcctggacggctgggattgactccctatggcggttggagggtatttccgaccattccaaccgccacaaccgtcattctcaagcta

SEQ ID NO: 14574 - DNA, 1284 bp, Oryza sativa
  unsure (1)..(1284): unsure at all n locations
  Clone ID: TFbOSC15733j.C1.o1.np
ncaatccttgccaacagggcaaaataatgatgcttccctccccaatccaaaatccgcaaaacttattgttccacacaccccccacaacatatacctggcggagttcctcggaatcgccccacttctttttttagctccaacaaccccaggatgcgttggattggttgcatgccgtggggaaaaagctagacactgtgcagtgcagcgatgaggagaaagtcatcttcgccgcccaccagctgcaggggcccgcatctctatggtgggaccatttccaggctacgcagccaagaggggcaacctattacttgggcccgtttcaccgccctttcgggagaacccatgtgcccgccggagtcgtggcccttaagaaaagagaattctgagagttgaagcaaggcaaccgctccgtgatggagtatttgcatgagtcaacaacctggcccgttacgccccggaggatgtgcgggaagatgaggagaagcaagagaagtacttggcaagaatggaccctgagctgtccgtccgtctagtctccggggactatccggatttccaacgtctggtggacaagagcatccgcttggaagccaagcacaaggaactggagtcgcacaagcgccgcttggcgaattgccgcaaccaacagggtgctaaccaaagggtccgctacaccaatccctatccagggggatcctcctcgcagcagcaacaataacagcagcaacctcgctccgcgcctcgacctcaattcgtggtgcgcgtcccacaaccgcagcaacagcagagtcagcaagggactcgtgcgcctcgtcctcctacgccaactgtgcagcctggccaaggccgcagggacgcttcaggtccgcagcatctgtgcttcaactgcttcgagcccgggcactttgcggataaatgcccaaagccgaggcgtcagcaaggccaagcgcctccccgctccaacaacggtgggaaggatgtcattcggggatgggtgaaccatgtgacggccgaggacgtgctgacaactccagacgtcatcggtggtacgttcctcattcatttcattcctgctaccatttttgttcgacttctggagcttcccactcgtttatatttgtgccattcgtggggaggaatcagtttgggatagaaaagcttaagaaaccctctgcttcataaccacccctggaggggttatgacaacaaagtattataattcctgccggccctatagaaattaaggggattcctttttccttccccctctctttgttccgcgcg

SEQ ID NO: 14575 - DNA, 2348 bp, Oryza sativa
  Clone ID: TFbOSC900144j.C1.o4.np
atgtcatggcacagggccggtgtcctgctgctaggggctcagtcctgcctacctgtcccgggagttccggccgtaggtgggattgggtcggtactcttgtctatggctaggatgggttggaaactatgtcacgtcttccgtctgtataccgtggtgatggccggcagcgtcagccgtcgtggtttggacatgactggcttcgtcttggagctgcggggcatgtgcgtggtcctggggtatccacatggagtggactaccaggccaggccgcttccggagcaggagggtgacgatgcagagccccacgctggttgggagcggacttcgctggcagtcaccgcgggtggagattctttccccgccgcttgccagagcgccgctctcctcgccatcggcactcttcaccagcgatacccggacgagttgcagcactcgccctaccgctaccaccctcgccgcggaggagcccgcgactacgccaccttccgggatgctagctcggaggatgacgctaccctcgtgcacctggggcgcatggtggaggcgtacgacgcggctcgtatcgacttccatcagatggtgcgccgtgggatggtcgagaacaacatgaagatcctggagctgcgtcaagagaatctgcagctcaagaaggacctagacgcagtggaggcgcagctgcatcagctcaagatcgcccagggagaggtctgccaccccaagcgtcgccgtgtctgccgcagccagaagatcaccgcccgcaagagcacctccaggcccgagcttgttcgtcagtccctggcgtggacttgcttcgtcgagacccctcgtgccgagcccgcgcccgtggttccccaggagggggaagcctccggcgttggtagcacggaggatgcgctgttgctcaccttccgtgctggcccgtcgcagcggagaagtgctaacaccggtgatggcaaccaacctgaaggcagcaaccaccaccaccagggcagcccacctccacctcctcctccgcctccaccaccaccaccacataccaacgccattctcacccaaatcctcgcccagcaggccaacatgatgactgctttcctccaccacatccaaaatccgccacaacataatgctccaccaccacccccacaacactctaaactcgccgagttcctccgcatccgcccacctaccttctctagctccaacaaccccatggatgcgttggattggttgcatgccgtggggaaaaagctagacactgtgcagtgcagcgatgaggagaaagtcatcttcgccgcccaccagctgcaggggcccgcatctctatggtgggaccatttccaggctacgcagccagaggggcaacctattacttgggcccgtttcaccgccgctttccggagaacccatgtgcccgccggagtcgtggcccttaagaaaagagaattctgagagttgaagcaaggcaaccgctccgtgatggagtatttgcatgagttcaacaacctggcccgttacgccccggaggatgtgcgggaagatgaggagaagcaagagaagtacttggcaagaatggaccctgagctgtccgtccgtctagtctccggggactatccggatttccaacgtctggtggacaagagcatccgcttggaagccaagcacaaggaactggagtcgcacaagcgccgcttggcgaattgccgcaaccaacagggtgctaaccaaagggtccgctacaccaatccctatccagggggatcctcctcgcagcagcaacaataacagcagcaacctcgctccgcgcctcgacctcaattcgtggtgcgcgtcccacaaccgcagcaacagcagagtcagcaagggactcgtgcgcctcgtcctcctacgccaactgtgcagcctggccaaggccgcagggacgcttcaggtccgcagcatctgtgcttcaactgcttcgagcccgggcactttgcggataaatgcccaaagccgaggcgtcagcaaggccaagcgcctccccgctccaacaacggtgggaaggatgtcattcggggatgggtgaaccatgtgacggccgaggacgtgctgacaactccagacgtcatcgttggtacgttcctcattcattccatccctgctaccattttgttcgactctggagcttcccactcgtttatatctgtgccattcgtggggagaaatcagttggggatagaaaggcttaggaaccctctgctcatcaccacccctggaggggttatgacagcaaagtattatagtcctgccgtccctatagaaattcaggggattccttttccctccgacaaatgaaggctacacgggctgcg

SEQ ID NO: 14576 - DNA, 5391 bp, Oryza sativa
  Clone ID: TFbOSC100588j.C1.o8.np
tcggcaatggatgtacgctgaccggcggtccaaagagttcattgacggcgtgcactattttttgagagtggccgaagctaacgggcaaaggggttttattcgttgtccatgcaataagtctaagaatcagaagaagtattctgcatccaggactattcatttccacttgtttgagtcggggttcatgccaagctataattgttggacatcccacagagagcaaggtgttgaaatggaagaagatgaagtggaagacgacaatattccggactttgctcagtacgttggatttgaaggaaatcaaacaggcgaggaggaaagggatgctgatggtaacgacgttgcggatgatctcggtcagatgttgcaggacgccaaggaggactgcgaaagtgaaaagggggcccataaattggacaagatgttagaggaccacagaacgtcgttgtacccaggttgcgagtaggggcacaaaaagttggataccactctggagttcttgcaatggaaggcaaaaaatggggttagtgacaagacatttggcgatttattgaaactcgtcaagaacattcttccagagggaaacaaattgctcgagacaatgtacgaggctaagaagatagtctgcccgctaggactggaagttcagaagattcacatatgtccgaatgattgtatcctatatcgcggtgaggagtatgagaacctagaagcatgccctgtttgcaaagcactacgatacaagattagacgagacgatccaggagaagttgacgggcagctaacaaagaagagaattcctactaaggtgatgtggtatttccctataataccacggctaaggcgtttgttcaggaacaaggggaatgctagaatgatgcgatggcatgttgaagagcgtcaataggacaggatgctgagacaccccgccgatggttcgcagtggcgaaacatcgacagaaaatttaaagaatttggaaaggacgcacgaaacatacggtttggtttgagtacggatggcatgaatccttttggagagatgagcagcggccatagcacttggcccgttacgatgtgtatatacaacctcccccctggctatgcatgaataggaagtacataatgatgccgattattattcaaggccccaagcaacctggtaacgacatcgatgtgtacctaagaccactggtcgaagatcttaaactgttgtggaaaaaggaaggtgtccccgtgtgggacgaggacaaacaggaggtgtttaacctacgagcgctgctgttcgtaaccatcaacgattggcctgcacttagcaaactatccggacagtccaacaaggggtacaaggcttgcactcactgtatggatgaaacagaaagtgtatacggaaagtcgaaagatacactggaagcacgtaatgatctgaagcatatggaacaacgcggcgaccttcacccggaaccaaaggagaaaggaagccattacttgagtccagccagctacactcttagcaaggcagagaaggaaagtatgtttgaatgcttggagagcataaaggtgccgtctggatactccacgaaggaaaagatgttcacaaacctaaagtctcatgactgtcacgtgttgatgatacaactgctaccagttgtaataaggggtatccttccagacaatgtccgggcaacaataacaaagctatgtgcattcatgaacgcaatttcgtagaaggtcattgatccggatagattagaagccctttagaatgatgtgaggtacatgggcgttctgaagaagtatgttcgtaaccgtgctcgtccagaggcaagcatcgccaagggttatgaaacagaggaggtcatcgaattttgcgtagaatttatcgaagaccttcgcccaatcggggtacctgaatcacgccatgaagggagactacagggaaagggaactctcggaaggaaagcaataatgacggtagacaacaatttattccgtaaagcccatttcacggttctgcaacaatcttcattggtagctccttacatcgaggagcacttggctctagttcgcgccaggaacatcggtaagtccgatgcatggattacacggcatcacattgatactttccccgcgtggctactacaacatctcgtgggtaacgagtcgatcaaccaacaacttaccttcctggcgaggggaccgtcctggtcgatcgcgacattccagggatatgagatcaatgggtacacattctacacgagagcccaagacatgaagagcacgaatcaaagcagcgctgttcgtgtcgatgccatgggacacgatggaacaactggcacgtattacggtgccatcgaggacatatgggaacttgactatggtcctctcaaggtccctctgttccggtgccaatcggttaggttgactggtggaggcgtaatgattgatgacagtgggatgacaacggttgaccttgacaaagttggatactcggacgaaccttttgtccttgccaatgatgtaacgcaagtcttttacgtgaaggatatgtctagcaaaggaaagaagggcagagggcctgacgagcctaagcgtcatgtggttctcctagtcaaaagaaaaatcgtcggagctgaggacaagactgacgaggattacgatcagttggatgggcaaccccctttcacggtgatgattgaccctagcatcctcctatcaaatgaagacaccccttactcacgcagcgatcacaaggagggaacaatatatttgaacgaggaagggagcgttgagagggatgcggaggggaaccaggaggggcacgtggaaagggatgtggaggggaaccaggaggaggaggctagtggaagtcaaccctccgttggacagaagaggggacgcgggcaacgaggtgccacgaagaagcttgagggtcggcacatcataacggaagtggacgaagacggccgacctagtgccccggcagaagccgccaagaactatgtacgtcacagcggttgggttgcgcgggataacgtgcctgttagtacggtctactggcgcagaacaagggcacgcggagatcatgagagctttgtcccagattcggagaaagagatgctgtggaccacaatgctcgagacattcacccttcccgcgggtacagaggacaaagtgaaaaggtggactctgaagaaaatggcagaacagtttcggagcttcaagggagatctgtaccagaaatatatcctgaaggggcagacaccgaacttcgacacattcccaaagctaagggatcactgggacgagttcgttgcatataagacaggtgaacaagggcaggcgatgatggaaagaaacaaagaaaatgccgccaagaagaagtaccatcaccacttggggtcaggcggctatagcgtcgcgatgccgaagtgggaggagatggaggctagcttgcttgagaggggtatcgaaccggccaccgctaattggccggaacgatcgaagttctggtactatgctcacggtggaatgctcaacccagctgatggctccctggtcttcggcgatcagatacgcgaggctgcgcgtcgactaacagacacagtggaagcctcttcttagggcacgttccgaccgaacagagagaaggacgagctgagtcggatgaggagcaagagagataccgaggcgaagattgcagatctagagttcagggtatcgagctacgagctcagcatgcaagaggaggtggcaaggaaggttgatgaatgcatggccgcacatcggtcccatgatccccagccgaccattcctcctgcaatggtgagcccgtcaggaaaccgtagcagctgcgcctcaaaggggcaggtggcgtcgggcatggccatcccaacggacccttcaggtacttaccactgtaggccgattgcagcaggatactccaaggtcgaagttgagttggtcgaagacgcgtacgaggacctcgagctggattaccctggaggagatggtgagacgcatctacgagacacaagccacaccattattctatggcgcaagcgatacatcatcctccctgggcgacaagcggcgtctcgtgcaccatctcctctggctccgccgtctcctcctcaggctccagcaccgtctcctcctcatgctccagcaccgtctccacctcaggctcctccggcaccttccaagtcaagggcaacccaagctccaccgcctgcccccacaagggcaataaagaaggcgaaagttgacaccgccaagaacaaggacccggggtacgattgcacgcaagaggagcttgaagcttacgtggcatcagaagtcaacagacaattcaagcctcgaagtccagaaaagaagattcctatagacccgagtgttaggaacttcttcaggggtatgtctgcacctgccaaggaggccataaagctatcggactatgagcgaacgctcaagaaagcatcttctggaaagtccaaaccagtccctcagcttggagagcaaccaaaccaggagatcgagccgttggtgactggtgaagattttggaatacaagaatttattaatgacaccgggctaactacggatcaattgctaggagacgcaccaatcgaaaaggcggaagtgaaatacatgtacgaactcggtaaaccgcttgtcaagcctgagctgctgcagtccctacccacacaaatgtacaagttccatcagctgtacatggagatgagcgccaccggtagagagatgattggagcaaggatcagggacacggacttcttgcaaggagatgacattctctggatcaatttcaagggaatctacgaactataccagctggacgccctcgacgtctctattatgagttgctggattttaatggagattcaaagggcctaacggcggggggttttcgatactggattcatcgaccctcggaaagtaaacgtcgcaatgctcgaccaatatccgcaagccacagaggacaatctcgtccatctcctgaaggcgcagcattacaagacgttcatactgttgccgtacaacacagagttaaacgtatatgactcaatggataaaaaagagtctacgtttgacaaggttttcgaacttatagacagggcttggtatcggttctatcatttggtccgcggcaaatggagagaaagacttaggcggaagttcaaatttccttttattcgtatgagggataacctgatcacacacaaggaatttatcgcggcggttcaagaacaactcatgggattcatcaataaacaaatccttgatcccaagggtgaattctactacgacggaaacacaattcataggtccttagcttctgagctagcgactactactacgtcgaaatcgtagcta

SEQ ID NO: 14577 - DNA, 5322 bp, Oryza sativa
  Clone ID: TFbOSC101237j.C1.o3.fg
atggaggaaaaatattctgcgaaaccatttgttttcgatggacacaattttgtcatttggaaggcacgaatggaggcctacctccagtcgcaagggcataatgtgtggaataaggttaaatcaccttacactgtgcccgatgatgctgacatcacgcctgcaaatgtggctcaggttgattttaattatcgtgcaagaaatgcaatcattggtggaatttcttctggtgaatttaattgtgttcaacaccacaagtccgctcatgacatgtggactgctctgtgcaatttccataagggaaacaatgatattcaattggttcgtcagaatcaatttcataaagaatatcaaagatttgagatgcacccaggagagtccattgattcttatttcaagcgttttggagaaattgtttcgaagttgagatctgttggaaaagaattttctaataatgataatgctcgccatcttttgaattgtcttgattatggtgtttgggaaatgaaagttacttccatcacagagagtgcacctctgagtgaccttaccatgggcaagctttactcaaagctaaaaacccatgagatggatattttccatcggaaaggcctcaaacactcgatggctttggtagctgatccctctggtagtacttcttctaatgactcagcttttgtgtgtggtggcttctctcttgccgctttacactcagtcactgaggagcaattagagaagattcctgaagaggatcttgctctttttgctagaaaattctcaagagcttacaaaaatgtgagagatagaaaaagaggaaaaaccaatgaaccatttgtgtgttttgagtgtggagagcctaaccacataagagtgaattgtcccaagttgaagaagaagagtgacaagacgaccaagaagcccgagggacaagggcgaaaggggaataaggatttgatgaagaaggcgatccataaggtcttggcggctcttgaggaggtgcagcttagcgacatcgactccgacgacgatgatcaagaaaagggggacaaggacttctccgggatgtgctgtctcgccaacaacgaggacttcatcaacctgtgtctcatggcacttgaggataaggatgactcatcggagcatcctgaggtatgtcttgatgatatcccttccttggatggttctctttgtgatgatttttgctcagataatgactctgttgatgatgaactaagcaaagaaagaatggcacacttgatgattgaaattagtgacaagtataggtcttctaagtataaaattgagaaactaaaatctgaaaatgatggtatggcgctagaaattgctaggcttcgatccatgattcctgaggaggatacctgttctacttgtgcttcatatctctctgaaattaatctcctcaaggataagttgaaatcatgtgctttaggagctgggaatccttctagtgctagtgttgcttgctctacttgctatgaaatgaaagttgatatgggtttgcttgagatggaattgaaagaactaaaagaaaaaaaatttcatgataggattggtaggtgtgaaaattgtcccattctcactagtgacaatgatgaattaagacaacaagttgccatgcttaggaccaagaatgatttgttagaatcttttgctactaaggaacctattcattcttcatgtgctaattgtgctatcctggaaactgaactaaaagatgctaaaactgtcattgattctatcaaatctattgattcttgttcatcatgcatttctctgaaagttgatcttgagtctgctaagagagagaacttttacctacaacaatctttagagaggataggtacccatgagatattaggtgtcacagatgggatgatagaactagctcaaaagcctataaccttcaagtctgcaggtttcattggaaacactagttctagttcacccaaaacctcagaaccaaagatggtacctatgactagcaagtctaagcctgtagagttacctagacccaaaaatccaaaacaagttgagcacaagcaaaaccagaaacaaaccaagcctgtagagaaaaccaagtatgagtgcacctattgtgggaaagctggtcatttggattttggagtggggagaagtaattcttggcttgtggactccggttgctcacgccacatgaccggtgaagccaagtggtttacttctctcactcgtgcatccggtgatgagaccatcacttttggggatgcgagcagtggacgcatgatggctaaaggaacaatcaaggtcaatgacaaattcatgctgaaggatgtcgcgcttgtaagtaagcttaagtacaatttgctctctgtttcacaactctgtgatgaaaatctagaagttcgtttcaaaaaggataggtctcgagttcttgatgcttctgaatctcctgtttttaacatttctcaagttggtcgagttttctttgctaactttgactcttctgctcctggtccttctcgttgtttcattgcctcagagaatagggatttgtttttctggcatcgtcgtcttggtcatattggctttgaccacttgtctcgcaatagtggtatggatttgattcggggtttgcctaagttgaaagctccgaaagatcttgtgtgtgcaccatgtcgtcatgggaaaatgacatcttcctcccacaagcctgttacaatggttatgacagatggaccgggacaactgcttcacatggatacggttggtcctgctcaggtccagtcagttggggggaagtggtatgtcttggttgttgtggatgatttctctcgctactcttgggtctattttcttgaatcaaaagaggaaacgtttggcttctttcagtctcttgctcgtagtttggctttggagtttcctagtgctcttcgagccattcgtagtgataatggctctgaattcaaaaattctgcatttgaatctttctgtgattcttctggagtcgaacatcagttttcttcgccatatgtcccacaacagaatggggtggttgagaggaagaaccgcacccttgtggagatggcacgaactatgcttgatgagtttactactccaagaaagttctggactgaagctatttctgctgcttgttttatctccaatcgtgtgtttttgagaactatcttgcacaagacgccatatgagctcagatttggtcgtcgaccaaaagtttcacatctcagggtcttcagttgcaagtgctttgttcttaaacctggaaatttggacaagtttgaatctcgatctgtggatggcatttttcttggctatgctactcattctcgggcttatcgagtttatgttctttcaactaacaaaattgtggagacttgtgaagtcacttttgatgaggctagcccaggagctagaccagaaatttcaggtgttccagatgaaagcatccttgtggatgaggattcagatgatgatgacgatgattccatttctccacctctagacagtacaccaccagtacaagaaaccggttctccatcgactacatcgccttcaggagatgcaccaactacatcatcttcagcagctgaggagattgatggtggcacatcaggaccaacagctccccgacacatccagaaccgacatccgcctgactcgatgatcggaggcctgggtgaaagggtaactaaaaatcggtcttatgaacttgtcaattcagcatttgttgcctcttttgagcccaaaaatgtttgtcatgctttatctgatgagaattgggttaatgccatgcatgaagagttagaaaattttgaaagaaacaaagtttggtctttggtagaaccttccttgggttttaatgtgattggaacaaaatgggttttcaaaaacaaactaagtgaagacggttcaattgttcgaaacaaagccagactagttgcacagggtttcacccaagttgagggcttggattttgaagaaacttttgcaccagttgctagattagaagctattcgaattcttttggcttttgctgcttcaaaaggtttcaagctttttcaaatggatgtgaaaagtgcttttctgaatggtgttattgaggaagaggtctatgtcaaacaacctcctcgttttgaaaatccaaaatttccaaatcatgtgttcaaacttgataaaactctttatggtttaaaacaagctcccagagcctggtatgaaagattgaaaacctttttgcttcaaaatggttttgaaatggggggagttgataaaactctctttactcttcatagtggcattgattttcttcttgtccagatatatgttgatgatatcatatttggtggctcctctcatgcacttgttgcccagttttctgatgtgatgagcagggaattcgaaatgagcatgataggagagttgactttcttccttggacttcaaatcaagcaaacaaaggaaggaatctttgtacatcagaccaagtactccaaagagctcctgaagaagttcgacatggccgactgcaagccaatcgccacccccatggcaactacttcatcgcttggtcctgatgaggacggcgaagaagttgaccagcgcgagtacagaagcatgatcggctccctcctctacctgactgcgtcaaggccggacatccacttctccgtgtgcctgtgcgcgaggtttcaggcttctccaagaacatcacatcgccaagcagtcaagtgcatcttccgctacatcaagtctacacttgagtacggtatttggtacccctgctcttctgccctttcagttcgagctttttcagatgctgattttgctgggtgtaagattgatcgcaaaagtacttctagcacttgtcattttcttggcacttctttggtctcttggtcctctcgtaagcagtcttctgttgctcaatcaacagctgaggctgagtacgtagctgctgctagtgcatgtagtcaagttctttggatgatttcaactctgaaagattatggtctgtctttctctggtgttcctctgctttgtgataatacaagtgcaatcaatattgcaaaaattccagttcaacactctaggaccaagcacattgagatacagtaccactttctccgagacaatgttgagaaaggtaccattgtgctagagtttgttgaatctgaaaatcaattggcagacatttttacaaaaccacttgatcgctctcattttgagttcttgcggactttcatttgcttaagtagcttgtgtgatcatgttatgctgttcaagcttgttgaaacctgcttaaattga

SEQ ID NO: 14578 - DNA, 1010 bp, Oryza sativa
  Clone ID: TFbOSC14140j.C1.o1.np
atgactaacaagactctccgtgaattcgctgctccctctgctgacaatgtgaccattgggccacaaattaacctgggagacgtggattttgatttgaagtctagcctcatcacgatgcgcaggctagccctttctgtggcaaccaaatgagaatgccaatgctcatttacagtagttcctagagatttgcagcacatacaccatgaagggtgtcagtccaaacaacgttaggctacgactgtttccgttttctctccttgggaaagcgaagaagtagttttatgctaaccatgctacgatcaatacctgggatagatgcttcacgacattcctctcaaagttctttccgatggaggcacgggaacgacttcaagaatatgtggccgcctgtcctcatcatgggatggatgactggctgatcttgcaaaatttctataatggactcactcccatgtcccatgaccacctagacacggcagctggatgagatttcttctcaaagacggttcgaggagccatcgatttgatagagaagatggtctctaatatgggttggagcgaggaacgactccaaacccgtcagcgaggcatgcacaccgtcaaggagatggaaatgctcgctgccaagatggacctcctcatgaaatgattggacgaccatgacaaaaggccacaaggcatcgtcaaagccttggactcacacgttacatgtgaagtctgcggcagcacgggtcattctgggaatgattgcccggaaacccatgaattggcgatgtacatgggcaacaacaacaatgggtatcgtccacaaggaggtcaggggtggaatcagccatgcccatattatcaaggagctaacaacaacggtaacttttctaaccaaccctccttgaaagatctcgtttttgtgcaagctaagaccactgatgctttaagcaaaaagctagctgccaattctcaattagctgccttagtacctgcaaatgagtctgggaggattccggggcagc

SEQ ID NO: 14579 - DNA, 2022 bp, Oryza sativa
  Clone ID: TFbOSC15762j.C1.o1.np
atgactaacaagactctccgtgaattcgctgctccctctgctgacaatgtgaccattgggccacaaattaacctgggagacgtggattttgatttgaagtctagcctcatcacgatgcgcaggctagccctttctgtggcaaccaaatgagaatgccaatgctcatttacagtagttcctagagatttgcagcacatacaccatgaagggtgtcagtccaaacaacgttaggctacgactgtttccgttttctctccttgggaaagcgaagaagtagttttatgctaaccatgctacgatcaatacctgggatagatgcttcacgacattcctctcaaagttctttccgatggaggcacgggaacgacttcaagaatatgtggccgcctgtcctcatcatgggatggatgactggctgatcttgcaaaatttctataatggactcactcccatgtcccatgaccacctagacacggcagctggatgagatttcttctcaaagacggttcgaggagccatcgatttgatagagaagatggtctctaatatgggttggagcgaggaacgactccaaacccgtcagcgaggcatgcacaccgtcaaggagatggaaatgctcgctgccaagatggacctcctcatgaaatgattggacgaccatgacaaaaggccacaaggcatcgtcaaagccttggactcacacgttacatgtgaagtctgcggcagcacgggtcattctgggaatgattgcccggaaacccatgaattggcgatgtacatgggcaacaacaacaatgggtatcgtccacaaggaggtcaggggtggaatcagccatgcccatattatcaaggagctaacaacaacggtaacttttctaaccaaccctccttgaaagatctcgtttttgtgcaagctaagaccactgatgctttaagcaaaaagctagctgccaattctcaattagctgccttagtacctgcaaatgagtctgggaggattccggggcagcggactcctccattgaaaatgttaaggtgatcaccacgaggggaggtaagtccacttgtgatctgccatatcctaaccctgtaggaactaacaaggaagcgccatctggtacttcagctgacaaaaagattcagctagagaaggttgtgccacaagcatactatgacacgcaattgctgccatttcctcaaaggaacaggaaaccgtcagtggacgagcagtttgctcgttttgttgaagtgatctagaagattcacatcaatatgccgtagttggatgctatataagtgctaacatacgcacgttacctcaaggatatcctcaacaacaagagaccgctcccaacaatggaggtggtcaagctgatggagcagtgcaacaatgccatactccacaagttcccggaaaagaagaaagatccggggtgtcctacgatcacctgctcgatcggggcacaacagttcaaccaagccttttgtgatattggagcaagtgtcagcgtcatgcccatggacgtctttgaaaagctcaacttcacgatgttggcaccaacgccaatgcacctgcagctggccgactcattagtccgttacccaacagggatagcagaggatgtgccggtcaagatacgggattctttcatcccagatggtttcgtggtgctggacatggaaacaggaaaggaaacactgctcatcttggtgcatccattccttaaaactgcaggagccaacattgatgtgggaacgggaagtatccgtttccgtattaacgggaaggaagagaaatttgagtttcagccaaggactaaacactgctccatggtcagaatcaagtacgggccaaacctacaaaatatcctggtgaagttcatgcaaaatttcctggaaaaggaaaccacgtttcccaggaaccgttattggaacacactggtaaaacctagtgttccggccaagaagctagagcagccggcttagaagaagttgtctcccgcaccaaagccaaagaaggtg

SEQ ID NO: 14580 - DNA, 2301 bp, Oryza sativa
  Clone ID: TFbOSC19000j.C1.o1.fg
atgtcatggcacagggccggtgtcctgctgctaggggctcagtcctgcctgcctgtcccgggggttccggccatggccggcagcgtcagccatcgtggtctggacatgactggtttcgtcttggagctgcggggcatgtgcgttgtcctggggtatccgcatggagtggactaccagggcaggccgcttccggagcaggagggtgacgatgcagagccccacgctgcttgggaggttactgcagtgatcctcactggctctcccgagcggacttcgttggcagtcaccgcgggtggagattctttccccgccgcttgccagaacgccgctctcctcgccatcggcactcttcaccagcgctacccagacaagttgcagcactcgccctaccgctaccaccctcgccgcggaggagcccgcgactacgccacctttcgggatgctagctcggaggatgacgctaccatcatgcacctggcgcgcatggtggaggcgtacgacgcggcccgtatcgacttccatcagatggtgtgccgtgggatggtcgagaacaacctgaagatcctggagctgcgtcaggagaatctgcagctgaagaaggacctagacgcagtggaggcgcagctgcatcagctcaagatcgcccagggagaggtctgtcgccccaagcgtcgccgcgtctgccgcagccagaagatcaccgcccgcaagagcacctccaggcgcgagcttattcgtcagtccctggcgtggacctgcttcgtggagacccctcgtgccgagcccgcgcccgtggttccccaggagggggaagcctccggcgttggtagcacggaggatgcgctgttgctcaccttccgccctggcccgtcgcagcggagaagtgctaataccggtgatggcaaccaacctgagggcagcaaccacaacaaccatggcagcccacctccacctcctcccccgcctccaccaccaccaccagacaccaacgccattctcacccaaatcctcgcccagcaggccaacatgatgactgctttcctccaccacctccaaaatccgccacaacagaatgctccaccaccacccccacaacactctaaactcgccgagttcctccgcatccgtccaccaaccttctctagctccaacaaccccgtggatgcgttggactggttgcatgccgtggggaaaaagctagacactgtgcagtgcagcgatgaggagaaagtcatcttcgccgcccaccagctgcaggggcccgcatctctatggtgggaccatttccaggctacgcagccagaggggcagcctattacttgggcccgcttcaccgccgcttttcggaggacccatgtgcccgccggagtcatggcccttaagaaaagggaattccgagagttgaagcaaggcaaccgctccgtgatggagtatttgcatgagtttaacaacttggcccggtacgccccggaggatgtgcgggaagatgaggaaaagcaggagaagttcttggcgggaatggatcctgagctgtccgtccgtctagtctccggtgactatccggatttccaacgtctggtggacaagagcatccgcttggaagccaagcacaaggaactggagtcgcacaagcgccgcttggcgaatttccgcaatcaacagggagctaaccaaaggatccgctacaccaatccctatccagggggatcgtcctcgcagcagcaacagcagcagcaacctcgctccgtgccccgacctcaattcgtggtgcgcgtcccacagccgcagcaacaacagagccagcaagggacccgtgcgccccgtcctcctatgccaaccgtgcagcctggtcaaggccgcagggacgttcaaggtccgcagcgtttgtgcttcaactgcttcgagcctgagcactttgcggataaatgcccaaagccgaggcgccagcaaggccaagcgcctccccgctccaacaaaggtggtaaggatgtcattcggggtcgtgtgaaccacgtgacagccgaggacgtgctgacaactccagacgtcatcgttggagttgctgtggaccccgaaacagtgaccgccgtcaccgattggaagcaacccaagacagtcactcaaattcgcagtttcttaggtttggcaggatactactggagcgtgtcaaggcagagcaccaacgaccggccggacttctccaacctctccaagtaccggaatggaaatgggatgaaattgggatggatttcatcaccggacttccaaaaacccaaggtggatatgattctatatgggtag

SEQ ID NO: 14581 - DNA, 4482 bp, Oryza sativa
  Clone ID: TFbOSC23329j.C1.o1.fg
atggtgaagacaaggaatggttcccgtgactccaacaacgccagtggcagcgaagagccgatcgatggaccacgtgccagcaatgcacctaatagcagtccgtccccaccgcccgagaacccaacgatcgctcaggtgttggacaatcagactcagatgatggcaatgatgatgcaacagatgcagcaacagtaccatcaggtgctgcagcaggtgcagcagcaagcacagcagcagcagcagaacctgcagtttggtcctccacctcctcagtccaaactgttagaatctcttcgtgtcaagccgcccaccttctcaagcaccaccaacccaatcgaggcccacgactggcttcatgccattgagaagaagctgaatcttttgcaatgcaacgagcaagagaaggttgcttttgctacacaccagctgcaaggtcccgcttctgtttggtgggacaactacatggtgacccgtccagcttgggcagaagttacttggacagagttttgtcatagtttcaataaagcacaggttcccgagggaattgtggcacaaaagaagagagagttccgttccctgcaacaaggaaccagaacagttatagagtatttgcatgagttcaaccacctcgcgcgctacgctcctgaggacgtgcgtaccgatgccgagaggcaggagaagtttctgtctggtcttgatgatgaattgattaaccagttgatctctagagattatgaggactttgagaagctggtggataaggctatccgtcaggaggagcactgtaacaaaataaaccgtaagaggaaggcagctcagttcaggacttcccaggggaagagtcagaagcctcgtttcacgatgggacatcacggtggaccttccaccatgattatccggcagtaccgtccctaccacccgggtagcttcaacaagaaccaccatagtggcagtcacaacaacagtgagcagcacagcctcaaccctactccaagttcattaaagattccagcccaatcagttcagccagctctgccagaacagcccaagaggttgggagaaaaacccaaactctgcttcaattgtaacaaacccggacacacggttggaaagtgcccgaagccaagacgtgctggacccaagttcgttcaggcccgtgttaatcatgcatctgcagaggaggcgcagtcagcaccagaggttatattgggcacattccccgtcaactcgacactggcagtaatattgtttgattctggtgcaacccattccttcatttccaagcgttttgctggtgcacatgggttatctttagtgaagcttaagataccaatgcgagttcatactcctggaggtggcatgaccacaactcactactgcccatctgtgacagttgaaattcaagggttgatttttccagccaacctcattcttctcgaatccaaggacctagatgtcatacttggaatggattggttgacaaggcacagaggagtgattgattgcgccagccgcaccatcaagttgaccaatgcaaaaggagaggaggtaaccttccagtctccagtgccgcggaagccagggattagtttaaaccaggctgctggtgaagaacaagaggtagcagtggagaaaaccactaagaagttggaggatattcccatagtcagagagtatccagaggtttttccggatgatctgacaacaatgccaccaaaaagggatatcgagttccggattgacttggtacctggaactgcaccgatccacaagagaccttacagaatgggagccaacgagttggcggaagtcaagaagcaagttgatgaacagttacagaagggatacatccgcccgagcacatcgccttggggtgctccggttatctttgtggagaagaaagacaaaaccaagaggatgtgcgttgactaccgcgcactcaatgaggtcaccatcaagaacaagtatcctttgccaaggattgatgatctgtttgatcagttgaaaggagctactgtgttctctaagatagacctgcgatcaggctatcaccagttgaggatccgcgaagaggatatttcaaagacagcattcatcactcggtacgggttgttcgaatgcacagttatgtctttcggactcactaatgcacctgccttcttcatgaatttgatgaacaaggtgtttatggaatttctagacaagtttgtcgtggttttcatcgatgacatacttatctactccaagtccgaggaagaacatgagcagcatcttcggctggtacttgaaaagttaaaagagcaccagctatatgccaagttcagcaagtgcgacttctggcttaaggaagttcagtttctcggtcacatcgtgaatgctcaaggagtagctgtggatccagcaaatgtggagtcagttaccaaatggaccccaccaaggacagtcactcaagttcggagtttcttaggacttgcgggctattaccgccggttcattgagaacttctctaaaattgctaagccaatggcacagctattgaagaaggaagaaaagtttatctggtccgctgaatgcaataggagttttgaagaactcaaacgacggttggatggcaaagtggtttcttatgcttcacggcagttgcgtcctcatgaaggcaactacccgacgcacgatctggaattggccgcagtcgttcatgctttaaagatttggcggcactatctcatcagtatccgttgtgaggtatatacagatcacaaaagtctaaagtacatcttcacccaacctgatctgaatctccgacaacgaagatggttggagctaatcaaagattatgatatgggaatacactatcatcccggcaaggctaatgtggttgcagacgccttgagcaggaagagtcactgcaacgtcgcatgggtagaggaactatgctgtgaggttcaacgtgatttggaacatttgaaccttggtatagttgagcacggattcgtggctgccctagaggcacagcccacactggtggagcaggttcgcatagctcaagcaagtgatcctgaaatagcggagctcaaaaggaacatgagagttggaaaagcccgaggttttgttgaggatgaacaaggaacaatctggacgggagaaagattgtgtgtacccgaaaacaaggaattaaaagacctgatactaaccgaggctcatcaaactcagtattccattcatcccggtagtactaagatgtaccaagacctcaaagagaagttttggtgggtcagcatgagaagggaaatagctgaattcgtagcactctgtgacgtctgtcaacgagtaaaggcagaacaccaaaggccagcaggtttgctacagccacttcagattccagaatggaagtgggaagaaatcggaatggatttcatcaccggtttgcccaggacgtcatcggggcatgattctatttgggtagtcgttgaccgactcaccaaagtggctcacttcattccggttcacactacctactcagggaagaaattagcagaactctatctggcaagaattatgtgtttacatggtgtacctaagaagatcgtgtctgatcgaggaagccaattcacttcaaagttctggcagaaattacaagaagaattgggaacccggttgaatttcagcactgcttaccatccacaaacagatggccagactgagcgagtcaatcaaatactagaggatatgttgagagcatgtgcgcttgactttggtggagcatgggacaaaagcttgccgtatgccgagttctcttacaacaacagttaccaggctagtctgcagatggcaccgtttgaagcactgtatggacggaggtgtcgtactccgctcttctgggatcagacaggggaacgccagttgtttgggacagaagttttaaatgaggcagaagagaaagtcagagttgttagggaaagattgagaatcgcgcaatctcggcagaaaagctatgcagacaaccgccgaagggagctcgctttcgaaacaggggattatgtgtatctccgtgtcactccgctcaggggagtacatcgcttccaaaccaaaggaaagttggcaccacgctttgtgggaccatacaggatcttggaacgtagaggtgaagttgcttaccagcttgagcttccctccaacatgcttggcatccataacgtgttccacgtctctcagttgaagaaatgtttgagagttcccgaggaacaggcaagtccggatcacatcgaaattcaggaagatctgacgtatgtggagaagccgacccgtatccctgaaaccagcgagagaaggaccagaaacaaagtaatcagattctgcaaggttcagtggagccaccactcagaggaagaggccacttgggaaagagaagatgagttgaaggccacccacccatacctcttcgccagctcttccgaatctcggggtcgagattccgtttaa

SEQ ID NO: 14582 - DNA, 249 bp, Oryza sativa
  Clone ID: TFbOSC23329j.C1.o2.gm
atgaggggcgcgacgtggagcggagaaggcggggcggcagcggcggttgccggtgtgggcgcacggctggaggttggggacgacccgacaggtggggcccacctgtcggcgtcccgaagggatggggagggggcgcgggccggcccaagaaggagatgggcgcacgcggcggcgggtgtgaaccggaatgaagtgagccactttggtgagtcggtcaacgactacccaaatagaatcatgccccgatga

SEQ ID NO: 14583 - DNA, 3147 bp, Oryza sativa
  Clone ID: TFbOSC28109j.C1.o1.fg
atggccagcaagactctttgcgagttcgctgctccctctgctgccaatgtggccgtcgggccgcaagtcaacataggagatgtggatttcgacttgaagtccagcctcatcacgatggcgcaggctagcccgttctgtggcaagcctaatgaggatgccaacgctcatctgcaacaattccaggagatatgtaccacgtacaccatcaagggcgttagtcctgacgccgtcaggctgcggctgtttccgttgtccctcctcgggagagcaaagcagtggttctatgccaaccgtgctgctatcaacaccagggataaatgctctacggcattcctctcgaagttcttcccgatgggcaaaaccaacgcccttcatggacgaatttccagtttccagcagacaagggacgagtctgttccagaagcatgggaacgactgcaggagcacatggccgcctgtcctcatcatgggatggacgactggctaatcctgcagaatttttacaatgggctcaccccaatgtcccgcgatcacttggacgcggcagctggaggagccttcttctctaaaacggttcaaggagccgttgaactcatagagaagatggtctccaatatgggttggagcgaggaacgactccagacctgtcagcgaggcatgcacaccgtcaaggagacggagttacttgctgccaagctggacctcctcatgaaacgcttggacgaccatgagaaacggccacaaggcaccgtcaaggccttggactcacacgtcacgtgtgaagtctgcggcagcacgggtcattctgggaacgactgcccggaaacccgtgaggaggcgatgtacatgggcaacaacaacgggtatcgtccacaaggaggtcaggggtggaaccaactaagcccatattatcatgaggatcttgtttttgcgcaagctaaaaccattgatgtgctaagcaaaaagcttgctgctaatgataagatcttagagaacataaatgtcaagctagatggctttgcttccgcatttcaaaaccagatgagctttaataagatgatagaaacccagttagctcagttggaatctttagtccctgcaaatgaatccgggaggattccggggcaacccgacccctccattgaaaatgtcaaggcgatcacgacgaggagaggaactaatgagatatcaaaaggagcgccatctagtgactcggttgacaaggaggttcagccagaaaagaccatgccgcaggagaaaccgtcagtggacgagcaattcactcgttttgttgaagtaatccagaagatccacatcaacgtgccgttgttggacgctatgcaagtgccaacatacgcccgttatcttaaagagatactcaacaacaagagaccgctcccaacaacagaggtggtcaagctgatggaacaatgcagcaacgtgatactccacaagctcccggagaaggagaaagatccggggtgtcctacgatcacctgctcgatcagggcacaacaattggaccaggccttgtgcgaccttggagccagtgttagcgtcgtgccaaaagacgtcttcgacaagctcaacttcacggtattggcaccaaaaccgatgcgccttcaactggctgattcatcagtctgttacccggcaaggatagcagaggatgtgccagtcaagatacgggatttcttcatcccagttgattttgtggataaagtacgggccgaacccacagaatattcaagtggtcgaagtggagccacccaagacggacagcctcgtgaagtttatgcagaatttcctggaggaggaaacaacgatgcccaggaaccgttattggaggacgcaggtaaaatcacctgcactcgccaaaaagtcagagcagccagcttagaagaagccgtcttccgcaccgaaatcaaagaaggtgcggaaggaaaagccaaagacacccgctccatcacctccggagacgggtggaaaatccgtgaactgaatcaaaatgacgcgaccttcgcaaacagtgatcgggagagacaagcctactacatgctgagcgaccgggaatatgctcacactcaagaatactctctggagctgctgaaaaagataggtttggatgttgaatttcgttctatttggaaagctgttggttggcagagatttgttgtggtagatgagcctggttctcgtttgcttactttgcaatttctatgcactttgaaagaaatagaagatggtatttcttttcgcttcttccgtaaggagttcacactcacatggaaaggcttgagtacacttcttggttttcacgattcctgtaaaatcgatctccagaaaggaatttctgggttcgagaaaaataggttttgggaagatatttctggtgctccaatttgcaagaaacctagaacgaatgatatccataatcctacacttgggctcatgcacaaatggattgctatgactttgtttcctagaagtgatctgagacccattaggggagatgaattaattatcatgtttgccatggttagaaagatcaaaatttctcctatgaaatgtatgataagacaatggttagaaagtataaagttctctgctcctattgagtgcacttctctgattactcggatagcaaaagggctaggggtcgttagcaaccagattgcttttatctcagccgctcgtccgcatatttatgaggcctatctagtgcaagggcatattttgaaacatggagcagatggatctttgatatactttttccccggttgtacaaatgaaatcccattaccaaatgtggggtatcatttgtacaactgccatgaactaaccattcccctgcagaccatagaagaatcttgtgcaggtggaacatacagggagacgcgcaacatgacaaggaacgaacaaggaagttcatcatcctcgacacccgtgcagatgagaatggacacccttgatgtgcagatgggggagatccagtatgacctcacggaacacatagctcaaacgcaagaatggcaacaatctgctgatgctcagttcaccaacatcaacaacatgatgcagcaacagcatgatgaccttcaggcgtactttcgctttcaggggttcaatccttatcaaggaccctga

SEQ ID NO: 14584 - DNA, 3571 bp, Oryza sativa
  Clone ID: TFbOSC29791j.C1.o1.fg
atgccggatgacaagattggacataaggttgcacacggtggacgaacaccgtgtaaggaggtcttcgcaacggacttcgcaagggaggccaagccaatccagcccttcctcgtggctcaagatgatggatggatcagcaggcagggaggccaggccgagcaggcccaagacaagacgacggcccacggcattggcaccatgcgcgggcaagcgcgggagatcgcgcgaggcacgcgcgcgcagtggacacgcggcggcaaggaattcggcgcgtgcgggcgtggggtccacgctgtttcaagtggctcggaggcgggagttgtactgggacccacgcgcgatttcgcgagcatgcgcgggagcagctcggcgggacgcgtggaggctttggactggatgcgcgcagatccggcttctctaatagctgcggttctagcacgaatggaggcctacctccagtcgcaagggcataatgtgtggaataaggttaaatcaccttacactgtgcccgatgatgctgacatcacgcctgcaaatatggctcaggttgattttaattatcgtgcaagaaatgcaatcattggtggaatttcttctggtgaatttaatcgtgttcaacaccacaagtctgctcatgacatgtggactgctttgtgcaatttccatgagggaaacaatgatattcaattggttcgtcagaatcaatttcataaagaatatcaaagatttgagatgcacccaggagagtccattgattcttatttcaagcgttttggagaaattgtttcaaagttaagatctgttggaaaagagttttctgataatgataatgctcgtcatcttttgaattgtcttgattatggtgtttgggaaatgaaagttacttccatcacagagagtgctcctctgagtgaccttaccatggacaagctttactcaaagctaaaaacccatgagatggatgttttccatcggaaaggcctcaaacactccatggctttggtagctgatccctctggtagtacttcttctaatgactcagcttttgtgtgtggtggcttctctcttgccgctttacactcagtcactgaggagcaattagagaagatccctgaagatgatcttgctctttttgctagaaaattctcaagagcttacaaaaatgtgagagataaaaagagaggaaaaaccaatgaaccatttgtgtgttttgagtgtggagagcctaaccacataagagtgaattgtcccaagttaaagaagaagagtgacaagacgaccaagaagcccgagggacaagggcgaaaggggaagaaggatttgatgaagaaggcgattcacaaggtcttggcggctcttgaggaggtgcagcttagcgacatcgactccgacgacgatgatcaagaaaagggggacaaggacttctccgggatgtgctgtctcgccaacaacgaggacttcatcaacctgtgtctcatggcacttgaggataaggatgactcatcggagcatcctgaggtatgtcttgatgatatcccttccttggatggttctctttgtgatgatttttgctcagataatgactctgttgatgatgaactaagcaaagaaagaatggcacacttgatgattgaaattagtgacaagtataggtcttctaagtataaaattgagaaactaaaatctgaaaatgatggaatggcgctagaaattgctaggcttagatccatgattcctgaggaggatacctgttctacttgtgcttcatatctttctaaaattaatctcctcaaggataagttgaaatcatgtgctttaggagctgggaattcttctagtgctagtgctgcttgctctacttgctatgaaatgaaagttgatatgggtttgcttgagatggaattgaaagaactaaaagaaaaatttgttcatgataggattggtaggtgtgaaaattgtcccattctcactagtgacaataatgaattaagacaacaagttgccatgcttaggaccaagaatgatttgttagaatcttttgctactaaggaacctattcattcttcatgtgctaattgtgctatcctggaaactgaactaaaagatgctaaaactgtcattgattctatcaaatctattgattcttgttcatcatgcatttctctgaaagttgatcttgagtctgctaagaaagagaactcatacctacaacaatctttagagaggtttgctcaaggaaagaaaaagttgaacatgatcctagaccaatccaaagtgtccataaacaatcaaggtataggctatgattttgctgagtctttgaggataggtacccatgagattttaggtgtcacagatgggatgatagaactagctcaaaaacctataaccttcaagtctgcaggtttcattggaaacattagttctagtacacccaaaacctcagaaccaaagatggtttctgctttagaaaggctagaaaagagcgacaagaacgtcttaggactagaagagctactagagtccctgagaggttcgagtgattttggagtggggagaagtaattcttggcttgtggactccggttgctcacgccacatgaccggtgaagccaagtggtttacttctctcactcgtgcatccggtgatgagaccatcacttttggggatgcgagcagtggacgcgtgatggctaaaggaacaatcaaggtcaatgacaaattcatgctgaaagatgtggcactagtaagtaagcttaagtacaatttgctctctgtttcacaactctgtgatgaaaatctggaagttcgtttcaaaaaggacaggtctcgagttcttgatgcttctgaatctcctgtttttgacatttctcgagttggtcgagttttctttgctaacttcgactcttctgctcccggtccttctcgttgtctcattgcctcagagaatagggatttgtttttctggcatcgacgtcttggtcatattggctttgaccacttgtctcgcattagtggtatggatttgattcggggtttgcctaagttgaaagctccgaaagatcttgtgtgtgcaccatgtcgtcatgggaaaatgacatcttcctcccacaagcctgttacaatggttatgacagatggaccgggacaactgcttcacatggatacggttggtcctgctcgggtccagtcagttggggggaagtggtatgtcttggttgttgtggatgatttctctcgctactcttgggtctattttcttgaatcaaaggaggaaacatttggcttcttccagtctcttgctcgtagtttggctttggagtttcctggtgctcttcgagccattcgcagtgataatggctctgaattcaaaaattctgcatttgaatttttctgtgattcttctggagtcgaacaacagttttcttcgccatatgttccacaacagaatggggtggttgagaggaagaaccgcacccttgtggagatggcacgaactatgcttgatgagtttacgactccaagaaagttctggactgaagctatttctgctgcttgttttatctccaatc

SEQ ID NO: 14585 - DNA, 1896 bp, Oryza sativa
  Clone ID: TFbOSC400128j.C1.o22.fg
atgactggtttcaacctgccggaaaacttcaaagaaaatccagaagctttcttccgaagggtcaggccgcgagtcgttgctccgcagaaaactctaccaacagagaaaccagtcgtactagcgccaccgaccttcaagataatggctagcaggactcttcgtgagttcgctgctccctctactgacaatgtggccgtcgggccgcaagtcaacataggagaggtggatttcgactttaagtctagcctcatcacgatggcgcaggctagcccgttctgtggcaagcctaatgaggatgccaatgctcatctgcagcaattcctggagacatgcagcatgtacaccatcaagggtgtcagtcccgacgccgtcaggctgcggctatttctgttctctcttctcgggagagcgaaacagtggttctatgccaaccgtgctgctatcaacacctgggataaatgctctatggcattcctctcgaagttcttcccaatgggcaaaaccaacgcccttcgtggacgaattttcagtttccagcagacaagggacgagtccattcctgaagcatgggaacgactgcaggagtacgtggccgcctgtcctcatcatgggatggacgactggctgatcctgcagaacttttacaatgggctcaccccaatgtcccgcgatcacctggacgcggcagctggaggagcgttcttctctaaaatggttcaaggagccgttgatctcatagagaagatggacacggaactacttgctgccaagctggacctcctcatgaaacgcttggacgaccacgagaaaaggccacaaggcaccgtcaaggccttggacacacacgtcacgtgtgaggtctgcggcagcacgggtcattctgggaatgattgcccagagacccatgaggaggcgatgtacattggcaacaaaaacaacgggtatagtccacaaggaggtcaggggtggaaccaaccacgcccacattatcaaggagaaacccagttagctcagttggcatccctagtccctgcaaatgaaattgggaggattccggggcaactcgactcctccattgagaatgttaaggcgatcacaacgaggggaggaactagtgggatgtcaaaagaaacgccatctaataactcagctgacaaggagattcagccagagaagaacgtgccgcaggagtacggagacacgcggtggctgccattccctcaacggagtaggaaaccgtcagtggacgagcagttcgctcgttttgttgaagtgatccaaaagatctacatcaatgtgccattgttggacgctatgcaagtgccaacatacgcccgttatctcaaggacatactcaacaacaagagaccgctcccaacaacggaggccttgtgcgaccttggagccagcatcagcgtcatgcccaaagacgtctttgacaagctcaacttcacggtgttggcaccaacaccgatgcgcctccaactggctgactcatcagtccgttacccgacagggatagcgggaggacgtgccagtcaagaatcaagtacgggccaaacccgcagaatattcaagaggttgaagtggagccacccaagacggatagcctgtatgaggaggcgactgtctcgtccgttcaagggattgggctcttcattaagtcatcatgatgaggctagtactcatttagctgatgtttcgatggaagacgccaacactccacgacaactcttgaacaacgctgacctcgaccttgtgagtgatcgggagagacaagcctactacatgctgagcgaccgggagtatgctcagacgcgagaatactcaccggagttgctgaaaaagataggtatggatgttgaatttcgttctatttggaaagctgttggttag

SEQ ID NO: 14586 - DNA, 5214 bp, Oryza sativa
  Clone ID: TFbOSC400850j.C1.o79.fg
atgccgggtgacaagattggacataaggttgcacacggtggacgaacaccgtgtgaggaggtcttcgcaacggacttcgcaagggaggccaagccaatccagcccttcctcatggctcaagatgatggatggatcagcaggcagggaggccaggccgagcaggcccaagacaagacgacggcccacggcattggcaccatgcgcgggcaagcgcgggagatcgcgcgaggcacgcgcgcgcagtggacacgcggcggcaaggaattcggcgcgtgcgggcgtggggtccacgctgtttcaagtggctcggaggcgggagttgtactgggacccacgcgcgatttcgcgagcatgcgtgggagcagctcggcgggacacgtggaggctttggactggatgcgcgcagctatggaggaaaaatactctgcgaaaccatttgttttcgatggacacaattttgtcatttggaaggcacgaatggaggcctacctccagtcgcaagggcataatgtgtggaataaggttaaatcaccttacactgtgcccgatgatgctgacatcacgcctgcaaatatggctcaggttgattttaattatcgtgcaagaaatgcaatcattggtggaatttcttctggtgaatttaatcgtgttcaacaccacaagtctgctcatgacatgtggactgctctgtgcaatttccatgagggaaacaatgatattcaattggttcgtcagaatcaatttcataaagaatatcaaagatttgagatgcacccaggagagtccattgattcttatttcaagcgttttggagaaattgtttcgaagttaagatctgttggaaaagagttttctgataatgataatgctcgtcatcttttgaattgtcttgattatggtgtttgggaaatgaaagttacttccatcacagagagtgcacctctgagtgaccttaccatggacaagctttactcaaagctaaaaacccatgagatggatgttttccatcggaaaggcctcaaacactccatggctttggtagctgatccctctggtagtacttcttctaatgactcagcttttgtgtgtggtggcttctctcttgccgctttacactcagtcactgaggagcaattagagaagatccctgaagatgatcttgctctttttgctagaaaattctcaagagcttacaaaaatgtgagaaataaaaagagaggaaaaaccaatgaaccatttgtgtgttttgagtgtggagagcctaaccacataagagtgaattgtcccaagttgaagaagaagagtgacaagacgaccaagaagcccgagggacaagggcgaaaggggaagaatgatttgatgaagaaggcgatccacaaggtcttggcggctcttgaggaggtgcagcttagcgacatcgactccgacgacgatgatcaagaaaagggggacaaggacttctccgggatgtgctgtctcgccaacaacgaggacttcatcaacctgtgtctcatggcacttgaggataaggatgactcatcggagcatcctgaggattttggagtggggagaagtaattcttggcttgtggactccggttgctcacgccacatgaccggtgaagccaagtggtttacttctctcactcgtgcatccggtgatgagaccatcacttttggggatgcgagcagtggacgcgtgatggctaaaggaacaatcaaggtcaatgacaaattcatgctgaaagatgtggcactagtaagtaagcttaagtacaatttgctctctgtttcacaactctgtgatgaaaatctggaagttcgtttcaaaaaggacaggtctcgagttcttgatgcttctgaatctcctgtttttgacatttctcgagttggtcgagttttctttgctaacttcgactcttctgctcccggtccttctcgttgtctcgttgcctcagagaatagggatttgtttttctggcatcgacgtcttggtcatattggctttgaccacttgtctcgcattagtggtatggatttgattcggggtttgcctaagttgaaagctccgaaagatcttgtgtgtgcaccatgtcgtcatgggaaaatgacatcttcctcccacaagcctgttacaatggttatgacagatggaccgggacaactgcttcacatgaatacggttggtcctgctcgggtccagtcagttggggggaagtggtatgtcttggttgttgtggatgatttctctcgctactcttgggtctattttcttgaatcaaaggaggaaacgtttggcttctttcagtctcttgctcgtagtttggctttggagtttcctggtgctcttcgagccattcgcagtgataatggctctgaattcaaaaattctgcatttgaatctttctgtgattcttctggagtcgaacaccagttttcttcgccatatgtcccacaacagaatggggtggttgagaggaagaaccgcacccttgtggagatggcacgaactatgcttgatgagtttacgactccaagaaagttctggactgaagctatttctgctgcttgttttatctccaatcgtgtgtttttgagaactatcttgcacaagacgccatatgagctcagatttggtcgtcgaccaaaagtttcacatctcagggtcttcggttgcaaatgctttgttcttaaatctggaaatttggacaagtttgaatctcgatcattggatggcattttccttggctatgctactcattctcgggcttatcgagtttatgttctttcaactaacaaaattgtggagacttgtgaagtcacttttgatgaggctagcccaggagctagaccagaaatttcaggtgttctagatgaaagcatctttgtggatgaggattcagatgatgatgacgatgattccattcctccacctctagacagtacaccaccagtgcaagaaaccggttctccttcgactacatcaccttcaggagatgcaccaactacatcatcttcagcagctgaggagattgatggtggcacatcaggaccgacagctccccgacacatccagaaccgacatccgcctgactcgatgatcggaggcctgggtgaaagggtaactagaaatcggtcttatgatcttgtcaattcagcgtttgttgcctcttttgagcccaaaaatgtttgtcatgctttatctgatgagaattgggttaatgccatgcatgaagagttagaaaattttgaaagaaacaaagtttggtctttggtagaaccacccttgggttttaatgtgattggaacaaaatgggttttcaaaaacaaactaggtgaagatggttcaattgttcgaaacaaagccagactggttgcacagggtttcacccaagttgagggcttggattttgaagaaacctttgcaccagttgctagattagaagctattcgaattcttttggcttttgctgcttcaaaaggtttcaagctttttcaaatggatgtgaaaagtgcttttctgaatggagttattgaggaagaggtctatgtcaaacaacctcctggttttgaaaatccaaaatttccaaatcatgtgttcaaacttgataaagctctttatggtttaaaacaagctcccagagcctggtatgaaagattgaaaacctttttgcttcaaaatggttttgaaatgggggcagttgataaaactctctttactcttcatagtggcattgattttcttcttgtccagatatatgttgatgacatcatatttggtggctcctctcatgcacttgttgcccagttttctgatgtgatgagcagggaattcgaaatgagcatgatgggagagctgactttcttccttggacttcaaattaagcaaaccaaggaaggaatctttgtacatcagaccaagtactccaaagagctcctgaagaagttcgacatggccgactgcaagccaatcgccactcccatggcaactacttcatcgcttggtcctgatgaggacggtgaagaagttgaccagcgcgagtacagaagcatgatcggctccctcctctacttgactgcgtcaaggccggacatccacttctccgtgtgcctgtgcgcgaggtttcaggcttctccaagaacatcacatcgccaagcagtcaagcgcatctttcgctacatcaagtctacacttgagtacggtatttggtactcctgctcttctgccctttcagttcgagctttttcagatgctgattttgctgggtgtaagattgatcgcaaaagtacttctggcacttgtcattttcttggcacgtctttggtctcttggtcctctcgtaagcagtcttctgttgctcaatcaacagctgaggctgagtacgtagctgctgctagtgcatgtagtcaagttctttggatgatttcaactctgaaagattatggtctgtctttctctggtgttcctctgctttgtgataatacaagtgcaatcaatattgcaaaaaatccagttcaacactccaggaccaagcacattgagatacggtaccactttctccgagacaatgttgagaaaggtaccattgtgctagaatttgttgaatctgaaaaacaattggcagacatttttacaaaaccacttgatcgctctcgttttgagttcttgcggagtgagttagggataactctcaaagctctcaaaacactaaaatttgtgatcggggtcgatcttggtcaacggcggatcgggactagactcagggaggagttgaggtccaaagcgatcaaggatgccggggaggccaagccaatccagcccttcctcatggctcaagatgatggatggatcagcaggcagggaggccaggccgagcaggcccaagacaagacgacggcccacggcattggcaccatgcgcgggcaagcgcgggagatcgcgcgaggcacgcgcgcgcagtggacacgcggcggcaaggaattcggcgcgtgcgggcgtggggtccacgctgtttcaagtggctcggaggcgggagttgtactgggacccacgcgcgatttcgcgagcatgcgtgggagcagctcggcgggacacgtggaggctttggactggatgcgcgcagtggttgcaatagaggttgctatatactccagtgtaaaaatccactatcgttataatgaccgctacaaaagctatttattacctcgtttgtaa

SEQ ID NO: 14587 - DNA, 5322 bp, Oryza sativa
  Clone ID: TFbOSC401256j.C1.o18.fg
atggaggaaaaatattctgcgaaaccatttgttttcgatggacacaattttgtcatttggaaggcacgaatggaggcctacctccagtcgcaagggcataatgtgtggaataaggttaaatcaccttacactgtgcccgatgatgctgacatcacgcctgcaaatgtggctcaggttgattttaattatcgtgcaagaaatgcaatcattggtggaatttcttctggtgaatttaattgtgttcaacaccacaagtccgctcatgacatgtggactgctctgtgcaatttccataagggaaacaatgatattcaattggttcgtcagaatcaatttcataaagaatatcaaagatttgagatgcacccaggagagtccattgattcttatttcaagcgttttggagaaattgtttcgaagttgagatctgttggaaaagaattttctaataatgataatgctcgccatcttttgaattgtcttgattatggtgtttgggaaatgaaagttacttccatcacagagagtgcacctctgagtgaccttaccatggacaagctttactcaaagctaaaaacccatgagatggatattttccatcggaaaggcctcaaacactcgatggctttggtagctgatccctctggtagtacttcttctaatgactcagcttttgtgtgtggtggcttctctcttgccgctttacactcagtcactgaggagcaattagagaagattcctgaagaggatcttgctctttttgctagaaaattctcaagagcttacaaaaatgtgagagatagaaaaagaggaaaaaccaatgaaccatttgtgtgttttgagtgtggagagcctaaccacataagagtgaattgtcccaagttgaagaagaagagtgacaagacgaccaagaagcccgagggacaagggcgaaaggggaataaggatttgatgaagaaggcgatccataaggtcttggcggctcttgaggaggtgcagcttagcgacatcgactccgacgacgatgatcaagaaaagggggacaaggacttctccgggatgtgctgtctcgccaacaacgaggacttcatcaacctgtgtctcatggcacttgaggataaggatgactcatcggagcatcctgaggtatgtcttgatgatatcccttccttggatggttctctttgtgatgatttttgctcagataatgactctgttgatgatgaactaagcaaagaaagaatggcacacttgatgattgaaattagtgacaagtataggtcttctaagtataaaattgagaaactaaaatctgaaaatgatggtatggcgctagaaattgctaggcttcgatccatgattcctgaggaggatacctgttctacttgtgcttcatatctctctgaaattaatctcctcaaggataagttgaaatcatgtgctttaggagctgggaatccttctagtgctagtgttgcttgctctacttgctatgaaatgaaagttgatatgggtttgcttgagatggaattgaaagaactaaaagaaaaaaaatttcatgataggattggtaggtgtgaaaattgtcccattctcactagtgacaatgatgaattaagacaacaagttgccatgcttaggaccaagaatgatttgttagaatcttttgctactaaggaacctattcattcttcatgtgctaattgtgctatcctggaaactgaactaaaagatgctaaaactgtcattgattctatcaaatctattgattcttgttcatcatgcatttctctgaaagttgatcttgagtctgctaagagagagaacttttacctacaacaatctttagagaggataggtacccatgagatattaggtgtcacagatgggatgatagaactagctcaaaagcctataaccttcaagtctgcaggtttcattggaaacactagttctagttcacccaaaacctcagaaccaaagatggtacctatgactagcaagtctaagcctgtagagttacctagacccaaaaatccaaaacaagttgagcacaagcaaaaccagaaacaaaccaagcctgtagagaaaaccaagtatgagtgcacctattgtgggaaagctggtcatttggattttggagtggggagaagtaattcttggcttgtggactccggttgctcacgccacatgaccggtgaagccaagtggtttacttctctcactcgtgcatccggtgatgagaccatcacttttggggatgcgagcagtggacgcatgatggctaaaggaacaatcaaggtcaatgacaaattcatgctgaaggatgtcgcgcttgtaagtaagcttaagtacaatttgctctctgtttcacaactctgtgatgaaaatctagaagttcgtttcaaaaaggataggtctcgagttcttgatgcttctgaatctcctgtttttaacatttctcaagttggtcgagttttctttgctaactttgactcttctgctcctggtccttctcgttgtttcattgcctcagagaatagggatttgtttttctggcatcgtcgtcttggtcatattggctttgaccacttgtctcgcaatagtggtatggatttgattcggggtttgcctaagttgaaagctccgaaagatcttgtgtgtgcaccatgtcgtcatgggaaaatgacatcttcctcccacaagcctgttacaatggttatgacagatggaccgggacaactgcttcacatggatacggttggtcctgctcaggtccagtcagttggggggaagtggtatgtcttggttgttgtggatgatttctctcgctactcttgggtctattttcttgaatcaaaagaggaaacgtttggcttctttcagtctcttgctcgtagtttggctttggagtttcctagtgctcttcgagccattcgtagtgataatggctctgaattcaaaaattctgcatttgaatctttctgtgattcttctggagtcgaacatcagttttcttcgccatatgtcccacaacagaatggggtggttgagaggaagaaccgcacccttgtggagatggcacgaactatgcttgatgagtttactactccaagaaagttctggactgaagctatttctgctgcttgttttatctccaatcgtgtgtttttgagaactatcttgcacaagacgccatatgagctcagatttggtcgtcgaccaaaagtttcacatctcagggtcttcagttgcaagtgctttgttcttaaacctggaaatttggacaagtttgaatctcgatctgtggatggcatttttcttggctatgctactcattctcgggcttatcgagtttatgttctttcaactaacaaaattgtggagacttgtgaagtcacttttgatgaggctagcccaggagctagaccagaaatttcaggtgttccagatgaaagcatccttgtggatgaggattcagatgatgatgacgatgattccatttctccacctctagacagtacaccaccagtacaagaaaccggttctccatcgactacatcgccttcaggagatgcaccaactacatcatcttcagcagctgaggagattgatggtggcacatcaggaccaacagctccccgacacatccagaaccgacatccgcctgactcgatgatcggaggcctgggtgaaagggtaactaaaaatcggtcttatgaacttgtcaattcagcatttgttgcctcttttgagcccaaaaatgtttgtcatgctttatctgatgagaattgggttaatgccatgcatgaagagttagaaaattttgaaagaaacaaagtttggtctttggtagaaccttccttgggttttaatgtgattggaacaaaatgggttttcaaaaacaaactaagtgaagacggttcaattgttcgaaacaaagccagactagttgcacagggtttcacccaagttgagggcttggattttgaagaaacttttgcaccagttgctagattagaagctattcgaattcttttggcttttgctgcttcaaaaggtttcaagctttttcaaatggatgtgaaaagtgcttttctgaatggtgttattgaggaagaggtctatgtcaaacaacctcctcgttttgaaaatccaaaatttccaaatcatgtgttcaaacttgataaaactctttatggtttaaaacaagctcccagagcctggtatgaaagattgaaaacctttttgcttcaaaatggttttgaaatggggggagttgataaaactctctttactcttcatagtggcattgattttcttcttgtccagatatatgttgatgatatcatatttggtggctcctctcatgcacttgttgcccagttttctgatgtgatgagcagggaattcgaaatgagcatgataggagagttgactttcttccttggacttcaaatcaagcaaacaaaggaaggaatctttgtacatcagaccaagtactccaaagagctcctgaagaagttcgacatggccgactgcaagccaatcgccacccccatggcaactacttcatcgcttggtcctgatgaggacggcgaagaagttgaccagcgcgagtacagaagcatgatcggctccctcctctacctgactgcgtcaaggccggacatccacttctccgtgtgcctgtgcgcgaggtttcaggcttctccaagaacatcacatcgccaagcagtcaagtgcatcttccgctacatcaagtctacacttgagtacggtatttggtacccctgctcttctgccctttcagttcgagctttttcagatgctgattttgctgggtgtaagattgatcgcaaaagtacttctagcacttgtcattttcttggcacttctttggtctcttggtcctctcgtaagcagtcttctgttgctcaatcaacagctgaggctgagtacgtagctgctgctagtgcatgtagtcaagttctttggatgatttcaactctgaaagattatggtctgtctttctctggtgttcctctgctttgtgataatacaagtgcaatcaatattgcaaaaattccagttcaacactctaggaccaagcacattgagatacagtaccactttctccgagacaatgttgagaaaggtaccattgtgctagagtttgttgaatctgaaaatcaattggcagacatttttacaaaaccacttgatcgctctcattttgagttcttgcggactttcatttgcttaagtagcttgtgtgatcatgttatgctgttcaagcttgttgaaacctgcttaaattga

SEQ ID NO: 14588 - DNA, 4989 bp, Oryza sativa
  Clone ID: TFbOSC401367j.C1.o83.fg
atggaggaaaaatactctgcgaaaccatttgttttcgatggacacaattttgtcatttggaaggcacgaatggaggcctacctccagtcgcaagggcataatgtgtggaataaggttaaatcaccttacactgtgcccgatgatgctgacatcacgcctgcaaatatggctcaggttgattttaattatcgtgcaagaaatgcaatcattggtggaatttcttctggtgaattcaatcgtgttcaacaccacaagtccgttcatgacatgtggactgctctgtgcaatttccagggaaacaatgatattcaattggttcgtcagaatcaatttcataaagaatatcaaagatttgagatgcacccaggagagtctattgattcttatttcaagcgttttggagaaattgtttcgaagttgagatctgttggaaaagagttttctgataatgataatgctcgccatcttttgaattgtctttattatggtgtttgggaaatgaaggttgcttccatcacagagagtgcacctctgagtgaccttaccatggacaagctttactcaaagctaaaaacccatgagatggatgttttccatcggaaaggcctcaaacactcggtggctttggtagctgatccctttggtagtacttcttctaatgactcagcttttgtgtgtggtggcttctctcttgccgctttacactcagtcactgaggagcaattagagaagatccctaaagatgatcttgctctttttgctagaaaattctcaagagcttacaaaaatgtgagagatagaaaaagaggaaaaaccaatgaaccatttgtgtgttttgagtgtggagagcctaaccacataagagtgaattgtcccaagttgaagaagaagagtgacaagatgaccaagaagaccgagggacaagggcgaaaggggagaaaggatttgatgaagaaggcgatccacaaggtcttggcggctcttgaggaggtgcagcttagcgacatcgactccgacgacgatgatcaagaaaagggggacaaggacttctccgggatgtgctgtctcgccaacaacgaggacttcatcaacctgtgtctcatggcacttaaggataaggatgactcatcggagcatcctgaggtatgtcttgatgatatcccttccttggatggttctctttgtgatgattcttgctcagataatgactctgttgatgatgaactaagcaaagaaagaatggcacacttgatgattgaaattagtgacaagtataggtcttctaagtataaaattgagaaactaaaatctgaaaatgatggaatggagctagaaattgctaggcttcgatccatgattcctaaggaggatacctgttctacttgtgcttcatatctttctgaaatttatctcctcaaggataagttgaaatcatgtgctttaggagctgggaatccttctagtgctagtgctacttgctctacttgctatgaaatgaaagttgatatgggtttgcttgagatggaattgaaagaactaaaagaaaaatttgttcatgataggattggtaggtgtgaaaattgtcccattctcactagtgacaatgatgaattaagacaacaagttgacatgcttaggaccaagaatgatttgttagaatcttttgctactaaggaacctgttcattcttcatgtgctaattgtgctatcctagaaactgaacaaaaagatgctaaaactgtcattgattctatcaaatctattgattcttgttcatcatgcatttctctgaaagttgatcttgagtctgctaagagagagaactcatacctacaacaatctttagagaggtttgctcaaggaaagaaaaagttgaacatgatcctagaccaatccaaagtgtccataaacaatcaaggtataggctatgattttgcttatgattttgctgagtctttgaggataggtacccatgagattttaggtgtcagatgggatgatagaactagctcaaaaacctataaccttcaagtctgcagctggttagaaaggctagaaaagaacgacaagaacgtcttaggactaggagagctactagagtccctgggaggttcgagtgtgcgtgtcattgtcgttcaagtggtgtatctcgctttcctcgccgagatgtgcaccctcgacgtgacccagcagggttggggcaaaacagacatggattttggagtagggaggagtaactcttggcttgtggactccggttgttcacgccacatgaccggtgaagccaagtggtttacttctctcactcgtgcatccggtgatgagaccatcacttttagggatgcgagcagtggacgcgtgatggctaaaggaacaatcaaggtcaatgacaaattcatgctgaaggatgtcgcgcttgtaagtaagcttaagtacaatttgctctctgtttcacaactctgtgatgaaaatctggaagttcgtttcaaaaaggacaggtctcgagttctcgatgcttctaaatctcctgtttttgacatttctcgagttggtcgagttttctttgctaacttcgactcttctgctcctggtccttctcgttgtctcattgcctcagagaatagggatttgtttttctggcatcatcgtcttggtcatattggctttgaccacttgtctcgcattagtggtatggatttgattcggggtttgcctaagttgaaagctccgaaagatcttgtgtgtgcaccatgtcgtcatgggaaaatgacatcttcctcccacaagcctattacaatggttatgacagatggaccgggacaactgcttcacatggatacggttggtcctgctcgggtccagtcagttggggggaagtggtatgtcttggttgttgtggatgatttctctcgctactcttgggtctattttcttgaatcaaaagagaaaacgtttggcttctttcagtctcttgttcgtagattggctttggagtttcctggtgctcttcaagcaattcgcagtgataatggctctgaattcaaaaattctgcatttgaatatttctatgattcttctggagtcgaacatcagttttcttcgccatatgtcccacaacagaatggggtggttgagaggaagaaccgcacccttgtggagatggcacgaactatacttgatgagtttactactccaagaaagttctggactgaagctatttctatggcttgttttatctccaatcgtgtgtttttgagaactatcttgcacaagacgccatatgagctcagatttggtcatcgaccaaaagtttcacatctcagggtcttcggttgcaagtgctttgttcttaaacctggaaatttggacaagtttgaatctcgatctgtggatggcatttttcttggctatgctactcattctcgggcttatcgagtttatgttctttcaactaacaaaattgtggagacttgtgaagtcacttttgatgaggctagcccaggagctagaccagaaatttcaggtgtttcagatgaaagcatctttgtggatgaggattcagatgatgatgacgatgattcctttcctccacctctagacagtacaccaccagtgcaagaaaccggttctccttcgactacatcgccttcaggagatgcaccaactacatcatcttcagcagctgaggagattgatggtggcacatcaggaccgacagctccccgacacatccagaaccgacatccgcctgacttgatgatcggaggcctgggtgaaagggtaactagaaatcggtcttatgaacttgttaattcagcatttgttgcctcttttgagcctaaaaatgtttgtcatgctttatctgatgagaattgggttaatgccatgcatgaagagttagagaattttgaaagaaacaaagtttggtctttggtagaaccgcccttgggttttaatgtgattggaacaaaatgggttttcaaaaacaaactaggtgaagatggttcaattgttcgaaacaaagccagactagttgcacagggtttcactcaagttaagggcttggattttgaagaaacctttgcaccagttgctagattagaagccattcgaattcttttggcttttgctgcttcaaaaggtttcaagttttttcaaatggatgtgaaaagtgcttttctgaatggtgttattgaggaagagatatatgttgatgacatcatatttggtggctcttctcatgcacttgttgcccagttttcttatgtgatgagtagggaattcgaaatgagcatgatgggagagctgactttcttccttggacttcaaatcaagcaaaccaaggaaggaatctttgtacatcagaccaaatactccaaagagctcttgaagttcgacatggccgactgcaagccaatcgccactcccatggcaactacttcatcgcttggtcctgatgaggacggtgaagaagttgaccagcacgagtacagaagcatgatcggctccctcctctacctgactgcgtcaaggccggacatccacttctccgtgtgcctgtgcgcaaggtttcaggcttctccaagaacatcacatcaccaagcagtcaagcgcatcttccgctacatcaagtctacacttgagtacgctgaggctgagtacgtagctgctgctagtgcatgtagtcaagttctttggatgatttcaactctgaaagattatggtctgtctttctctggtgttcctctgctttgtgataatacaagtgcaatcaatattgcaaaaaatccagttcaacactccaggaccaagcacattgagatacggtaccactttctccgagacaatgttgagaaaggtaccattgtgctagagtttgttgaatctgaaaaacaattggcagacatttttacaaaaccacttgatcgctctcggtttgagttcttgcggagtgagttaggagtgatccacccctatggcttgatttga

SEQ ID NO: 14589 - DNA, 6168 bp, Oryza sativa
  Clone ID: TFbOSC401864j.C1.o2.fg
atgatgtcatcatccccttacacaaggacttgtcatgtggtgcccgccaccaatgtacactgcatatcatggcacatgatggaagtcattagttctcattcaacgactgtgatcggggtcgatcttggtcaacggcggatcgggactagactcagggaggagttgaggtccaaagcgatcaaggatgccggggaggccaagccaatccagcccttcctcgtggctcaagatgatggatggatcagcaggcagggaggccaggccgagcaggcccaagacaagacgacggcccacggcattggcaccatgcgcgggcaagcgcgggagatcgcgcgaggcacgcgcgcgcagtggacacgcggcggcaaggaattcggcgcgtgcgggcgtggggtccacgctgtttcaagtggctcggaggcgggagttgtactgggacccacgcgcgatttcgcgagcatgcgcgggagcagctcggcgggacgcgtggaggctttggactggatgcgcgcagatccggcttctctaatagccgcggttctagcacgaatggaggcctacctccagtcgcaagggcataatgtgtggaataaggttaaatcaccttacactatgcccgatgatgctgacatcacgcctgcaaatatggctcaggttgattttaattatcgtgcaagaaatgcaatcattggtggaatttcttctggtgaatttaatcgtgttcaacaccacaagtctgctcatgacatgtggactgctctgtgcaatttccatgagggaaacaatgatattcaattggttcgtcagaatcaatttcataaagaatatcaaagatttgagatgcacccaggagagtccattgattcttatttcaagcgttttggagaaattgtttcgaagttaagatctgttggaaaagagttttctgataatgataatgctcgtcatcttttgaattgtcttgattatggtgtttgggaaatgaaagttacttccatcacagagagtgctcctctgagtgaccttaccatggacaagctttactcaaagctaaaaacccatgagatggatgttttccatcggaaaggcctcaaacactccatggctttggtagctgatccctctggtagtacttcttctaatgactcagcttttgtgtgtggtggcttctctcttgccgctttacactcagtcactgaggagcaattagagaagatccctgaagatgatcttgctctttttgctagaaaattctcaagagcttacaaaaatgtgagagataaaaagagaggaaaaaccaatgaaccatttgtgtgttttgagtgtggagagcctaaccacataagagtgaattgtcccaagttgaagaagaagagtgacaagacgaccaagaagcccgagggacaagggcgaaaggggaagaagaatttgatgaagaaggcgatccacaaggtcttggcggctcttgaggaggtgcagcttagcgacatcgactccgacgacgatgatcaagaaaagggggacaaggacttctccgggatgtgctgtctcgccaacaacgaggacttcatcaacctgtgtctcatggcacttgaggataaggatgactcatcggagcatcctgaggtatgtcttgatgatatcccttccttggatggttctctttgtgatgatttttgctcagataatgactctgttgatgatgaactaagcaaagaaagaatggcacacttgatgattgaaattagtgacaagtataggtcttctaagtataaaattgagaaactaaaatctgaaaatgatggaatggcgctagaaattgctaggcttagatccatgattcctgaggaggatacctgttctacttgtgcttcatatctttctgaaattaatctcctcaaggataagttgaaatcatgtgctttaggagctgggaattcttctagtgctagtgctgcttgctctacttgctatgaaatgaaagttgatatgggtttgcttgagatggaattgaaagaactaaaagaaaaatttgttcatgataggattggtaggtgtgaaaattgtcccattctcactagtgacaataatgaattaagacaacaagttgccatgcttaggaccaagaatgatttgttagaatcttttgctactaaggaacctattcatttttcatgtgctaattgtgctatcctggaaactgaactaaaagatgctaaaactgtcattgattctatcaaatctattgattcttgttcatcatgcatttctctgaaagttgatcttgagtctgctaagaaagagaactcatacctacaacaatctttagagaggtttgctcaaggaaagaaaaagttgaacatgatcctagaccaatccaaagtgtccataaacaatcaaggtataggctatgattttgctgagtctttgaggataggtacccatgagattttaggtgtcacagatgggatgatagaactagctcaaaaacctataaccttcaagtctgcaggtttcattggaaacattagttctagtacacccaaaacctcagaaccaaagatggtttctgctttagaaaggctagaaaagagcgacaagaacgtcttaggactagaagagctactagagtccctgagaggttcgagtgattttggagtggggagaagtaattcttggcttgtggactccggttgctcacgccacatgaccggtgaagccaagtggtttacttctctcactcgtgcatccggtgatgagaccatcacttttggggatgcgagcattggacgcgtgatggctaaaggaacaatcaaggtcaatgacaaattcatgctgaaagatgtggcactagtaagtaagcttaagtacaatttgctctctgtttcacaactctgtgatgaaaatctggaagttcgtttcaaaaaggacaggtctcgagttcttgatgcttctgaatctcctgtttttgacatttctcgagttggtcgagttttctttgctaacttcgactcttctgctcccggtccttctcgttgtctcattgcctcagagaatagggatttgtttttctggcatcgacgtcttggtcatattggctttgaccacttgtctcgcattagtggtatggatttgattcggggtttgcctaagttgaaagctccgaaagatcttgtgtgtgcaccatgtcgtcatgggaaaatgacatcttcctcccacaagcctgttacaatggttatgacagatggaccgggacaactgcttcacatggatacggttggtcctgctcgggtccagtcagttggggggaagtggtatgtcttggttgttgtggatgatttctctcgctactcttgggtctattttcttgaatcaaaggaggaatcgtttggcttctttcagtctcttgctcgtagtttggctttggagtttcctggtgctcttcgagccattcgcagtgataatggctctgaattcaaaaattctgcatttgaatttttctgtgattcttctggagtcgaacaccagttttcttcgccatatgtcccacaacagaatggggtggttgagaggaagaaccgcacccttgtggagatggcacgaactatgcttgatgagtttacgactccaagaaagttctggactgaagctatttctgctgcttgttttatctccaatcgtgtgtttttgagaactatcttgcacaagacgccatatgagctcagatttggtcgtcgaccaaaagtttcacatcttagggtcttcggttgcaaatgctttgttcttaaatctggaaatttggacaagtttgaatctcgatcattggatggcattttccttggctatgctactcattctcgggcttatcgagtttatgttctttcaactaacaaaattgtggagacttgtgaagtcacttttgatgaggctagcccaggagctagaccagaaatttcaggtgttctagatgaaagcatctttgtggatgaggattcagatgatgatgacgatgattccattcctccacctctagacagtacaccaccagtgcaagaaaccggttctccttcgactacatcaccttcaggagatgcaccaactacatcatcttcagcagctgaggagattgatggtggcacatcaggaccgacagctccccgacacatccagaaccgacatccgcctgactcgatgatcggaggcctgggtgaaagggtaactagaaatcggtcttatgatcttgtcaatttagcgtttgttgcctcttttgagcccaaaaatgtttgtcatgctttatctgatgagaattgggttaatgccatgcatgaagagttagaaaattttgaaagaaacaaagtttggtctttggtagaaccacccttgggttttaatgtgattggaacaaaatgggttttcaaaaacaaactaggtgaagatggttcaattgttcgaaacaaagccagactggttgcacagggtttcacccaagttgagggcttggattttgaagaaacctttgcaccagttgctagattagaagctattcgaattcttttggcttttgctgcttcaaaaggtttcaagctttttcaaatggatgtgaaaagtgcttttctgaatggagttattgaggaagaggtctatgtcaaacaacctcctggttttgaaaatctaaaatttccaaatcatgtgttcaaacttgataaagctctttatggtttaaaacaagctcccagagcctgtggcattgattttcttcttgtcgagatatatgttgatgacatcatatttggtggctcctctcatgcacttgttgcccagttttctgatgtgatgagcagggaattcgaaatgagcatgatgggagagctgactttcttccttggacttcaaattaagcaaaccaaggaaggaatctttgtacatcagaccaagtactccaaagagctcctgaagaagttcgacatggccgactgcaagccaatcgccactcccatggcaactacttcatcgcttggtcctgatgaggacggtgaagaagttgaccagcgcgagtacagaagtatgattggctccctcctctacttgactgcgtcaaggccggacatccacttctctgtgtgcctgtgcgcgaggttccaggcttctccaagaacatcacatcgccaagcagtcaagcgcatctttcgctacatcaagtctacacttgagtacggtatttggtactcctgctcttctgccctttcagttcgagctttttcagatgctgattttgctgggtgtaagattgatcgcaaaagtacttctggcacttgtcattttcttggcacttctttggtctcttggtcctctcgtaagcagtcttctgttgctcaatcaacagctgaggctgagtacgtagctgctgctagtgcatgtagtcaagttctttggatgatttcaactctgaaagattatggtctgtttttctctggtgttcctctgctttgtgataatacaagtgcaatcaatattgcaaaaaatccagttcaacactccaggaccaagcacattgagatacggtaccactttctccgagacaatgttgagaaaggtaccattgtgctagaatttgttgaatctgaaaaacaattggcagacatttttacaaaaccacttgatcgctctcgttttgagttcttgcggagtgagttagggataactctcaaagctctcaaaacactaaaatttgtgatcggggtcgatcttggtcaacggcggatcgggactagactcagggaggagttgaggtccaaagcgatcaaggatgccggggaggccaagccaatccagcccttcctcgtggctcaagatgatggatggatcagcaggcagggaggccaggccgagcaggcccaagacaagacgacggcccacggcattggcaccatgcgcgggcaagcgcgggagatcgcgcgaggcacgcgcgcgcagtggacacgcggcggcaaggaattcggcgctgtttcaagtggctcggaggcgggagttgtactgggacccacgcgcgatttcgcgagcatgcgcgggagcagctcggcgggacgcgtggaggctttggactggatgcgcgcaggtgagcgtgggatccacgcggtggagcgcgcgctctcgcgtgctgaggcgtga

SEQ ID NO: 14590 - DNA, 4713 bp, Oryza sativa
  Clone ID: TFbOSC402311j.C1.o16.fg
atggaggaaaaatactctgcgaaaccatttgttttcgatggacacaattttgtcatttggaaggcacgaatggaggcctacctccagtcgcaagggaataatgtgtggaataaggttaaatctccttacactgtgcccgatgatgatgacatcacgcctgcaaatgtggctcaggttgattttaattatcgtgcaagaaatgcaatcattggtggaatttcttttgaattttctgataatgataatgctcgccatcttttgaattgtcttgattatggtgtttgggaaatgaaagttacttccatcacagatagtgcacctctgagtgaccttaccatggacaagctttactcaaagctaaaaacccatgagatggatgttttccatcggaaaggcctcaaacactcgatggctttggtagctgatccctctggtagtacttcttctaatgactcagcttttgtgtgtggtggcttctctcttgccgctttacactcagtcactgaggagcaattagagaagatccctgaagatgatcttgctctttttgctagaaaattctcaagagcttacaagaatgtgagagagagagaaaggagaaaaaccaatgaaccatttgtgtgttttgagtgtggagagcctaaccacataagagtgaattgtcccaagttgaagaagaagagtgacaagacgaccaagaagcccgagggacaagggcgaaaggggagaaaggatttgatgaagaaggcgatccacaaggtcttggcgactcttgaggaggtgcagcttagcgacatcgactccgatgacgatgatcaagaaaagggggacaaggacttctccaggatgtgctatctcgccaacaacgaggacttcatcaacctgtgtctcatggcacttgaggataaggatgactcatcggagcatcttgaggtatgtcttgatgatatcccttccttggatggttctccttgtgatgattcttgctcagataatgactctgttgatgatgaactaagcaaagaaagaatggcacacttgatgattgaaattagtgacaagtataggtcttctaagtataaaattgagaaactaaaatctgaaaatgatggaatggcgctagaaattgctaggcttcgatccatgattcctgaggaggatacatgttctacttgtgcttcatatctttctgaaattaatctcctcaagaataagttgaaatcatgtgctttaggagctgggaatccttctagtgctagtgctgcttgctctacttgctataaaatgaaagttgatatgggtttgcttgagatggaattgaaagaattaaaagaaaaatttgttcatgataggattggtaggtgtgaaaattgtcccattttcactagtgacaatgatgaattaagacaacaagttgccatgcttaggaccaataatgatttgttagaatcttttgctactaaggaacctgttcattcttcatgtgctaattgtgctatcctggatactgaactaaaagatgctaaaactgtcatttattctatcaaatctattgattcttgttcatcatgcatttctctgaaagttgatcttgagtctgctaagagagagaactcatacctacaacaatctttagagaggtttgctcaaggaaagaaaaagttgaacatgatcctagaccaatccaaagtgtccataaacaatcaaggtttcattggaaacactagttctagttcacccaaaacctcagaaccaaagatggtttctgctttagaaaggctagaaaagagcgacaagaacgtcttaggactagaagagctactagagtccctgagaggttcgagtgattttggagtggggagaagtaattcttggcttgtggactccggttgctcacgccacatgaccagtgaagccaagtggtttacttctctcactcgtgcatccggtgatgagaccatcacttttggggatgcgagcagtggacgcgtgatggctaaaggaacaatcaaggtcaatgacaaattcatgctgaaggatgtcgcgcttgtaagtaagcttaagtacaattcgctctctgtttcacaactctgtgatgaaaatctggaagttcgtttcgaaaaggacaggtctcgagttcttgatgcttctgaatctcctatttttgacatttctcgagttggtcgagttttctttgctaacttcgactcttctgctcctggtccttctcgttgtctcattgcctcagagaatagggatttgtttttctggcatcgtcgtcttggtcatattggctttgactacttgtctcgcattagtggtatggatttgattcggggttcgcctaagttgaaagctccgaaaggtcttatatggaccgggataactgcttcacatggatacggttggtcctgctcgggtccagtcaattggggggaagtgtctcttgctcgtagtttggctttggagtttcctggtgctcttcgagcaattcgcagtgataatggctctgaattcaaaaattctgcatttgaatttttctgtgattcttctggagtcgaacatcagttttcttcgccatatgtcccacaacagaatggggtggttgagaggaagaaccatacccttgtggagatggcacgaactatgcttgatgagtttactactccaagaaagttctggactgaagctatttctgctgcttgttttatctccaatcgtgtgtttttgagaactatcttgcacaagacaccatatgagctcagatttggtcatcgaccaaaagtttcacatctcagggtcttctgttgtaagtgctttgttcttaaacctggaaatttggacaagtttgaatctcgatctgtggatggcatttttcttggctatgctactcattctcgggcttatcgagtgtatgttctttcaactaacaaaattgtggagacttgtgaagtcacttttgaagaggctagcccaagagctagaccggaaatttcaggtgtttcagatgagactatctttgtagaagatgattcagatgaagatgacgatgattccattcctccacctctagacagttcaccaccagtgcaagaaaccggttctccttcgactacatcgccttcaggagatgcaccaactacatcatcttcagcagctgaggagattgatggtggcacatcaggaccgacagctccccgatacatccagaaccgacatccgccagacttgatgatcggaggcctgggtgaaagggtaactagaaatcggtcttatgaacttgtcaatttagcatttgttgcctattttgagcccaaaaatgtttgccatgctttatctgatgagaattgggttaatgccatgcatgaagagttagaaaattttgaaagaaacaaagtttgttggtctttggtagaaccacccttgggttttaatgtgattggaacaaaatgggttttcaaaaacaaaataggtgaagatggttcaattgttcgaaacaaagccagactggttgcacagggtttcacccaagttgagggcttggattttgaagaaacctttgcaccagttgctagattagaagctattcgaattcttttggcttttgctgcttcaaaaggtttcaagctttttcaaatggatgtgaaaagtgcttttctgaatggagttattgaggaagaggtctatgtcaaacaacctcctggttttgaaaatccaaaatttccaaatcatgtgttcaaacttgataaagctctttatggtttaaaacaagctcccagagcctggtatgaaagattgaaaacctttttgcttcaaaatggttttgaaatgggggccattgataaaactctctttactcttcatagtggcattgattttcttcttgtccagatatatgttgatgacatcatatttggtggctcttctcgtgcacttgttgcccagttttctgatgtgatgagtagggaattcgaaatgagcatgatgggagagctgactttcttccttggacttcaaatcaagcaaactaaggaaggaatctttgtacctcagaccaagtactccaaagagctcctgaagaagttcgacatggccgactgcaagccaatcgccactcccatggcaactacttcatcgcttggtcctgatgaggacggtgaagaagttgaccaacgcgagtacagaagcatgatcggctccctcctctacctgaccgcgtcaaggccagacatccacttctccgtgtgcctatgcgcgaggtttcaggcttctccaagagcatcacatcgccaagcagtcaagcgcatcttccgcgcatcttccgctacatcaagtctacacttgagtacgtcttctgttgctcaatcaacagctgaggctgagtacgtagctgctgctagtgcatgtagtcaagttctttggatgattttaactctgaaagattatggtctgtctttctctggtgttcctctgctttgtgataatacaagtgcaatcaatattgcaaaaaatccagttcaacactccaggaccaagcacattgagatacggtaccactttctccgagacaatgttgagaaaggtaccattgtgctagagtttgttgaatctgaaaaacaattggcagacatttttacaaaaccacttgatcgctctcgttttgagttcttgcggagtgagttaggggtgatccacccctatggcttgatttga

SEQ ID NO: 14591 - DNA, 1761 bp, Oryza sativa
  Clone ID: TFbOSC900064j.C1.o21.gm
atggccagcaagactctttgcgagttcgctgctccctctgctgccaatgtggccgtcgggccgcaagtcaacataggagatgtggatttcgacttgaagtccagcctcatcacgatggcgcaggctagcccgttctgtggcaagcctaatgaggatgccaacgctcatctgcaacaattccaggagatatgtaccacgtacaccatcaagggcgttagtcctgacgccgtcaggctgcggctgtttccgttgtccctcctcgggagagcaaagcagtggttctatgccaaccgtgctgctatcaacaccagggataaatgctctacggcattcctctcgaagttcttcccgatgggcaaaaccaacgcccttcatggacgaatttccagtttccagcagacaagggacgagtctgttccagaagcatgggaacgactgcaggagcacatggccgcctgtcctcatcatgggatggacgactggctaatcctgcagaatttttacaatgggctcaccccaatgtcccgcgatcacttggacgcggcagctggaggagccttcttctctaaaacggttcaaggagccgttgaactcatagagaagatggtctccaatatgggttggagcgaggaacgactccagacctgtcagcgaggcatgcacaccgtcaaggagacggagttacttgctgccaagctggacctcctcatgaaacgcttggacgaccatgagaaacggccacaaggcaccgtcaaggccttggactcacacgtcacgtgtgaagtctgcggcagcacgggtcattctgggaacgactgcccggaaacccgtgaggaggcgatgtacatgggcaacaacaacgggtatcgtccacaaggaggtcaggggtggaaccaactaagcccatattatcatgagtccctgcaaatgaatccgggaggattccggggcaacccgacccctccattgaaaatgtcaaggcgatcacgacgaggagagaagatccacatcaacgtgccgttgttggacgctatgcaagtgccaacatacgcccgttatcttaaagagatactcaacaacaagagaccgctcccaacaacagaggtggtcaagctgatggaacaatgcagcaacgtgatactccacaagctcccggagaaggagaaagatccggggtgtcctacgatcacctgctcgatcagggcacaacaattggaccaggccttgtgcgaccttggagccagtgttagcgtcgtgccaaaagacgtcttcgacaagctcaacttcacggtattggcaccaaaaccgatgcgccttcaactggctgattcatcagtctgttacccggcaaggatagcagaggatgtgccagtcaagatacgggatttcttcatcccagttgattttgtggaagtgaagtttgagttccaaccatggacggaacaatgctccatggtcaggataaagtacgggccgaacccacagaatattcaagtggtcgaagtggagccacccaagacggacagcctcgtgaaagcagccagcttagaagaagccgtcttccgcaccgaaatcaaagaaggtgcggaaggaaaagccaaagacacccgctccatcacctccggagacgggtggaaaatccgtgaactgaatcaaaatgacgcgaccttcgcaaacaggtggaacatacagggagacgcgcaacatgacaaggaacgaacaaggaagttcatcatcctcgacacccgtgcagatgtatga

SEQ ID NO: 14592 - DNA, 4482 bp, Oryza sativa
  Clone ID: TFbOSC900185j.C1.o17.fg
atggtgaagacaaggaatggttcccgtgactccaacaacgccagtggcagcgaagagccgatcgatggaccacgtgccagcaatgcacctaatagcagtccgtccccaccgcccgagaacccaacgatcgctcaggtgttggacaatcagactcagatgatggcaatgatgatgcaacagatgcagcaacagtaccatcaggtgctgcagcaggtgcagcagcaagcacagcagcagcagcagaacctgcagtttggtcctccacctcctcagtccaaactgttagaatctcttcgtgtcaagccgcccaccttctcaagcaccaccaacccaatcgaggcccacgactggcttcatgccattgagaagaagctgaatcttttgcaatgcaacgagcaagagaaggttgcttttgctacacaccagctgcaaggtcccgcttctgtttggtgggacaactacatggtgacccgtccagcttgggcagaagttacttggacagagttttgtcatagtttcaataaagcacaggttcccgagggaattgtggcacaaaagaagagagagttccgttccctgcaacaaggaaccagaacagttatagagtatttgcatgagttcaaccacctcgcgcgctacgctcctgaggacgtgcgtaccgatgccgagaggcaggagaagtttctgtctggtcttgatgatgaattgattaaccagttgatctctagagattatgaggactttgagaagctggtggataaggctatccgtcaggaggagcactgtaacaaaataaaccgtaagaggaaggcagctcagttcaggacttcccaggggaagagtcagaagcctcgtttcacgatgggacatcacggtggaccttccaccatgattatccggcagtaccgtccctaccacccgggtagcttcaacaagaaccaccatagtggcagtcacaacaacagtgagcagcacagcctcaaccctactccaagttcattaaagattccagcccaatcagttcagccagctctgccagaacagcccaagaggttgggagaaaaacccaaactctgcttcaattgtaacaaacccggacacacggttggaaagtgcccgaagccaagacgtgctggacccaagttcgttcaggcccgtgttaatcatgcatctgcagaggaggcgcagtcagcaccagaggttatattgggcacattccccgtcaactcgacactggcagtaatattgtttgattctggtgcaacccattccttcatttccaagcgttttgctggtgcacatgggttatctttagtgaagcttaagataccaatgcgagttcatactcctggaggtggcatgaccacaactcactactgcccatctgtgacagttgaaattcaagggttgatttttccagccaacctcattcttctcgaatccaaggacctagatgtcatacttggaatggattggttgacaaggcacagaggagtgattgattgcgccagccgcaccatcaagttgaccaatgcaaaaggagaggaggtaaccttccagtctccagtgccgcggaagccagggattagtttaaaccaggctgctggtgaagaacaagaggtagcagtggagaaaaccactaagaagttggaggatattcccatagtcagagagtatccagaggtttttccggatgatctgacaacaatgccaccaaaaagggatatcgagttccggattgacttggtacctggaactgcaccgatccacaagagaccttacagaatgggagccaacgagttggcggaagtcaagaagcaagttgatgaacagttacagaagggatacatccgcccgagcacatcgccttggggtgctccggttatctttgtggagaagaaagacaaaaccaagaggatgtgcgttgactaccgcgcactcaatgaggtcaccatcaagaacaagtatcctttgccaaggattgatgatctgtttgatcagttgaaaggagctactgtgttctctaagatagacctgcgatcaggctatcaccagttgaggatccgcgaagaggatatttcaaagacagcattcatcactcggtacgggttgttcgaatgcacagttatgtctttcggactcactaatgcacctgccttcttcatgaatttgatgaacaaggtgtttatggaatttctagacaagtttgtcgtggttttcatcgatgacatacttatctactccaagtccgaggaagaacatgagcagcatcttcggctggtacttgaaaagttaaaagagcaccagctatatgccaagttcagcaagtgcgacttctggcttaaggaagttcagtttctcggtcacatcgtgaatgctcaaggagtagctgtggatccagcaaatgtggagtcagttaccaaatggaccccaccaaggacagtcactcaagttcggagtttcttaggacttgcgggctattaccgccggttcattgagaacttctctaaaattgctaagccaatggcacagctattgaagaaggaagaaaagtttatctggtccgctgaatgcaataggagttttgaagaactcaaacgacggttggatggcaaagtggtttcttatgcttcacggcagttgcgtcctcatgaaggcaactacccgacgcacgatctggaattggccgcagtcgttcatgctttaaagatttggcggcactatctcatcagtatccgttgtgaggtatatacagatcacaaaagtctaaagtacatcttcacccaacctgatctgaatctccgacaacgaagatggttggagctaatcaaagattatgatatgggaatacactatcatcccggcaaggctaatgtggttgcagacgccttgagcaggaagagtcactgcaacgtcgcatgggtagaggaactatgctgtgaggttcaacgtgatttggaacatttgaaccttggtatagttgagcacggattcgtggctgccctagaggcacagcccacactggtggagcaggttcgcatagctcaagcaagtgatcctgaaatagcggagctcaaaaggaacatgagagttggaaaagcccgaggttttgttgaggatgaacaaggaacaatctggacgggagaaagattgtgtgtacccgaaaacaaggaattaaaagacctgatactaaccgaggctcatcaaactcagtattccattcatcccggtagtactaagatgtaccaagacctcaaagagaagttttggtgggtcagcatgagaagggaaatagctgaattcgtagcactctgtgacgtctgtcaacgagtaaaggcagaacaccaaaggccagcaggtttgctacagccacttcagattccagaatggaagtgggaagaaatcggaatggatttcatcaccggtttgcccaggacgtcatcggggcatgattctatttgggtagtcgttgaccgactcaccaaagtggctcacttcattccggttcacactacctactcagggaagaaattagcagaactctatctggcaagaattatgtgtttacatggtgtacctaagaagatcgtgtctgatcgaggaagccaattcacttcaaagttctggcagaaattacaagaagaattgggaacccggttgaatttcagcactgcttaccatccacaaacagatggccagactgagcgagtcaatcaaatactagaggatatgttgagagcatgtgcgcttgactttggtggagcatgggacaaaagcttgccgtatgccgagttctcttacaacaacagttaccaggctagtctgcagatggcaccgtttgaagcactgtatggacggaggtgtcgtactccgctcttctgggatcagacaggggaacgccagttgtttgggacagaagttttaaatgaggcagaagagaaagtcagagctgttagggaaagattgagaatcgcgcaatctcggcagaaaagctatgcagacaaccgccgaagggagctcgctttcgaaacaggggattatgtgtatctccgtgtcactccgctcaggggagtacatcgcttccaaaccaaaggaaagttggcaccacgctttgtgggaccatacaggatcttggaacgtagaggtgaagttgcttaccagcttgagcttccctccaacatgcttggcatccataacgtgttccacgtctctcagttgaagaaatgtttgagagttcccgaggaacaggcaagtccggatcacatcgaaattcaggaagatctgacgtatgtggagaagccgacccgtatccctgaaaccagcgagagaaggaccagaaacaaagtaatcagattctgcaaggttcagtggagccaccactcagaggaagaggccacttgggaaagagaagatgagttgaaggccacccacccatacctcttcgccagctcttccgaatctcggggtcgagattccgtttaa

SEQ ID NO: 14593 - DNA, 525 bp, Oryza sativa
  Clone ID: TFbOSC13261j.C1.o1.np
aatgagaaaagaaaatgccgagtccgggaagatatctgtgcttcaattgtcaaggaatgggtcatttcgccgacaagtgcccaaaaccgagaaacatagctgccggcacgtcagtccacgcaactccctgcaatcagaagcttgctcctcaacgaatggtcatccatgcatcccgaagcagtcctatagcccgcgttgcaacagctccaattccaatgagtgcactaccacaaggtgtcaatgctcaatttcagccccagccaccagttgacaagacagatgccagtatctgcgttgtacctttggaagctccaatacagcagctgagaaatcaagtacaagatgaagaacccgagtgtaagaaagttattgtttgtcacaactgcagtggagaagggcattactccaaaaaactgtccccgacctccacattttcgccaatttacacgaagcagacattccaatcgtattgtggtcactggagcaaacgccgtacccgtaaggcctcgtgttaatcagaaccca

SEQ ID NO: 14594 - DNA, 1532 bp, Oryza sativa
  Clone ID: TFbOSC25450j.C1.o1.fg
atgtcgaacgaggtgaaccatgtagggaaggctcccatatttaatggcacaaactactccacttggaaaattaaaatgtctactcacctcaaagctatgagcttccatatttggagtattgtgtatgtaggctttgccatcaccggcacacccttgacggagattgatcaccgcaacctccaactcaatgcccaagccatgaatgccttgttcaactctttgagccaagaggagttcgatagagtgagcaaccttgagaccgcatatgagatttggaacaagttggcggagatccatgagggtacaagtgagtacaaggatgccaagcttcatttcctcaagatccaatatgagacattctacatgttgcctcatgagagtgtgaatgacatgtatgggaggctcaatgtcattgtgaatgatctcaaggggcttggggcaaactacaccgatcttgaggttgcccaaaagatgcttagagccctaccggagaagtatgagacccttgtcaccatgctcatcaactccgacatgtcaagaatgacacccgcaagcctcttggggaagatcaacaccaatgacatgtacaagttgaagaagaaggagatggaggaagcctcaccctctaagaagtgcattgctctccaagccgaagttgaagacaagagcaagagtaaggtgaatgaagtcaatgaggacttggaggaagagatgatccttcttgctagaaggttcaatgatctcttggaaaggagaaaggagagaggaaggggctccaactccaataggagaagaaatagaagactcaataagactctctccaacttgaggtgttttgagtatggtgagaagggacactttgcttccaagtgcccttccaaggatgatgatggagacaagtcatccaagaagaagagtggaggctacaagctcatgaagaagcttaagaaggaagggaagaagattgaggctttcatcggggaatgggactcaaatgaggagagctccgcctcatccgggtctgaggaagaaggtggtgatgatgcaagctccaagaagaagaagatggtcgttgttgccatcaaggaggctccatcactcttcgctccactttgtctcatggcaaagggttcctctaaggtaacatctcttagtgatagtgagagtgatgatgattgtgatgatgtttcctatgaagagcttgtgagtatgtttgaggagctccatgcttatagtgagaaggagattgtcaagttcaaggccctaaacaaggattatgcttctttggatgtcttgtatgaggagctaaagacctctaatgagagactcaccatttctcatgagaagcttaaggaagctcatgacaacctcctttccactactcaacatggagctcacattgatgttggcatatcttgtgatttgcttgatgatagtgctacttgccatattgctcatgttgcatcatctagcatttctacctcttgtgatgatcttatggatatgcctagcccttgctctagttctagctc

SEQ ID NO: 14595 - DNA, 1311 bp, Oryza sativa
  Clone ID: TFbOSC100511j.C1.o3.fg
atggagatggacgaagtcggaggtcgatggacatctctaggacaaatgaaggctacacgagctgcggcccgaataagtgaaacaaacaacacatcagcaagaagagttagttcctttaaggtcctgtccctagttctgatgtttaacagagaaaaaggaaagaatgtcagcgggtatgcctctagtaacttaagtttccaactcaatccaccactggcctcaagagagttaacaagggcacacccttggtccattccaagcatgctgcttagttcacagctaccattggttggaagtcaagaccaaaatcggtatgtgtttgatcgagcatttgccacccaggtcaatgagcttccaatgccagaagagcatgtccccttttgtcatgattgtagagaacaaggacactatgccctgaattgtccatgggtatatgccaaagaagccccttcctttggtttagcagggcagacatcgctaaaccagcctcctcacaccaagtcaagcttgcagcctagtgtgcaaagtagagagcccaatggagagaatccattgaataccgggaaatgctttcctcctagcctttcgcaccacgtggggtcacgtactaagcaagccaaaggcaagaagagtaagaatcagaagagaaaagcaccgatgcgaactgaagaagaagtacgtaagatgactattaccaacaccgaatggcctccagcagggataactattcctagacgtcaaagaggaaataccttccgaggtgcacgacagttgacccagcacctcttaagccatggcggcagagtatctgatagtgaagggtcagatcaagtctccttggattatgaagatgagtctccccgacatgtcggcagggatgagatggaatcaaaagcatgcccccattgtggagaaattggacatgttgctagcatgtgtctcacactctgccctcattgtgaggaagaccatccaccaggtgaatgtcccacccgcaaggtgacatgttttctgtgcgaagcaccaaccattctctgcaccgacggcctcagcaaagaattgtcgtcgatggaagaagttgtgtctctccccgacctactccaggccgagcaaagggcaatcaacctcaggagggcgataccaagcagaagaccgttatctgcttcgaatagcaatcagaaggaagcttctcctgtgaatgatagcaatatacagtcctatcacatcatcacagaaccaatcaaggatgcagtcactagaacaatgccagctatatctctccagaatcagaatgagtatccatgtttgtga

SEQ ID NO: 14596 - DNA, 3885 bp, Oryza sativa
  Clone ID: TFbOSC409287j.C1.o3.fg
atggcggatccagcgagggggagctcgggaagcgcgttcctttaccctcaactcacatcaaccaactacactagttgggtgatacgggtgcaggcaatgatggaagatcaaggcgtatgggaggcgatcgagccggcagccggagcggctgtcgacccgaggaaggacaagaaggtgaaatcccatcttctccagtcactgccggaagatctcttgatgcaggtggcaaagaagcggacggcaaaggaggtttgggactgtctcaagacgaggttcgtcggggcagacaaggtgcgcgacgcgcgcctgcagactctgaaaggagaattcgccagcatggtgatggaggccggggagtcgcttgaccagtacgctggccggatcaccatgatgggggtccggcactctgctctcggcgcgacgttgaacgacgccgccatggtgaagaagctgttcgacaccgtcccggagaagttcgtcagcctcgtcgtagggatcgagcaattctacaacgtcgatgacatgccgttcgaggaggcagtgggccgcctcaaggcgtacgatgagcgggtgcgcaagaagaaagcggcggctagcggagtgaccgccgacggtcaggtgctccttactaaggccgagtgggaagcgcgcttcaagaaaggcaggggagaaacctcgtcgccacaaaagaacaagccctctggtgagggggcgaaccgcggccaggccaggcgcagtcgtggcaggggtcgcggacgcggcggaacgcagagcagcggtggcggctccggcggcggtggccgcgacaagagccacatcaaatgtttcaactacgaagagttcggccactactcaacgcagtgcccacatccgaagaaaaagaaagccgaagcccatcttgtgcagacggacgatgccggtccagctctgctcctcgcggtgacgaaggcggtgcagaacgcgccggggcagggcatggactgtgggctggtcgtgcacgaggagcgtgtatggcctcgcctgatgctggcagagaagggagcagctgctggtgatctatggtacttggataatggtgctagcaaccatatgactggggatcgacggaagttccgggagctggacgagaccgttacaggggtggtcagattcggcgacgcctcatcagtacagattatggggaagggtttaatccttttcgcatgcaagaatggtgaccagtggctgcttgatgacgtctactacatccccagcctctgctgcaacatggtgagcttagggcaactcactgaaactggccaccgagttgtgatggataatgatgaccttgaggtgttcgacaaaaatccctggcgcctggtgataaaggtgaggagaacctcgaatcgtttgtaccggattgagttgcaactagcgtcccctgtgtgcttgctgaccagtctcggcgatccggcgtggctgtggcacgcgcggctcggacatgtaaacttccagacgctgaaactcttggtggacaaggagatggcagcgggagttcctcaagtacatcatcccaaccagctttgccaggcttgcctcatggcgaagcagatcaggcagccattccctgcgatggcgaattatcgagcagaagcgccactcgagctactgcacatggacctatgtggcccaatcacaccgtcgacgtttgccgttaatcgttattttctgttgattgttgatgatttttcgcgttggatgtgggtgtttgttatcaagacgaaggatcaagcactggagatgttcgcaaaattcaagccgctggccgagaacacggccgatcactccatcaaaacactccggacagaccacagtggcgagttcttgtccggcgagttcgcgcgggtgtgcgatgaggccggcatcgagcgacatctgacggcgccgtactcaccgcagcagaacggcgttgttgaacaccgcaacagatcggtgatggcgatggcgcgctccctcctgaagggaatgtctgttcccggcaggatgtggggggaggcggtgcggcacgccgtgttcctgctcaaccggctgccaaccaagtcgatgggtgaacacactccgttcgaggcatggacggggaagaagccacacttaggacacttgcaagtgttcgggtgtactgcgcacaccaaggtgacaactccaaatctgaagaaattggatgatcggagagaggagaattccaccgagtttgtggtagaggaacctgttggcgagcagcagccggcgctggcagaacagtctaccacggtggaggcgtcactgagcacggccggcagcgacgacggcccgctgcggtacaggagtctggcggacatcatgctagaggcgccacgcgtagacttggtggatgaagaggatggtgaagcattgctcgcagagacggaggagccgtcatcgtaccgcgaggccgcaggggagccggcgtgggtcgacgcaatgcagaaggagctggaggccatcgagaagaactcaacgtggtcgctgtgcacattgccggtgggccacaaagcaatcggactcaagtgggtgttcgagttaaagaaaaacactaccggggaagtaatcaagcacaaggcatggctggtcgcaaagggctatgtgcagaggcacggtgtagactttgaagaagtgttcgccccggtggcgaggttggatacggtgcgtaccatacttgctgtcgcagcggaccgaggttggcgggtgcatcaccttgatgtcaagtcagcttttctcaacggggagctagaagaagaggtgtatgttgcccaactggaggggttcattaagaagggacaagagcaccttgtgctgaaattgagcaaggcactatatggcttgaggcaggcgccacgggcctggaacatttgcttggacaagagtctgaaggaacttgggtttatgcggtgcaagcaagaacaagccgtatacactcgaggcagaggagcagaagctatgattgttggcgtttacgtcgatgatttaattgtgacaggggagaatcctgccagggtagaagcattcaagaaacaaatgatgggggagttcgagatgaatgatctagggctcttgagttattatctgggaattgaggttggacaagttcctgttgatccaaagacacagcttcaaaaggatgcagatggacaccctgttgatgctattgaatatcggcgtgtgatcggttgccttcggtatttgctgcatacaagaccggacctgtcatatgctgttggagtggcgagcagattcatggagcatcccaccatgacgcacttgaaggcagtgaagcaaattctcaggtatttgaaggggacaatcgactgtggccttgtgtataccgcaggaattggtgagatcacaatcacggggtacactgacagcgatctagccggagatgttgatgatcgtcggagtacaggaggtatggcgttctatatcaacaacagtttggtggcatggagctcgcagaagcagaagacagtaactctttcttcttgtgaagcagaattcatggcagccactgcagctgcctgtcatgcactttggctaagggcattgctgggagagctactcggtgaggaggcaaaattggtaaagttgtttgttgacaacaaatcagctattgctttgatgaagaatcctgtttttcgtgggaggagcaagcatatagatactcggtatcaattcattcgtgagtgcatcgaaagaagacagattttggtcgaatttgttcgttcagaagaacagcgtgcagatgcgctgacaaaagggttgccggcggcaaagctagtgacggcaaggtttctgcttagagttcgtgatcttggagaacgccaggcctaa

SEQ ID NO: 14597 - DNA, 1715 bp, Oryza sativa
  Clone ID: TFbOSC19560j.C1.o3.np
atggcaggattgcgcacggggaaatgagatggtcatgctcaacgtcaacatcttcaccatcaacgagatatagcgacttcttcacgcatcacatatgaggtacctgataatgatcttgcaagggtagaatctaaattgccagtttttgatggtaagtatgattctgccgcttatgttaattgggagctagcagtagaaaaacaatttgatgagtatgatttttctaatgctcaaatgattaaggctgttagtaataagtgtatcggttctgcatctttttggtggcatactgtgggaaataagcttgaaacttgggatgaatgcaaaatactgatgagaaaaagatttgtgttttcatactatagacgtgctctctttgagaaatttgaacatataaaacaaggtgacaaaactgttagggagtactttcatgattttaaaatttgtatcacttatagtggtttacaagaatctaatgagaacacaatgactagatttttcagagggcttaattccaatattcaggttgggcttgttaatgtgacatataatcatataggccaattgttcatgcttgcttgcaatattgagcgcaaaattttggagaacccaatggagcaacaagctatgcttgtgcctcctatcgctgatattttgcaggaagttcagaacagtccccaaaatgagaagaacgatatgtttgagatgtcacttccatcactcgcgaatgaggagaaggctgatgcacctacattatctgaagagggcataaaaggtaaattaaatggtgcagaaattactcaagtagagcaaccattagtggaatcaattactgagttgcctttgtcacaagttgatttacttgctgttccttgtgataaagaagagttgtgtgataatgtttcacttatatccatgccacaactagtgaatgaacatgttagttctactatttctttgtgtgctgattctaagcatgttgttcacattgctaatgaagtagaggaacgcaaattgctatcttctttaaatactttgggctatgttcagtttgatgatttttgtgagctcgataatttgaaggagaaattatttgctaaatctgatttgccatgtccaactaatgctatttttcatatctttggcgaatataatgatagaggaatatttttggtgcatagagtttacatttgttcagatttagaacatcttgtagttccggataaaatatgcaagctagagagacatgttactgctaatcatattgtctcgagtttgtcttgttttgattgcaagaaacaggttgttttcagtggactgcgcgaagagcaccatatggaaaaaccgaggacggttttctgtgaagaaggggaggatgatgtgaccatggctactatggatacgaccattgctcacatcatgaatcaacaagaagacatcaagatcaagtcctccatgtgctgcaatctgattcggccacgtgttacattgctgacttcaaacggccgccaaatctacatacgtgctccgttttgggcccgtgagtacttgatggaaagctctcgaagtcctccttccaacggatccagcctcatctcggaaatctatctcgtttggccgcaatcacaaaagcaaggaataaggttgatctgcaccggcaagatcaacaacccacagagaggtgtatcgatcgctaaggcgcaacacaacgtctc

SEQ ID NO: 14598 - DNA, 2549 bp, Oryza sativa
  Clone ID: TFbOSC19560j.C1.o5.fg
atgggccccacttgggccggggtcccaaacgaagttacaagcccaaaggaccatgacagtaggtggccgaatcggattccagcatttggaggccttgaccttgatgtcttcttgttcatctatgatgtgagcaatggttgtatccatagtagctatggtcacatcacaaaggctagtgggccccacagaatgaggaggcgattgtctcaactgttcaaagggtccggcccttcatcaagtcatcatgacgggtctagcactcgttcatcagctaatatctcgatggaagacgccgaagctccgcgacatgatacggacatcactacctcggatacacacaacaatcctccaatggtcattcaaggactgatagcaagagctcgtgcgcgacaattaaatttagaggtgagctcgttcctatgttcttctttgtatgaattcgagaaaagattgctacctaatgaatatattgtgattagaaataatagaggggacaaggagacacttggagaaggacttagagccatggaggatcatcgaggacgtccaagtcaaggtggaggcccaaaccaattcgacctcggtgcaattcggagtctaggaccagtctgcactaaaacgggcgcccaggtcgcatacgtgctcggattggggcgttctttatatgaatggaaaactaagaagataacctttccaatggttttggtcccacatccaaatactttccgagtcaatgggtatcgaccgaacaagttgacatccagaatctgtcccggtgctgtgtcaccgtatttgggcctttgggccataacctttcggaagatcgggaaccctagtgcacatcaagtggtatcggaggccgttgtaaagtctgtccaagatgccttcactaaaatcggcttcctgaaccacatggagaggttggacaagcagatatccacgctaactgatcgggttgccgcgttggagacaccttccaatgaggaagtgtgggctgggttatctgatgagggggtactacctactacttgggaagaacttaaggtagctatgcacgataggtttgttcctccatcttatcatagagatttacgcaagaaattgatgcgtttggaacaaggggataaatccgtacaggattactatggtgagctacaaaagggtgtgagacgctgtggcatagtggagggggtcgaggatgctatttttcgtttttattctggtttgagggaggaaattcaaaacattgttgattataaggaatttaactctatgaaccagttgttttggtttgcaatgcttgaagagaaggaattgcaggggcgtgaccatcagggcaagaacaaggcaagcacatacactccacgcacgatgccatctacgggactacccagggccgtttcttttcgggcgccttcccagccagcgagcaagcgaccagctgcattcggagcttctgcggcaccaaaaccatctccaccacaaccagcagagtcaggtaatggttcttcgcaggtacccgccaagagtgcctcatctgtcgcctcgacgggacgcattcagtgccaccgttgccaagggtttgggcatgtgcagaaagattgccctattcaacgggcctatgttgctacagaagatggctacatcaccacctccgacgtggaagaggaagaggaggaagaagaagttgaggatgaggatggagaagtctttggccgtgatgacacaactgactacaggaccatcgttgtgcagcgggtgctcagcatgcagattttcttcgtcatcaacaaccgtcgtgcacgtgtgatcattgatggaggtagctgcaacaatttggtgagttctgatttggtcaagaagcttggcttgactacacgtacacatccacatccttaccatattcagtggttaaacgattttggaagagcaaagattctgttgattgtgatgtggttcctatgcaagcttgttcacttttgcaaggagcatcattgccaaaccgtgctgcttatcgaaccaacccagaggagactaagggaattcagcggcaagttcaagatctcttggaccgcgggattctatcgccgtttcgtcaaagatttcagtacctttgctgcaccattgaatgagttgatgaagaaaggggtggtcttccattgggaaaagacacaggagaagtcgtttgacactttgaaggacaagcttacacacgcaccattgctacaacttccaaactttggaggcaagactgagccacaaactaagccttacccactagacatgtggaagtacggtagtgctttgcaacagaggcccgagcttaatcctgatagtacccgaggtgtgttgatgcaagatggtaagcctgttgcatactttagcgagaagttgcatggtcctgttttgaattattccacgtatgataaggaattgtatgctcttgaagcgcatggaggagggttgatgggacattttggagctaagaagacggtagatgttttggccatgcatttcttttggccaaggatgagaaaagatgttgagag

SEQ ID NO: 14599 - DNA, 1314 bp, Oryza sativa
  Clone ID: TFbOSC33342j.C1.o1.fg
atggaggatcatcgaggacgtccaagtcaaggtggaggcccaaaccaattcgacctcggtgcaattcggagtctaggaccagtctgcactaaaacgggcgcccaggtcgcatacgtgctcggattggggcgttctttatatgaatggaaaactaagaagataacctttccaatggttttggtcccacatccaaatactttccgagtcaatgggtatcgaccgaacaagttgacatccagaatctgtcccggtgctgtgtcaccgtatttgggcctttgggccataacctttcggaagatcgggaaccctagtgcacatcaagtggtatcggaggccgttgtaaagtctgtccaagatgccttcactaaaatcggcttcctgaaccacatggagaggttggacaagcagatatccacgctaactgatcgggttgccgcgttggagacaccttccaatgaggaagtgtgggctgggttatctgatgagggggtactacctactacttgggaagaacttaaggtagctatgcacgataggtttgttcctccatcttatcatagagatttacgcaagaaattgatgcgtttggaacaaggggataaatccgtacaggattactatggtgagctacaaaagggtgtgagacgctgtggcatagtggagggggtcgaggatgctatttttcgtttttattctggtttgagggaggaaattcaaaacattgttgattataaggaatttaactctatgaaccagttgttttggtttgcaatgcttgaagagaaggaattgcaggggcgtgaccatcagggcaagaacaaggcaagcacatacactccacgcacgatgccatctacgggactacccagggccgtttcttttcgggcgccttcccagccagcgagcaagcgaccagctgcattcggagcttctgcggcaccaaaaccatctccaccacaaccagcagagtcaggtaatggttcttcgcaggtacccgccaagagtgcctcatctgtcgcctcgacgggacgcattcagtgccaccgttgccaagggtttgggcatgtgcagaaagattgccctattcaacgggcctatgttgctacagaagatggctacatcaccacctccgacgtggaagaggaagaggaggaagaagaagttgaggatgaggatggagaagtctttggccgtgatgacacaactgactacaggaccatcgttgtgcagcgggtgctcagcatgcagattttcttcgtcatcaacaaccgtcgtgcacgtgtgatcattgatggaggtagctgcaacaatttg

SEQ ID NO: 14600 - DNA, 1260 bp, Oryza sativa
  Clone ID: TFbOSC401549j.C1.o27.fg
atggcggcgacggtggtttccaaatttgaggtggtgaagttcgatggcaccgggaatttcgttctctggcagatgaggctgaaggatctgttggctcaacaggggatatccaaggctcttgaggagacgatgccggaaaagatggatgctggcaagtgggaggagatgaaggcgcaggcagctgcaacaatacgcttgagtctctcggattctgtcatgtatcaggtcatggatgaaaaatcactgaaggaaatttgggacaagttggcaagcctgtatatgtccaagtcgctgatgagtaagttgtatctcaaacaacagctatatggtttacagatgcaagaggagtcagatcttaggaagcacgtggacgtcttcaatcagttggttgtggatctaagtaagttagatgtgaaactggatgatgaagacaaggccataattcttctgtgctcgcttccaccgtcttatgaacatgtggtgactaccctgacgcacggcaaggatactgtcaaaactgatgagataatttcgtcgttgcttgcacgagacttgagaagatcaaagaaaaacgaggcaatggaggcttctcaggctgagagtttgctggtcagggcaaagcatgatcatgaagcgggggtgtcaaagagcaaggagaagagggcacggtgctataagtgtcatgagtttggacatataaggaggaattgcctgttactgaagaagaggaaaggtggcattgcaagtttagcagctcgtggtgatgattcagatagcagcagtcatgagattctcacagtgtctaacgagaagtctggagaagcgtggatgttggacttagctagttcctatcatgtgacatcgaagcgggagtggttctcttcatacaaatctggtgattttggtgttgtttacttaggcgatgacacgagttatcgtgttgttggagtgggcgatgtcaagttcaagatgtatgatggaaacgaggtgctactttcaaatgtgagacacgtgccgggactaaggaagagtttgatttcgcttgggagcctacatgagacgggttggttgtatcaggtggattctaataggaagaccatgaatatcatgaaggacggcaagactgttatgactggtgagaggacaagttcatgtttgtacaagttacaagggagtgctgttgcaggtggagtcatggaagatgggtatgctggtgttgttgtgcacgatcctgaaggcggcaagcctggcgtaggctag

SEQ ID NO: 14601 - DNA, 1875 bp, Oryza sativa
  Clone ID: TFbOSC417388j.C1.o2.gm
atggcggcgacggtggtttccaaatttgaggtggtgaagttcgatggcaccgggaatttcgttctctggcagatgaggctgaaggatctgttggctcaacaggggatatccaaggctcttgaggagacgatgccggaaaagatggatgctggcaagtgggaggagatgaaggcgcaggcagctgcaacaatacgcttgagtctctcggattctgtcatgtatcaggtcatggatgaaaaatcactgaaggaaatttgggacaagttggcaagcctgtatatgtccaagtcgctgatgagtaagttgtatctcaaacaacagctatatggtttacagatgcaagaggagtcagatcttaggaagcacgtggacgtcttcaatcagttggttgtggatctaagtaagttagatgtgaaactggatgatgaagacaaggccataattcttctgtgctcgcttccaccgtcttatgaacatgtggtgactaccctgacgcacggcaaggatactgtcaaaactgatgagataatttcgtcgttgcttgcacgagacttgagaagatcaaagaaaaacgaggcaatggaggcttctcaggctgagagtttgctggtcagggcaaagcatgatcatgaagcgggggtgtcaaagagcaaggagaagagggcacggtgctataagtgtcatgagtttggacatataaggaggaattgcctgttactgaagaagaggaaaggtggcattgcaagtttagcagctcgtggtgatgattcagatagcagcagtcatgagattctcacagtgtctaacgagaagtctggagaagcgtggatgttggacttagctagttcctatcatgtgacatcgaagcgggagtggttctcttcatacaaatctggtgattttggtgttgtttacttaggcgatgacacgagttatcgtgttgttggagtgggcgatgtcaagttcaagatgtatgatggaaacgaggtggattctaataggaagaccatgaatatcatgaaggacggcaagactgttatgactggtgagaggacaagttcatgtttgtacaagttacaagggagtgctgttgcaggtggagtcatggaagatgggtatgctggtgttgttgtgcacgatcctgaaggcggcaagcctggcgagcgcgatggtgtagacgtggctggactagctgtcggtgaggaggtgggagccgtgttgcgccatgaccgcgtggggacaggcagcgaccgcgtgggcgcccgcaacaggaggatggagcaggcacccgaattgggcttgcgtggagctagggcgtgcgcccatggtgagcacctcgcacccaaactgaggcacgcggtaccttctctcgcgaggcccggtagcggctgcttttccgcactgtggagctcgtgccctcgcgcctcccgtgcccttgcgccggcaactaatctacacaaatcgcggcaacaaaagcggcaacaaatcgggcggcgcggtcgacggcgaggcgaggcgcacgacggcggcatccccgacgtgccgccgcagcatgggaggcgaggaggtgcgacggcgtgggaggaaccgctggccgcaagcaccatcgtctcagccttctggatccaccgccgcgtccccaacctccttcgccgcgtccccagcctacttcgctgccgccgccgtgaggagaggggagaggagaggccaccggcggggagaagggagaagccgccggcggggagaggggagaggagaggccaccggcggggagaaaggagaagccgccggcggggagaggggaaatgcagtgtcgtcgaggagaggaggggacagccggtggagttggaagagggtgaggggcgtggtgactga

SEQ ID NO: 14602 - DNA, 3519 bp, Oryza sativa
  Clone ID: TFbOSC418783j.C1.o5.fg
atggtgaagacaaggaatggttcccgtgaatcccacaacgccagtggcagcgaagagcagatcagtagagcacgtgctagcgatgcatctagcaacagttcatctccaccgcccgagaacccaacaattgctcaggtgttggacaatcagactcagatgatgacaatgatgatgcaacagatacaacaacagtaccatcagtccaaactgctagagtttctccgtgtcaagctgcccactttctcaagaaccaccaacccaatcgaggccaccgactggcttcatgctattgagaagaagctgaaacttttacaatgcaacgaccaagagaaggttgcttttgctacacaccagctgcaaggtcccgcttctgtttggtgggacaactacatggtgacccgtccagctgggacagaggttacttggttagagttttgtaagagttttaacaaagcacaggttcccgagagaattgtggcacaaaagaagagagagttccgttccctacaacaaggaaccagaacagttatagagtatctgcacaagttcaatcgcctcgcgcgctacgctcctgaggacgtgcgcactgatgacgagaggcaagagaagtttttgtctggtattgatgatgaattgaccaaccagctgatctccagagactatgaggactttgagaagctagtggacaaggctatccgtcaagaggagcagtgcaacaaaatgaaccgtaaaaggcaggcaactcagttcagggctccccaggggaaaaatcagaagcctcacttcacgatgggatgtcagggtggaccttccaccatgattatccggcagcatcgtccttaccacccaggaaatttcaacggtatcaacaacagtggcaatcacagcaacagtgagcatcacagcctcaatccgactccaagtccactaatgaatgaagctcaatcagttcagccagctctgcctgctcagtcaaaacagcccaaggagttcgaaggaaagcccgaactctgcttcaattgtaacgagcccggacacatggttggtacatgcccgaagccaagacgtgccggactcaagttcgttcaggcccatgtcaatcatgcatctgcagaggaggcacaatcagcaccagaggtcatattgggcacatttcccgtcaactcgacaccggcaataatattgtttgattctggtgcaactcattccttcatttccaagcgttttgctggtgcacatgggttatctttagtgaagcttaagataccaatacgagttcatactcctggaggtggcatgaccacaactcactactgcccatcagtgacagttgaaattaaagggttgatttttccagccaacctcattcttctcgaatccaaggatctagatgttattcttggaatggattggctgacaaggaatagaggagtgattgattgcgctagccgcaccatcaagttgaccaaacaagaggtagcggtggagaaaaccactaagaagttggaggatattcccatagtcagagagtatccagaggtttttccggaggatctgacatcaatgccaccgaaaagggatatcgagttccggatcgatttggcacctggaactgcaccgatccacaagaggctttacagaatgggagccaacgagttggaggaagtcaagaagcaagttgatgaacagttacagaagggatacattcgcccgagcacgtctccttggggtgctccggtagtttttgtggaaaagaaagataaaaccaataggatgtgcattgactaccgcacactcaatgaggtcactattaagaacaagtaccatttgccaaggattgatgatttgtttgatcagttgaaaggagctacggtgtttatggaatttttggacaagtttgccgtggttttcatcgatgacatactgatctactccaagtccaaggaaggacatgagcagcatcttcggctggtacttgaaaagttaaaggagcaccggctatatgccaagttcaacaagtgtgacttctggcttaaggaagttcagtttctcggtcacgtcgtgaatgctcaaggagtagctatggatccagcaaatgtggagtcagttcccaagtggaccccaccaaggacagtcactcagattcggagttttcgggacttgcgggctattaccgccgatcagacgaaagatttccaggtatattgtgatgcatcctgccaagggctggggtgtgtgttgatgcaagatggcaaagtggttgcttatgcttcacgtcagttgcgtcctcatgaaggcaactacccgacccacgatctggaattggccgcggttgttcatgctttaaagatatggcggcactacctcatcggaaactattgtgagcgaagatggttggagctaatcaaagattatgatatgggaatatactacattcccggcaaggctaatgtggttgcagatgccttgagcaggaagagttactgcaacgtcgtatgggtagaggaactatgctgtgaggttcaacgtgatttggaacatctgaaccttggtatagttgagcacagattcgtggctgccctagaggcacaacctacactggtggagcaggttcgcataactcaagcgagcgattctgaaatagaggaactcaaaaagaacatgagggttggaaaagcccgaggtttcactgaggatgaaaatggaacaatctggatgggagaaagattgtgtgtacctgaaaacaaggagttaaaagacctgatactgacagaggctcatcaaactcattattcaatttatcccgacagtaccaagatgtaccaagacctcaaagaaaaattctattaccaggctagtctgcagatggcaccctttgaagcactgtacggacggaggtgccgcacttcgctcttctgggatcagacaggggaacgccagttgtttggtacaaaagttttaaatgaggcagaagagaaagtcagagctgtcagggaaagattgagaatcgcgcaatctcgacagaaaagctatgcagacaatcatcgaagggagcttactttcgaagcaggggactatgtgtaccttcgtgtcactccactcaggggagtgcactgctttcaaaccaaaggaaagttggcaccatgctttgtgggaccatacaggatcttggaacgcaggggtgaagttgcttaccggcttgagcttccctccagcatgcttggcatccataatgtgttccacgtctctcagttgaagaaatgtttgagagttcctgaggaacaggcaagtccggatcacatcgaaatccaagaagatctgacttatgtggagaagccggctcgtatccttgaaaccagcaacagaaggaccagaaacaacgtaatcagattctgcaaagttcagtggagccaccactcagaagaagaggccacctgggaaagagaagatgagttgaaagccgaccatccgcacctctttgccagctcttccgaatctcggggtcgagattccgtttaa

SEQ ID NO: 14603 - DNA, 1622 bp, Oryza sativa
  Clone ID: TFbOSC28636j.C1.o1.gm
atgcacatagtcaaggagacggaattacttgctgccaagcttgacctcctcatgaagcgcttagacgaccacgacaaacggcctcaagacactgtcaaggctctggactcacacgttacatgtgaggtctgcggcaacacgggtcactctaggaacgactgccgggaaacccgtgaggaggcgatgtatatgggcaacaacaacaacaacgggtatcgtccacaaggaggccaggggtggaaccaaccacgcctatattatcaagggggtaacaacaatggtaacttttctaaccaaccctccttgaaggatctcgtcattgcacaagctaaaaccactgatgcgctaaacaaaaagctcgctgccaatgacaagatccttgaaaatataaatgttaagctagatgtccctgcaaaagaaactgggaggattccggggcaacccgactcctcccttgaaaatgttaaggcgatcacgacgatgggagtaatccagaaaatccacataaacgtgctgttgttggatgctatgcaagtactaacatatgcccgttatctcaaggacatactcaacaacaagagaccactcccaacaacggagcagttcgaccaggccttatgcgatcttggagccagtgtcagcgtcatgccaaaagacgtctttgacaagctcaacttcacggtgttggcaccaacactgatgcgcctacaactagctgactcgttagtccgttacccagcagggatggcggtggatgtgccagtcaagatacgggatttcttcatcccggttgactttgtggtgctagacatggacacgggaaaagagatgtcgctcatcctggggcgcccattccttagcactacggaagccaacattgacgtgggagcgggaagtatccgttttcatattaacgggaaggaggaaaagtttgagtttcaaccaagggtcgaacaatgctccatggtcaggataaagtacgggccgaacccgcagaatattcaagtggtcgaagtggagccacccaagacggatagcctggtgaagttcatgcagaatttcctagagaaggaaacaacgatgcctaggaaccgttattggaggacgttgataaaaccaactataccggccaagaagtcagagcagtcggctgagaagaagccgccttctgcaccaaagccatggaaggtgtggagggaaaagccaaacacgcccgctccatcacctccagagacggctgatgtctcgttggaagacgccgaagctccgcgacgactcctgaacgacaccgacctcgaccttgtctgtgatcgggagagaaaagcctactacatgctgagcaaccgggagtatgctcatacacgagaatactctccggagctgctgaaaaagatagatatggatgttgaatttcgtgctatttggaaagctgttgggaaccaactggggatgcacccggatggacccaagttccacgccacagcattagagtctcaagctgggcaagtgccagtgaggaccggtggcgtgtgcctcatgatatccaatggggggacaaccaacgtcttagatcaagtgacgggggagatccagtacaacctcacggaacacatagctcaaac

SEQ ID NO: 14604 - DNA, 1329 bp, Oryza sativa
  Clone ID: TFbOSC25720j.C1.o1.fg
atgtcatggcacagggccggtgtcctgctgctaggggctcagtcctgcctacctgtcccgggggttccggccgtaggtgggattgggtcggtactcttgtctatggctaggatgggttggaaactatgtcacgtcttccgtccgtataccgtggtgatgtttaacagagaaaaaggaaagaatgtcagcgggtatgcctcaagtaactcaagttttcaactcaatccaccactggcctcaagagagttaacaagggcacacccttggtccattccaagcatgctgcttagttcacagctaccattggttggaagtcaagaccaaaatcagtatgtgtttgatcgagcatttgccacccaggtcaatgagctttcaatgccagaagagcatgtccccttttgtcatgattgtagagagcaaggacactatgccctgaattgtccatgggtatatgccaaagaagccccttcctttggtttagccgggcagacatcgctaaaccagcctcctcgcaccaagtcaagcttgcaggctagtgtacaaagtagagaacccaatggagagaatccattgaatccaaggaaatgctttcctcctagcctttcgtaccacgtggggtcacgtactaagcaagccaaaggcaagaagagtaagaatcagaagagaaaagcgctgatgcgaactgaagaagaagtacgtaagatgactattaccagcaccgaatggcctccagcagggataactattcctagacgtcaaagaggaaataccttccgaggtgcacgacagttgacccagcacctcctaagccatggtggcagagtatctgatagtgaagggtcagatcaagtctcctcggatgatgaagatgagtctccccgacatcttggtgaggaagagatggaatcaaaggcatgcacccgttgtggagaaattggacacgttgctagcaggtgtctcacactctgccctcattgtgaagaagaccatccacccggggagtgtcccacccgcaaggtgacatgttttctgtgcgaagcaccaaccattctctacaccgacagcctcaacaaagaattgtcgtcgatggaagaagttgtgtctctccccgacctactccaggccgagcaaagggcaatcaacctcaggagggcgataccaagcaaaagaccgtcatccgcttcaaacagcaatcagaaggaagcttctcctgtgaatgatagcaatatgcagtcctatcacatcatcacagaaccaatcaaggatgcagtcactagaacaatgccagctatatctctccagaatcagaatgagtatccatgtttgtga

SEQ ID NO: 14605 - DNA, 4011 bp, Oryza sativa
  Clone ID: TFbOSC400775j.C1.o70.gm
atggcgaatgacagggatctcccccgtgtcaggcgggggacggtgttgggtcccacccaaggatgcacaaccaccttgcttccggttgaaggcacccgcctctccctcctcgccggagcgccgtccggtcgcgccgtcgcctcctccagcatcgcagtggcctccccttccccggcttgccctccgtttcccgcggagacccccggagctgcgttcccgccgtcgcccttccctttcctccgcgccggccgcctccagccgcctctgtctccctgcctgagcgccggtcgacgtcgccaccacctccctcggctccgcgacgccaccctcatccccggcatcacctcctcctcgcccgaatttcgccggaacaccgtcgcccgcgccggcctcaccttcctcctcgtcgacgtctcctccggcaacccctttcgccatgcccgtgcgtcagccggcgctgccgtcccctccctcggcacggtgaccggcgtggaacacgccgtcctcgtctccgtgcagccgctgccggctgccctcgtcgcctcctcgctggttccggtcgtcgtcgtcgtcgtcctctcgtcgttcccggtttcgctcgtcgtggcgttcgtccctccgtcaagccgttctcgtccgtcgtctgcgttcgtccagtgtgccgctgcagcccccgtcgtcgtcttcgtcctcggctccgtgtcgtcaagcctcgtgccggccgcgtctcgccttcgtccaaggatcgccgccgaagtcgttccctcgccgtccgtctccgccgcgcccgttcgtcgttgtcgttcccacgcctcatcgcgtggtggtaaggatctctcctctcgctgccccgtcctcgtcctttcggtgtcgccccgtacccgttgtgcggtcgtcgaccccgtgaccatggttgaggtattggagcaagaggtggtggtgcgcacccctactccttccgggagtgacgatgcaagcgggagccgcgatccccgccaccgtcgccagaattctccgactcctctgcgccgcagcccccgacggcaggaggaccccaatcggtctgggggctcggccctctccccgccacctggcggggggaggccacgccgcgccggggtgcggcgccacttgacctacggcgacggtggctcgccccagggcgcacttcaagcagtgggggctcttctatggcaccccctcgttaacccggagcccgagactcccgtccagcgatggttgtacgacgtggccaacctggtcaccgccgctcagcgcacaaaggagagcccgtcggtcagccttgacatcgaggcgatcgacagctccaacgttgtcaaggccctcgggcagccgaaggcacggcgacgacctgtatggggaacaagacgctcggatcaacatcgagcgcagcagggacaagcgccgtgctgcccgcatggggagggcgcctactcgtcaggagtgtcgcgcctctccgcgcgagacgcccgctccccgcgaccattcccggtgggaccgggtgcaaggccttcgtgcatcaacccctccgagttcctccagatctataccacgatcatcatggcagcagggggtgatgaccgggtcatggcgaattactttcccatggcccttaagggcgtgcggcataaccgcatgcttgagaagatcgcctctaaggagccgaagaccaccaccgagcttttcgagctagcggacaaggcggtgggacaagaggaggaacaggaagccggcccactccgacgacgagggctacgtccttgctgcggacgcctcgctgactaccgcacggtaaagaacttggtcgagcggtacagaaagaccgatggggagaggcgacagagtcgccgggagggcaaggcccccgcgacctccgctagcgaccggcgagaggaggccaagaaaaaggcccccgccgatgacgacgacgacagcgataatctggagttccaggtacctcacggaaccgtcgccacgctcgacggaggggcttgtgctcacgcctcccgtcgcagcttcaaggccatgaggcgtaaagttctagccgccgttccaacccgcgaggcggcacggcaggcgcgttggtcggagaacttttacaatgggctcaccccaatgtcccgcgatcacctggacgcggcagctggaggagccttcttctctaaaatggttcaaggagccattgaactcatagagaagatggtctccaatatgggttggagcgaggaacgactccagacccgtcagcgaggcatgcacaccgtcaaggagatggagttacttgctgccaagctggacctcctcatgaaacgcttggacgaccacgagaaacggccacaaggcaccgtcaagcccttggactcacacgtcacgtgtgaggtctgcggcggcacaggtcattctgggaatgactgcccggaaaccctcactgcaaatgaatccgggaggattctggggcaacccgactcctccattgaaaatgttaaggcgatcacgacgaggggagtaatccaaaagatccacatcagcataccattgttggacgctatgcaagtgccaacatacgcccataatctcaaggacatactcaacaacaagagaccgctcccaacaacggaggtggtcaagctgacggaacactgtagcaacctgatactccacaagctcccagaaaagaagaaagatccagggtgtcccacgatcacctgctcgatcagggcacaacaattcgaccaggccttgtgcgaccttggagctagcatcagcgtcatgccaaaattgacgtctttgacaagctcaacttcacggaggaaaagtttgagtttcaaccaaggacggaacaatgctccatcgtcagaatcaaaacttcctagaaaaggaaacaacaatgcccaggaactgttattggaggacgccagtaaaatcacctgcaccggccaagaagtcagagcagtcggctcagaagaagccgtctcccgcaccgaaatcaaagaaggtgtggaggaagaagccaaagatgcccgctccatcacctccggagacggatggaagatccgtgaactgaatcgaaaggaggggtcgggctctccatcaagtcgtcatgacgagtctagcactcgttcatcagctgatgtctcgatggaagacgccgacgctccgcgacaactcctgagcgacgatgaccttgaccttgtcagtgatcgggagagacaagcctactacatgctgagcgactgggagtatgctcacatgcgagaatactcaccggagttgctgaaaaagataagtggaacatacagggagacacgcaacatgacaaggaacgaacaagaaagttcatcatcctcgacacccatgcagatgtatgaggcaggttgggcaccaattggggatgcacctggatggactcaagctccacgccatagcatcggagtctcaacctggtcaagcactagtgaggaccggtggcatgcgcctcatgacatccactgggggaacaaccaaccctccagatcaagtggtgtgcctccagctccaagtgaatggcactcgagttcctctcgttgggacttgggtgaaatcactaggaggatggacacccttgatatgcagacgggggagatccgccgcgccgcgccggggttgtggtcgcagtcgccgcttagcgtcgtcgccgtagggttcgcgcggagtaggagcacctcggccgccccttttcagccgccgaagaccgccggagcgccgtcgctgacgttgacgcgtgccgagccgccgttggagttcgtcgccggccttcgttcgtcgtcgtccgtcgttgtttttcacactgggtgccagactgagaagcggcgagaagtccgtggggtcgctggggactccatgcctctggttatatttatagaggagtggtacacctctggccagagtaaaactattcgaatagccgtgcccgcggtcatgggcgggttgagcaatgtttttcgtgattag

SEQ ID NO: 14606 - DNA, 3875 bp, Oryza sativa
  Clone ID: TFbOSC401354j.C1.o14.np
tcagctagagttcgagcaaaggagagagaatggaggtctggctagctgcgctcccctccacattgactaaccaggagatttctaaagactatgctgattttgagagacttgtggacaggaccattcgttaggaagatcaacgtaacaagatagatcgcaagaggaaagctatgcagttcaggtttcagcaaggtggacagcagaagcatcgctgtggttatggacagcacagtggttctactattatgattgttcgatagcacaggccatatcagctaggaaatttcagccgaggcaacagtggaaatcagaacaaccataatccagttccgcgcccgcccagtctcaagctttgcagccccaccagccaaagaagaagtcagaacaaaagccccttatgtgtttcaactacggagataccggacattttgcaaataagtgccctaaaacaatgcgcaatggacccaaggtcgttcaagctcgtgtttatcatgtgtctacaaaggaagctcaagcagcgtcagaagtggttttgggtacgttccctgtgaactcaattccttctacagttttattcgattctggtgctacgcattcatttatatccaagagatttgtttgggtacacgggttaagaaaagtgtaacttagtactcccatgaaagttaatacaccaagtaatagcttaacattagttagtttttgttcctctttgatgatagaaatccaagggtcaccttttctagccaatcttatccttctggagtgcaaagacctagatgtcatactaggaatggattggttgacaagacataaaggagttattgattgtgcaagccgcacaattacgttggttaattgaaatggagaagtggtagtaattcaatctccatttattcagaagaaagaagtaagcttgaattaagtggaaagtgaacaacaggatgaagtcatgaaagatgtcccaaagttagaagacattcctgtggtttgtgagtattctgaagtttttttggaggagtcgacagctatgctgccaaagaaagacattgagttccgtatcaatttggtcctaggtacagctcccatctacaagagaccgtacaggatggcagccgaagaaatggcagaagttaagaagcaagtggatgagcagttgcagaaaggatacattcgacccagcacatcgccttggggtgctctagtgatttttgttgagaagaaagacaagacaaagaggatgtctactgattatagagcgcttaatgatgttacgatcaagaataagtaccctttgctaaggatagatgatatgtttcatcagctgaagggagcaactgtgctttcgaagatatatctgtgatcaggttaccatcagttcagaattcgcgaggaggatattcctaagacaacttttacgactcgctatgaattgttcgagtgcatagtaatgtcgtttggacttaccaatgcacccacattcttcatgaatttgatgaataatgtgttcatggaatacctggatagtttgttgtggttttcattgatgatatcttggtttattcaaagtctaaggaagaacatgggaatcatcttcacgtagtgttggagaagatgaaggagcattagttgtatcccaagttcagcaagtgtgatttttggttgaaagaagtcaagttcggcatgttattaccactaaaagagtagcagtcgattcgtgaaatgtggaagcagtcactaagtggattccaccgaagacagtgatgcaagtgaggagttttcttggacttacagggtattactgtcggttcattgagaatttctcgagaattgccaagccaatgacacagttgttgaagaaagaggaaaagtttgttcgtacttcgcagtgtcaggagagttttgaggaactcaagaggagattagtgtccgctctaattttgattctgcccaatcagagaaaggattttgaagtgtattgtgatgcatctcgtcaaggtttgggatgggtgcttattcaagaaggtagagttgttgcttacgcctcgcgtcagttgcgtacacatgaagacaattatccgactcatgatttggagttagcagtagtggttcatgctttgaagatctggcgacactacttgattggtaatcgttctgagatatatatactgatcataagagcatgaagtatatcttcacccagcccgatttgaatctccgtcagtgccgattgttagagttgatcaaagattatgatgtgtgtatagattatcatcctggtaaagctaatgtcgttgccgatgcgttaagccggaaaaattattgcaatgcaacatgcttagaagaagtaagtactcaactgatacaagacctagaacgtctgaatttgggaattgtagaacatggttttgttgccgctttggaagcacagccgacactcgttgcgcatgcaaaatatccagagatagcagagcttaagaaaaatatgcgagtggataaagcccgagattttactgaggatgaacatggaacgatatggatgggtgaaagattgtgtgtgcctgacaacaaagagttgaaggagttgactcttagtgaagctcaccagatccaatattcaattcatccgggaagcacaaagatgtaccaatatttcaaggagaagttttggtcggtcagtatgaaaagagagatagcagaattcgtagcactccgtgacgtatgtcagcgagtaaaagcagaacactagagaccagcaggtttgcagtctattcagattccagaatggaagtgggaagaaattggtatggatttataaccggattgccaaggacatcatcaggtcatgattctatttgggtaatagtggatcgtctcatgaaagtggcacattttcttccggttcatacaacttatataggaaagaggttagcagagttgtatctttcgaggattgtctgtttgcatggtgtgccgaagaagatcgtgtctgatagaggaagtcagtttacgtcaaagttttggcataagctgcaagaggaacttggaacccgtttgaactttagcacagcatatcatctgcagaccgatggtcagacagagcaagtaaatcagattttggaggatatgttgagagtttgcgcccttgattttggtggatcttgggataagaatctactgtatgctgagttttcatacaacaacagttatcaagctagtttgtacatggcaccgtttgaagcactttaaggtcgaaagtgtcgtatgcctctgttttgggatcaaactagagaacgtcagttgtttggtacagaagtgttgagttaggccgaagtgaaagtaagagcaatcagggagagattgacgattgcccaatcccgtcagaaaagcaatgccgataatcatcggagagagctcagtttcgaggttgttgatcaagtgtaccttacagttatgtcgctcagaggagtgcaccgttttcagaccaagggaaaatggtgcaacgttacatcgggtcataccgaattcttgaacgtagaggtgaagtggcatatcagtttgaaattccacctaacatggccagcattcacgatgtattccaggtatctcagttgaagaaatgcctaagtgtgcttgaggaaccagcaagtccagataatgttgagattcaggaggatttgacttatgtggagaagcctacatgtattttggagaccagtgagaggagaaccagaaataaagtgatcaggttttgcagactatagtggagccatcattcgtaagatgaagcaacttgggaaagagaagatgagttgaaagccacccatccccatctcttcaccagttcttccgaatctcgaggacaagattctgtt

SEQ ID NO: 14607 - DNA, 2043 bp, Oryza sativa
  Clone ID: TFbOSC402891j.C1.o9.fg
atgcacaccgtcaaggagacgaagttacttgctaccaagctgaacctcctcatgaaacgcttggacgaccacgagaaaaggccacgaggcaccgtcaaggccttggactcacacgttacgtgtgaagtctgcggtggcacgggtcattctgggaatgattgcccggaaacccgtgaggaggcgatgtacatgggcaacaacaacaacgggtaccgtccacaaggaggtcaagggtggaaccaaccatgcccatattatcaaggaggtaacattaacggtaacttctctaaccagccctccttgaaggatcttgtttttgcgcaagctaaaaccactgattcgctaagcaaaaagcttgctgccaatgataagatcctagataacataaatgtcaaattagatggctttgcttccacatttcaaaaccagctgagcttcaataaaatgatagagacccagttagctcagttggcatctttagtccctgcaaatgaatctgggaggattccggggcaacccgactcctccattgaaaatgtcaaggcgatcacaaggagaggagtaatccagaagatccacatcaacgtgccgttgttggacgccatgcaagtgccaacatacgcccgttatctcaaggacatactcaacaacaagagactgctcccaacaacggaggtggtcaagctgacagaacaatgcagcaaccagatactccacaagttcccggagaagaagaaagatccggggtgtcctacgatcacctgttcgatcggggcacaacagttcaacgggaaggaggaaaagtttgagtttcaaccgaggacggaacaatgctccatggttcgcgaggatctccagaagatgcgggagctagtggctggcaatgagcgacaacggcaagggctcgagcaccgtatgtcgaagcttgagaaccacttgtcggagatctgtggctcactgtgggtcacctacaccggtctgcaccagctcgccggggagtgcggcgtcaaggccaccatcccggcgaatcccgacgagttctcgctgacatctttgctcgcggaactggcaacagcgatggagcattatgatcttgagtactttgttgtagtttgtagagacgttgatgtcaaggatgtccagcaaagcgggcagcctgagttgccagtgatcgttccggcacttgcgtccgagccacatgtgccgaggacgaagtttgaggtcgcggaactcgagagaattatgctggaagtaaaaaaggaccaggccgtagagacactcgggggtcgtgaggtgtggttcaactcgtatctgaagagttgctgcacgtccatgtcaagagtctgtagagagctccgagtaccccgtggggatcccgaggaatcggcggccggatacatctcgtggctgaatggggcctgcgcccagctcgacagcatcggtcaacgcattgacgaggccttcaagcaggagtgtggtcgatcaagccgatatgccgaggggcatgtgttggcttgcatacgagatcatcgtccgcagctgcacctcgagttcctccgcgaagggttttctcgttctcggagaactcctacggagataaatggcctggcgaagtcgatggcgccgctggcagagaaggaatttgccaacttgcgaccatcgccgtctgcaattttgaatgcgcctggccgcagaacttgtgtgatcgtctcggtggggagcatggcctctgagccgtacacgaggaagaagggtgtctccttgttggacgttgtcggtgtgtactatgccgtttgccctctcgacttgtccattgctctgagggtgagaaaccgaggcgaagcagatcttgactcccaacctgatgcagtaatcctggaaatcggcactgatgaactgggagccgttgtccgttatgatacggtggggcaatccgaatctgcagaatatccctttgatgaatttgatggcgttgtcggccttgatttcccccgtgggtgtcgcttcaatccacttagtgaatttgtcggtcgccacgaatag

SEQ ID NO: 14608 - DNA, 2871 bp, Oryza sativa
  Clone ID: TFbOSC415111j.C1.o9.gm
atgcccgccggaaatttctgggtccgttacgcgcggcggtttctcggacttcagtttaaattcactcatgaccgttgggcttcacatggtgctgtcgattacgtcttacgatggaaggagtcctactcggacaggactgggtcgtcaatgtatcgtgcagggtccgggtggtgcatgactggtttcaacttgccgaaaaacttcaatgaaaatccagaagctttctttcggagcgttaggccgcgagtcgttgctccgcagaaaactcttccgacagagaaaccagccataccagtgccaccgaccttcaagactatggccagcaagactcttcgcgagtttgctgctccctctgctgacaatgtggccattgggccgcaagtcaacataggagacgtggatttcgacttgaagtccagccttatcacgatggcgcaggctagcccgttctgtggcaagccaaatgaggatgccaatgctcatctgcaacagttcctggagatctgtagcacgtacaccatcaagggcgtcagtcccgacaccatcaggctgcggctgtttctattctcccttctcgggagagcgaagcagtggttctatgccaaccatgctgctgtcaacacctgggacaaatgctatacggcattcctctcgaaattcttcccgatgggcaaaaccaatgctcttcgtggaaggattttaagtttccagcagacaagggatgggtctattcctgaggcatgggagtgtctgcaggagtatgtggccgcctgtcctcattatgggatggacgactggctaatcctgcagaacttttataatggactcaccccaatgtcccgcgatcacctggacacggcagctggaggagccttcttctctaaaacggttcaaggggccgttgaactcatagagaagatggtctccaatatgggttggagtgaggaacgactccagacctgtcagcgaggcatgcacaccgtcaaggagacggagttacttgctgccaagctggacctcctcatgaaatgcttggacaaccacgagaaaaggccacaaggcaccgtcaaggccttggactcacatgtcacgtgtgaggtctgcggcggcacgggtcattctgggaatgactgcccggaaacccgtgaggaggcgatgtacatgggaaacaacaacgggtaccatccacaaggaggtcaggggtggaaccaaccacacccatattatcaaggaggtaacaataacggtaacttctctaaccagccctccttaaaggatctcatttttgtgcaagccaaaaccactgatgcgctaagcaaaaagcttgctgccaatgataagatcctagagaacattaatgtcaaattagacggcttcgcttctgcttttcaaaatcagctgagctttaacaaaatgatagaaacccagttagctcagttagcatctttagtccctgcaaatgaaactgggagaattctggggcaacccgactcctccattgaaaatgtcaaggcgatcacaatgaggggaggtaagtccactcgtgatccgccatatcctaaccctgcaggaactaatgggatgtcaaaagaagcgccatctaatgacttggctgacaaggagattcagccagacaagaccgtgccgcaggaatactgcgacacacggttactgccattcctccaacggatgaggaaaccgtcagcggacgagcagttcgctcgttttgttgaagtgatccaaaagatccacatcaacatgtcattgttggatgctatcgtcagcgtcatgccaaaagacgtcttcgacaagctcaacttcacggtgttgtcaccaacaccgatgtgccttcaactagctgactcatcagtccgttacccggcagggatagaggaggatgtgccagtcaagatacaggatttcttcatctcggttgattttgtggtgctagacatggacacggggaaggagacgccgctcattctgggacgtccgttccttagcaccgcaggagccaacattgatgtgggaacggggaatatccatttcgatatcaatcggaaggaggaaaagtttgagttccaaccaaggacggaacaatgctccatgcctggtgaaatttatgcagaacttcctggagaaggaaacaacgatgcccaggaaccgttattgaaaaacgctggtaaaatcacccgtaccggccaagaagttagaccagccggctcagaagaagctgtcttccgcaccaaaaccaaagaaggtgtggaaggaaaagccaaaggcgcccgctccatcacctttggagacgggtggaaaatacgcaaactgaaccgaaaggaggtacggtcttgcacgtcagactttaaacgacgtgaccttcgccaacaggggttcggccgaacaccctggttcggcctaaccggccaggccaacggtcggctgcctctttctttgaggcaatggctagtaggccccacagccgatgtctcgatgaaagacgccgaagctccgcgacgactcctaaacgacactgacctcgaccttgtcagtgatcgggagaggcaagcctactacatgctgagcgaccaggagtatgctcacacacgagaatactcaccggagctgctgaaaaagatagtgaggaccggtggcatgcgcctcatgacatccaatggggggacaatcaacctcccagaccaagtgacgggggagatccagtacaacctaatggaacacatagctcaaacgcaagaatggcaacaatctgctgatgctcagttcaccaacatcaacaacatgatgcagcaacagcgcgatgaccttcaagcgtacttccgttttcaggggttcaatccttatcaaggaccctga

SEQ ID NO: 14609 - DNA, 1386 bp, Oryza sativa
  Clone ID: TFbOSC6294j.C1.o3.fg
atggcattcctctcgaaattctttccgatgggcaaaaccaatgcccttcgtggaaggatttccaatttccagcagacgagagacgagtccattcctgaagcatgggaacgtcctcatcatgggatggacaactcgctaatcctgcaaaatttctataatggactcactacaatgtcccatgaccatctggacgcggcagctggaggagcgttcttctctaagacggttcgaggagccattgatctaatagagaagatggtctccaatatgggttggagcaaggaacgactccaaacccgacagcaaggtatacacacagtcaaggagacggaattactcgctgccaagctagacctcctcatgaagcgattggacgaccacgacaatcggccacaagacaccgtcaaggccttggacttacacgtcacgtgtgaggtttgcggtggcacgggtcattctgggaacgactgcccggaaacccatgaagaggcgatgtacatgggcaaaaacaacaacgagtatcgtccacaaggaggtcaggggtggaaccagccacgcccgtactatcaaggagaaaacaacaacagtaacttctctaaccaaccctccttgaaggatctcatttttgtgcaagctaaaaccactgatgctttaagcaaaaagctagctgccaatgacaagatcctagagaacatcaacgttcagctagatggtttcacttcctcttttcaaaaccaactgatcttcaataaaatgatagaaacccagctagctcaattggcttctctagtccctgcaaatgaaattgggaggattccgaggcggggaggtaagtccactcgtgatcggccgtatcctaaccctgcaggaactaatggggtagctagagaagcgccatctagtgactcggctaacaaagaggttcaaccagaaaaggccgtgccgcaagaatactacgacacacgattgttgtcgtttcctcaacggagtaggaaaccatcagtagacgagcagttcgctcgttttgttgaagtaatccaaaagattcacatcaacgtgtcgttgttcgatgctatgcaagtgccaacatatgcccgttatctcaaggatatactcaacaacaagagaccgctcccaacaacggaggtgattgagctgacggagcaatgcagcaacgtcatactccacaagctctcggaaaagaggaagcatccagggtgtcccacgatcacttgctcgattggggcacagcagttcaaccaagcactccgtgatctcggtgtcagtgttagtgtcattccaatggacgtctttgacaagctcaacttcacggtgttggcaccaacaccgatgcgcctacaactggctgactcgtcagtccgttaa

SEQ ID NO: 14610 - DNA, 1425 bp, Oryza sativa
  Clone ID: TFbOSC900064j.C1.o23.gm
atgcacaccgtcaaggagacggagttacttgctgccaagctggacctcctcatgaaatgcttggacgaccatgagaaacggccacaaggcaccgtcaaggccttggactcacacgtcacgtgtgaagtctgcggcggcacgggtcattcagggaacgactgcccggaaacccgtgaggaggcgatgtacatgggcaacaacaacggtaatccaaaagatccacatcaacgtgccgttgttggacgctatgcaagtaccaacatatgcccatttctcaaggacatactcaacaacaagagaccgctcccaacaacggaggtggtcaagctgacggaacactgcagcaacctgatactccacaagctcctggagaagaagaaagatccggggtgtcccacgatcacctgctcgatcggggcacaacaattcgaccaggccttgtgcgaccttgaagccagcgtcagcgtcatgccaaaagacgtctttgacaaactcaacttcacggtgttggcaccaacaccgatgcgcctccaactgactgatttatcagttcgttacccggcggagatagcggaggatgtgccagtcaagatacgggatttcttcatcccggttgattttgtggtgctagacatggacacggggaaggagacgccgctcatcctgggccgtccgttccttagcaccgcaggaaccaacattgacgtgggaacggggagtatccgtttccatatcaacgggaaggaggaaaagtttgagtttcaaccaaagacggaacaatgctccatggtcagaatcaagtacgggccgaacccgcagaatatccaagtggtcaaagtggagccacccaagacagatagcctggtaagatttatgcagaacttcctggaaagggaaacaacaatgctcaggaaccgttattggagaacgccggttaaagcacctgtaccagccaaaaagtcagagcagccggctcagaagaagccgtcttccgcaccgaaatcaaagaagaccatagaagaatctcgtgcaggtggaacatacagggagacgcgcaacatgacaaggaatgaacaaggaagttcatcatcctctacacccgtgcagatgtatgaggtaggttgggcaccaactgggatgcacctggatggacccaagctccacgccatagcatcagagtctcaacctgggcaagcgccagtgaggaccggtggcatgcgcctcatgacatccactggggggacaaccaaccctccagatcaagtgacgggggagatccagtatgacctcacggaacatatagctcaaacgcaagaatggcaacaatctgctgatgctcagttcaccaacatcaacaacatgatgcagcaacagcacgacgaccttcaagcgtactttcgctttaaggggttcaatccaccctga

SEQ ID NO: 14611 - DNA, 1698 bp, Oryza sativa
  Clone ID: TFbOSC900333j.C1.o23.fg
atggcgaacgatctatcccaatcacttgatttaagtatatatcgacatgaggattatatattgttaatatctacagtcgatcaagctagcccgttttgtggcaagcctaatgaggatgccaacgctcatctacaacaattcctggagatatgtagcacgtacaccatcaagggcgtcagtcctgacgccgtcaggctgcggctgtttccgttctccctcctcgggagagcgaagcagtggttctatgccaaccgtgctgctatcaacacctgggataaatgctctatggcattcctctcgaagttcttcccgatgggcaaaaccaacgcccttcgtggacgaatttccagtttccagcagacaagggacgagtccattccgaaagcatgggaacgaccgcaggagcacgtggccgcctgtcctcatcatgggatggacgactggctgatcctgcaaaacttttacaatgggctcaccccaatgtcccgcgatcacctggacgcggcagctggaggagccttcttctctaaaacagttcaaggagccgttgaactcagagagaagatggtctccaatatgggttggagcgaggaacgactccagacccgtcagcgaggcatgcacaccgtcaaggagacggagttacttgctgccaagctggacctcctcatgaaacgcttggacgaccacgagaaacggccacaaggcacagtcaaggccttggactcacacgtcacgtgtgaagtctgcggcggcacgggtcattctgggaacgactgcccggaaacccgtgaggaggtgatgtacatgggcaacaacaaccggtatcgtccacaaggaggtcaggggtggaaccaaccacgcccatattatcaaggagtccctgcaaatgaatccgggaggattccggggcaacccgactcttccattgaaaatgttaaggcgatcacaacgaggggagtaatccaaaagatccacatcaacgtgccgttgttggacgctatgcaagtaccaacatacgctcgttatctcaaggacatactcaacaacaagagaccgctcccaacaatggaggtggtcaagctgacggaacactgcaacaacctgaaactccacaagctcccggagaagaagaaagatccggggtgtcccacaatcacctgctcgatcggggcacaacaattcgaccaggccttatgcgaccttggagccagcgtcagcgtcatgcccaaagacgtctttgacaagctcaacttcacggtgttggcaccaacaccgatgcgcctccaactggctgactcgtcagtctgttacccggagatgcagctcatcttgggccgttcgttccttagcaccgcaggaggcaacattgacgtaggaaaggggagtatctgtttccatatcaacgggaaggaggaaaagtttgagtttcaaccaaggacggaacaatgctctatggtcagaatcaagtacgggccgaacccacagaatatccaagtggtcgaagtggagccacccaagacggatagcctggtaagattcatgcagaacttcctggaaaaggaaacaacaatgcccaggaaccgttattggaggacgccggtaaaatcacctgtaccggccaaaaagttagagcagccggctcagaagaagccgtcttccgcaccgaaaccaaagaaggtgtggaaggaaaagtaa

SEQ ID NO: 14612 - DNA, 417 bp, Oryza sativa
  Clone ID: TFbOSC11082j.C1.o1.fg
atggaatcaaaagcatgcaaccgttgtggagaaattggacacattgctagcatgtgtctcacactctgccctcattgtggggaagaccatccaccaggtgaatgtcccacccgcaaggtcacatgttttctgtgcgaagcaccaaccattctctgcaccgacagcctcagcaaagaattgtcatcgatggaagaagttgtgtctctccccgacctactccaggccgagcaaagggcaatcaatctcaggagggcgataccaagcagaagaccgttctctgcttcgaatagcaatcagaaggaagcttctcctgtgaatgatagcaatatgcagtcctatcacatcatcacagaaccaatcaaggatgcagtcactagaacaatgccagctatacctcttcagaatcagaatgagtag

SEQ ID NO: 14613 - DNA, 4347 bp, Oryza sativa
  Clone ID: TFbOSC1509j.C1.o1.fg
atggttggcctgggttggcttgggacgagctgggacccagcgtcgggttgccagaacgccgcactcctcgccatcggcactcttcaccagcgctacccggacgagttgcagcactcgccctaccgctaccaccctcgtcgtggaggagcccgcgactacgccatcttccgggatgctagctcggaggatgacgctaccatcatgcacctggcgcgcatggtggaggcgtacgacgcgacccgtatcgacttccatcagatggtgcgtcgtgggttggtcgagaacagcatgaagatcctggagctgcgtcaggagaatctgcagctgaagaaggacctagacgcagtggaggcgcagctgcatcagcttaagatcgcccagggagagatggtgacaaccaggagaagtgctgctacaggtgaaggcagtcaccccgaaggcagcaaccacaacaaccatggcagcccacctccacctcctcctccgcttccaccaccaccaccagacaccaacgccatcctcacccaaatcctcgcccagcaggccaacatgatggctgctttcctccaccacatccaaaacccgccacaacataatgctccaccaccacccccacaacactctaaactcgccgagttcctccgcatccgtccgcctaccttctctagctccaataaccccgtggatgcgttggattggttgcatgccgtggggaaaaagttagacatcgtgcagtgcagcgatgaggagaaagtcatcttcgccgcccaccaactgcaggggcctgcatctctgtggtgggaccatttccaggctacgcagctagaggggcaacctattacttgggcccgcttcaccacgtctttccggagaacccatgtgcccgccggagtcatggcccttaagaaaagggaattccgagagttgaagcaaggcaaccgctccgtgatggagtacttgcatgagtttaacaacctggcctggtacgccccggaggatgttcgtgaagatgaggagaagcaagagaagttcttggcaggaatggaccctgagctgtccgtgcgtctggtctccggggactatccggatttccagcgtttggttgacaagagcatccgcttggaagccaagcagaaggaactggagtcgcacaagcgtcgcttggcgaatttccgcaaccaacggggggctaaccaaagggtccgctacaccaatccctatccagggggatcctcctcgcagcagcagcagcagcagcagcctcgctccgcgccccgacctcaattcgtggtgcgcgtcccacagccgcagcaacagcagagtcagcaagggactcgtgcgccccgtccccctacgccagctctgcagcctggtcaaggccacagggacgctcaaggtcagcagcgtctgtgcttcaactacttcgagcccgggcactttgcagctaaatgcccaaagacgaggcgccagcaaggccaagcgcctccccgctctaacaacggtggtaaggatgtcattcggggtcgtgtgaaccacgtgacggccgaggacgtgctgacaactccagacatcatcgttggagtagtgtattgtgcaagacgcactgtcactctgtaccgagggccggaacaaccggttgttttctttgcacccccaacctctgttggcagttcagaacttcatcagataagactgtcggaaatccccatcgtcagggagttcggtgacgtgtttccggaagaactacccggtatgccgccgaagcgagagattgagttccggatagatcttgctccaggaaccactcccctgtacaagcatccctaccgtatggcagcaaatgaactggccgaagttaagaaacagttggaagagttgaaagaaaaggggtatatacggccgagtacttccccctggggtgctcctgtgatttttgtggagaagaaagacaagacgaagaggaggtgcgttgactacagagctctcaatgaagttactatcaaaaacaagtaccctcttccccggatcgatgatctgttcgatcagcttaaaggtgccacgtttgttgtggttttcattgacgacattctggtgtactcacaatcagaggaagaccatcagcaccatctccgtctggtgttgggaaagttgcggcaacatcaattgtatgccaaacttagcaagtgtgagttctggttgtccgaagtcaaattcttagggcacgtgatatctgctaaaggagttgctgtggaccccgaaacagtgaccgccgtcactgattggaagcaacccaagacagtcactcaaattcgcagtttcttgggtttggcaggatactaccggaggttcatcgagaacttctccaaaatcgctcgacccatgacccagttgttgaagaaagaagagaaatttgtgtggagcccacaatgcgagaaggcgttccaaactctcaaggaaaagctggtttcctcgccggtgttaatcttaccggatactcgcaaggacttcatggtgtactgtgacgcttcacgccaaggactggggtgcgtgctcatgcaggaaggtcatgtggtagcctatgcctcacgccagctacggccccatgaaggcaactaccctacccatgatttggagttggccgctgtggttcatgctctaaaaatctggcggcattatctcatcgggaatcgctgcgaaatatatactgatcataagagtttgaaatacatattcactcagtcggatctgaatcttcggcagagaagatggttagagctcatcaaggattatgatgtgggaattcactatcatcctggtaaggccaacgtggtcgccgacgctctaagtcgaaaaagccattgcaacactcttgaagtccgtggcattccacccgaacttaatcaacagatggaagccctgaacctaagcatagttggtcgtagattcttggcaacgctggaagccaagcctaccttgctcgatcaaattcgcgaggctcagaagaatgatccggatatgcgtgaactcctcaagaatatgaaacagggtaaagccgctggtttcacagaggatgaacacggaaccctatggaacggaaatcggatatgtgttccagacgacagagaacttaaacagctgatacttcaggaagctcacgaaagtccttattccattcaccctggcagtacgaagatgtacttagacttgaaagggaaatactggtgggttagtatgaagcgggaaattgcagagttcgtggccctttgtgatgtgtgccagcatgtcaaggcagagcaccaacgaccggccgaacttctccaacctctccaagtaccagaatggaaatgggatgaaattgggatggatttcatcaccggacttccaaaaacccaaggcggatatgattctatatggaccacctatggaggtaacaaactagccgagctctacttcgctaggatcgtgagtctccatggcattcctaagaaaattttatctgataggggaagccaattcacctctcacatttggaagaagctccaagaagagctgggtacccgattaaatttcagcaccgcgtatcacccgcagacagatggacagaccgagcgtctaaatcaggtcctagaagatatgcttcgcgcatgtgtcctagatttcaggaagacctgggataagagcctcccctatgccgagttctcctacaataacagctaccaagccagcatacaaatggcaccctatgaagcgttgtatggacgcaaatgccggacactgctattatgggaccaagttggggaaagccaagtgttcgggactgatatcctgagagaagctgaagctaaagtcagaaccattcgggataatctaaaggtggcacagtcccggcagaagatggacgattttgtgtaccttcgggtcacgccattgcgaggtgtacacaggtttcagacgaaagggaagctcgcacctcggtttgtgggtcctttccgtatcattgctcgacgcggggaagtcgcttaccagttggagctgcccgcctccttgggcaacgtgcatgatgtgttccatgtgtcgcaactcaagaaatgtcttcgagtgccatccgagcaggccgattcagagcaaattgaagttcgcgaagacttgacctacgtggaaaggccagtgaaaatgctggacaccatggagcgcaggaccaggaactgggtaatccgtttttgcaaggtccaatggagcaaccacgctgaggaagaaactacttgggagcgtgaagacgagatgaaagcaacccatcccgatctcttcgccagttcttccgaatctcggggtcgagattccgtttaa

SEQ ID NO: 14614 - DNA, 3261 bp, Oryza sativa
  Clone ID: TFbOSC400628j.C1.o8.fg
atgcggcagaggcggccggaggcggaacagtggcagcaacgccactgttgccggtggggatgcacttccggaggtctccgcgggaaatggacggcatgccggggaaggggaggtgactgcgacgccgggggaggcgacggcacggccggccggcgcaaggcgcgcacgtgcgccgcgcatgcagaggggcgcgagggagaggagggaggcggcctagggcggcaggtcggctgggccgggatagggcaggggcggcccaagcggaagaggagggaagagcggaagctcactctcattcactgccccgacgccgagaagaccaacctggcagccgagcaactccaaggcgcagcaggtgattggtgggagaactttctcgccatgcaacccgccggccgtgtcgtcacttgggctcaatttcgggatgcttttcatgctgcccatgtgccgaagggtattatggacctcaaacaacgtgagttcctatctctcactcaaggcaacaagtccgtcatggagtatctccgcgagttcaaccacttaactcgctatgctccggatgatgtcaataccgacacctgcaagcaaaattggtttatgaatgggttgtcggcggagatgcaactcgagctcgttgcacactcttttctggactttcaggaccttgtcaacaggtccgtggtcattgaaagcaagatgaagaaccttgaagctgagtgcaagcgcaagagggctgcgcagatttcagccgcgggtggttcgcaaaaaccccatggttggcagccgccccctccgcgttttcaagcaccaccacctcctcgtccacaaggattcgtgccatgccctcctcagcagcgtgtcgcgcctcctgtgggcggaaatcagcaagctattcgcccacctgttcgctccaacaactgcttcaattgcgggcaagcgggccactacatcaaccaatgctcgtaccctcatcatgcacaactccaaggaccaagaccagcagcaccatgtcctaatccacctctcaggtcagcacctcagggtcagcaaactcagaagaggggtagagtgaaccatgtcacagccgaggaggcgaacgatgcattggatgttcttgtcgggtttaggtgttatcctaggcatggattggctgcacaaaaatcatgggttatcgactgtggccatcgtctcattacactcaaaaataataccggcgaaccgatctttcttgcacttgatgatcattccccacaactccatgctctttcgggcgccaaaaccattgatatagctgctgtaccagtggtgtgtgattaccccgatgtcttcccagaggaattaccaggaatgccgccggatcgggatgttgaatttgtgatagatttgctgcccggaacagctccaatctctaaaagaccgtaccgtatgcctccaaatgagctagaagaattgaaaaagcaactcacggagctgcaagcaaaaggtttcattaagccaagctcctcaccttggggatgtccggctctctttgtaaaaaaggaccttagcttgcggatgtgtgttgattaccgtccgttgaatgaagtcgctgtcaagaacaagtacccattgccccgaattgatgatctctttgaccaactgacaggtgctcatgtgttctccaaaattgatttaaggttgggttaccatcaaatcaaaatcagaccagaagatataccaaaaatagccttctctacccgttttggtctatatgagtacaccgtcatgtcctttggtttgaccaatgcaccggcaaacttcatgagcttgattaattcggttttcatggagtatcttgatcagtttgtggtcatttttattgatgacatcctcatctactccaaatctgaagaagaacatgaaaagaacctctatcttgtattggaaaaattacgtgagcaccgcctatatgccaaatttagcaaatgtgagttttggttgaaagaagttggatttcttggtcatgttttatctgaaggtggagttgctgtagatccaagtaatgttcaaaaggtattagattggggacaacccaaaaatccatccgacatccggagttttcttggtctagctggctactaccgtcggtttattgagaatttctccaaaattgctaagcctatgacccaattattgaagaagaatgagaagtatgtatggtcagctgagtgtgagcaaagttttcaaaccttgaaagaaaagttaaccactgctcccgttcttatcctacccgatatacacaaaagcttcgatatctattgcgatgcctctcgtcaaggactcggttgtgttcttatgcaagaaggccgagttgtggcatatgcatctcgtcaattgagacctcatgaagtgaactatccaacccatgaccttgaattagcctctgttgttcatgcactaaaaatatggcggcactatcttatcggtaaccgttgtgaaatctacaccgaccacaagagtttgaaatatatcttatcccaatcagatctgaacctaaggcaaagaaggtggttagaactcatcaaagactatgacatgggtttacattatcacccgaggaaggctaatgttgttgctgatgcgttgagccgaaaaccgcaatgcaattgcttgtcggtaaaaccccgatcggagaccttatgttcagaaattcataaacttggtttagaaatggtaccacatggttcccttgctgccctagaagtgaaacctactttatatgatcagatcaaagaggcccaaaaagatgacaaagccttgtatggaagaagatgtaggacacctctcaactggtccgagtccggggagaggccattctttggtccagacttagtcaaggaagccgacgaacaagtacggttaattcgggagcgcttgcaaaccgctcaatctagggaaaagagctatgccgaccgtcgtcgacgtgagcttaccttcgatgttggtgactatgtgtacctcaaagtcactccattcaagtccacacaccggtttggagtgaaaggaaaattggcacctcaatccttggcgcgaagcgtcacagtacaccaggaagtccttgcgagtatccgtgattggaagcaacccaagacagtcactcaaattcgcagctttttgggtttggccgggtactaccgaagattcatcgagaatttctccaaaattgccagacccatgacgcagttgctttataaaacctttttaactttgtttatttcttaa

SEQ ID NO: 14615 - DNA, 3693 bp, Oryza sativa
  Clone ID: TFbOSC400732j.C1.o4.fg
atggagcaaaacaacaacaacaacaatggtactagtcaggatggaaataatactagtcatggtgccactggattaataatacctagtgcaagtaatcaagacccttgggctaacttactcgcaaatatactgggcaagcaacaggaaacccagcaacgacagatggaaattttagaacgtattactaaaagtgatgctaaccggaatggacttggggaatttcagaaattaaagccaccaacattttcaggaactgccaatccactcgaagcggaagaatggattgtagccatggaaaagtcatttgaagctatgggttgtacagataaagaaaagattatatatgctacctatatgcttcagtctagtgcttttgaatggtgggatgctcacaaaaagtcatattccgaacgtatctttattacatgggaattattcaaggaagctttttacaagaaatattttccagaaagtgttaagagaatgaaggagaaggaatttctagagcttaagcaaggtaataaatccgtagcagaatatgaaatagaattttcgagactggcaagatttgctcctgaatttgtacagacggatggctctaaagctcgacgatttgaaagtggattacgtcaaccgctcaaaaggcgcgtcgaagcctttgaattaaccatattcagggaggtagtaagtaaagcacaacttcttgagaaggggtatcatgaacaaagaatagaacacggacaacctcaaaagaagtttaagactaataatccacaaaatcagggaagattccgtggaaactactctggacaaatgcagagaaaatcttcagaaaatcaaggcagaaaatgtcccatatgccaaggtagccatgttccatcaatttgtcctaattgctggggaaggtgctttgagtgtggagaagcaggacatactaggtaccaatgtccactgttacagaagggtaaaaatcgagttagttcaactactcagccaaatactaaagtattgactccagtaccctcgctttatttacctggaccgtcttcagcaaataatcatgggccaaatcaaggaaagccacttgcaaatactaataccacacgaggaatgcggtcgaataattcacaaggtgggaatcatgctcgggtatacaacttaactaagagcacagctgaagaatccaacaccgtggttacaggtaatgtcttaatctgctcttatcctggtaaagttttatttgattctggtgccacacattcgtttatctccaccaactttgtgagaaaatacaccatccctactagtcagctaaaagaaagaatttgcatagaaactcctttggatagccaaacaactaatctaatttgcaaattgtgtccaattactattgatggatgggaattaactgctgacctcatacccttggacatgcatgattttgatattatacttggtatggattggttattaccaggaacttctccgatttataaggcaccctacagaatggcccctgttgagctaaaggaactaaagttacaactaaaagaattagaagataaaggattcattcatcccagtgtctccccgtggggtgctcctgttctatttgtcaagaaaaaggatggaagtttgagattatgcacggattaccgagaactgaataaggtgactatcaaaaacaaatatcctttaccaaggatagatgatttatttgatcaactacaaggagctcgtgttttctcaaaaattgatcttcaatcaggctaccatcaactaaagattaaacctagtgatatacccaagactgcttttcgtgcacgctatggacactatgaatatctagtaatgccatttggtttgactaatgcaccggcagcttttatggacttaatgaatcgtatattcaagccttatcttgatcaatttgtagtggtattcatagatgatattttgatatattccaagactaaggaagatcatgcaaatcatttgagaatagtactacagacattgcgagatcataaactatttgccaaattaaagaaatgtgatttttggatggataaagtatcattccttggtcatgttatttcgggtgaagctcctctaacccggttgacacagaagggagtaagatatgagtggactcagacttgcgaagaaagtttccaagaattgaagaatcggttaaccacagcacctattcttgccttacctattatgggagaagaatttaccatttactgcgatgcttcaaaaattggattgggttgtgttcttatgcaaaaagatgctttaagtcgaaaggctctctgtaatatggctattcagatcacacaggatcaacatatacttagagacttggaaagattggatgtggaattaaagatccatgaacccggagtattattagcagtgctccaaataaagcctactttagaagaaaatattctagagaaacaaagagacgacagtgaattacaaaaggcaaagaaaaatattgaagaagggaagcgcgtcaaagctgaacatcaaaggccagcaggactgttacaacccttaagtattccactatggaaatgggaagaaattagtatggactttgttcaaggattacctaccacacctgccggaaatgacagtatttgggtaatagtagatcggctaacaaaatctacccatttcttaccggtaaaaagaaatttttctttgaaaaagttagctaaactatatgtcaaagaaatagtatctttacatggggttccagtaaggattgtgtcagacagagatacccggtttctgtccaaattttggaaaagcttacatagggccccgggaacaaaactagatttcagcacagcgtatcaccctcaaaccgatggacaaactgaaagggtgaatcaaataattgaagatatgttacgatcttgcatcctagaatttaaaggatcatgggaagaatttatgccattagcagaatttgcatataacaatagttatcaatctagtatacgaatggccccgtatgaagccttatatggaaggaaatgcagaacacctgtttgctggaacgaagtaggagaaagaaaattgctaggaccagatataatacaacagacaaaagaaacaatacgactgatacggaaacgactgcaaactgctcaaaatagacagaaaagttatgtagataataggagaagggatcttcgttttgatataggtgactgggtatatttaaaagtatcacctatgaagggagttaagcgatttggacttgggaaaaaattaagtcccagatatgttggaccatttgccatcgtcaagcgaattggagaggttgcttacaaggtgaaactaccagatgctttgatcggagtacatgatgtatttcacatctccatgattcgtaaatgccttcggaggccaagtgatcaagttgaaattcctatggctgagttgcgtaacgatttaacatatcaagaatatcctgtttgcattctggatactaaagatggaaaaacaagaaaccgaaacattcgatttttaaaggtacaatggagtcatcacactcaagatgaggccacatgggagaaggaagatgatttgcaaaagaactatcctcagtttttccatcaccaaggtacaacaatttcgaggacgaaattcctcaaggaggggagcctgtag

SEQ ID NO: 14616 - DNA, 2049 bp, Oryza sativa
  Clone ID: TFbOSC423363j.C1.o9.fg
atgagaggtgggccgcttatggtgacagctcagtacgggctaaccttgtttgttttcactttttgttgtgaaaacagggtagtgcatgactggtttcaacctgccggaaaactccaaagaaaatctagaagctttcttccagagcgtcaggccgcgagtcgttgctccgtagaaaactctaccaacagagaaaccagccgtaccagcgccaccaactttcaagattatggccagcaagaatctcgtgagttcgttgctccctctactgacaatatggccgtcgggccgcaagtcaacataggagatatggatttcgacttgaagtccagcctcatcacgatggcgcagactagcccgttctgtggcaagcctaatgaggatgccaacgctcatctgcaacaattcctggagatatgtagcacgtacaccatcaaggaattcttcccgatgggcaaaaccaacgctcttcgtggacgaatttccagtttccagcagacaagggacgagtccattcctgaagcatgggaacgactacaggagtacgtggccgcctgtcctcatcataagatggacgactggctgatcctgcagaacttttacaatgggctcaccccgatgtcccgcgatcacctggacgtggcagctggaggagcattcttctctaaaacggttcaaggagccgttaaacttatagagaagatggtctccaatatgggttggagcgaggaacgactccagacccgtcagcgaggcatgcacaccgtcaaggagacggagttacttgctgccaagctggacctcctcatgaaacgcttggacgaccatgagaaacggccacaaggcaacgtcaaggccttggagtcacacgtcacgtgtgaggtctgcggcggcatgggtcattctgggaatgactgcccagaaacccatgaggaggcgatgtacatgggcaacaacaacgggtatcgtccacaaggaggtcaggggtggaaccaaccgcgcccgtattatgaaggaggaaataataacggtaacttctctaaccaactcttgaataagatgacagaaacccagttaactcagttggcatctttagtccctgcaaatgaatccgggaggatttcagggcaacctgactcctccattgaaaatgttaaggcgatcacaacgaggggagtaatccaaaagatccacatcaacgtgccgttgttggacgctatgcaagtaccaacatacgcccgttatctcaaggacatactcaacaacaagagaccgctcccaacaacggaggtggtcaagctgacggaacactgcagcaacgtcatactcaacaagttcccggagaagaagaaagatccggggtgtcccatgatcacctgctcgatcggggcacaacaattcgaccaggccttgtgcgaccttggagctagcgtcagcgtcatgccaaaggatgtctttgacaaactcaacttcacggtgttggcaccaacaccgatgcgcctccaactggctgactcgttagtccgttacccggcggggatagcggaggatgtgccagtcaagatacgggatttcttcatcccggttgattttgtggtgctagacatggacacggggaaggagacgccgctcatcctagggcgtccattccttagcaccgcaggagccaacattgacgtgggaactgggagtatccgtttccatatcaacgggaaggaggaaaagtttgagtttcaaccaaggacggaacaatgctccatggtcagaatcaagtacgggccgaacccgcagaatattcaagtggtcgaagtggagccacccaagacagatagcctggtaaagttcatgcagaacttcctggagaaggaaacaacaatgccaaggaaccgttattggaggacaccggtaaaatcacctgtaccagtcaagaagttagagcacccggctcagaagaagccgtttttcgcaccaaaatcaaagaaggtgtggaaggaaaagccaaagacgcccgctccatcacctctggagacgggtggaaaatccgcgcactga

SEQ ID NO: 14617 - DNA, 3318 bp, Oryza sativa
  Clone ID: TFbOSC33327j.C1.o1.fg
atgtgggccaatatatgccatgatgaggacatcccttccaacgatacaaccacacctattgcacagcaaggaccaatgactagagctcgagctcgtgaacttaattatcaggttcaaggttgttcttggcacggcaagaacagcaacaacgtggagtcggtgtaccggttgctaaggcgcagcacccctgtggtagttgtagtcggaccgccaacgtcgtatccttccccaaatcgaagtttaccctcctctcatcgaaagatcgggaacccccgttgctgcatcaagtgctgtaccttgatattacttgcagccacctatagctccacaaatttttatctactatatcacaggatcgtgcttgttgtcggctccggaggatcgggggagcaccctcaacattcaccacgtatgaggggcatcatacaacattttgagcgccaagtgagggagcatgctgaaggccttgatgaggatgttagggtcgccaatgatcgccttggtcaattggaggccgctcaaattgacaccaactccaagctttcctcattggagaggtcccttgtggctgtgaacacttctcttgcaggtatcttgaatacgttggagagaatgggccaagaaggtcatgatggatcggctaggcgcaaccacaatggccatgatgctaatagcagcatcgcagcaagggaagaactggagtacgctgctgacactgagcatgatgaggaggtacttggtcgtccacaaagacaacaacgccggcagcgccatggcatgggcgctccaccacggcgggaggtacgtgataatgatgattctttaggcaagatcaagtttaccattccttgctttgatggaaaatatgaccctgatgcatatcttacatgggagttagccattgatcagaaatttgcttgccatgattttcctgagaataaacgtgttagggctgctactagtgagttcactgattttgcatccatttggtggagtgaatttgttcgttccaatccaaataacactccccaaacctgggatgcaatgaaaagagtcatgcgagctagatttgttccttcatatcatgcacgtgatttgctgcacaaattgcaacaacttagacagggaaacaaatctgtagaggagtattatcaagctttgcaaacaggaatgcttcgttgtggattggtagaaaatgatgatgctggtatggctagattcatgggtgggctgaaccgagaaattcaggacattctagcctacaaagaatataattcaattaatcgtttgtttcatcttgcttgtaaagctgaaagggaagtacagggacgaagagctagcttcaggactaacatttctgcaggtcgtgctagctcttggacatcttctaacgctgctgcaccgtcaactcgagcagcagcaccatcatcctcaagcaacaagctgcgtccctctacaacaaactctacaccatgcccgagtgaaccaacaagaggggttgctgctacaccttccaagagctcatcatcagtagcttcatcaggaaggacaagagatattcagtgcctacgctgcaggggctatggtcacgtgcgcaaggactgcccaagcactcgtgtaatgattgtgagagctgatggtgggtactcctccgctagtgatttagatgaagaaacctatgctttgcttgcaactaacaatgcaggggaaggtgacgcgtcccaccaagatgaggaacacattggggctgaagctgcagagcactatgagagcctcgtggtgcagcgagtgctaagcgcacaaatggaaagggctgaacagaatcagcgccacaccttgtttcaaaccaagtgtgtgatcaaggaacgctcttgccgcgtgatcatagatggaggaagctgcaataatttggctagtgctgaaatggtggagaaacttgcattgagcacacagccacatccacagccttactatattcaatggcttaatagcagcggcaaggtaaaggagcgtactaggagtgagcatcttattgcggctaatgaacttgagaagcataagaagaaacccaccaactctgttcaaaataataaaaatgagattaagctgaagggatcttgtttcattgcaacaaaatcagatttggatgaagttgacactgacactgttgtttgctatgatttggagtatgctgatattttcccaaaggaggttccaccggggctgccaccaattcgagggattgagcaccaaattgacctcattcctggggcctctctgccaaaccgtgcgccatacaggaccaacccggaggaaacaaaggagattcagcgtcaagtgcaagagttactcgacaagggatttgtggtggtatattttgatgacattctcatatatagcagatcaatagaggatcatcatggtcatttgcgtgctgtttttgatgctctacgagatgcacgtttatttggtaaccttgagaagtgcacattttgcacagatcgagtctcttttcttggctatgttgtgactccgcagggaattgaagtagatcaagccaaggttgaagccatacatagctggccggttccaacaacgatcacacaagtgagaagctttctaggacttgctgggttctaccgccgctttgtgaaggattttagcaccattgcagccccattacatgagcttaccaagaaaaatgtcacattcacttgggctgcagcacaaaggaatgcattcgacactttgaaagataagttaacacacgctcctttactccaacttcctgatttcaacaaaacttttgagcttgaatgtgatgctagtgggattggattgggtggtgtgttgttacaagaaggcaaacctgtagcatatttcagcgagaaattgagtgggcctagtttgaattattctacttatgataaggaattgtttgctctagtgcgaacattggaaacatggcagcattatttatggcccaaagaatttgttatacactctgatcatgaatctttgaaacacattcgaagtcaagcaaaacttaaccgtaggcatgctaaatgggttgaatttattgaatcttttccatatgtcatcaaacataagaagggaaaagaaaatgtcattgctgatgctttgtctagacgttacgcaatgctatcccaacttgacttcaaaatttttggcttagaaacaataaaagagcaatatgcgcacgatgatgattttaaagatgtgttgttgaattgcaaggagggaaggacttggaacaaattcgttctcaccaatgggaagcgcatggtggagggctga

SEQ ID NO: 14618 - DNA, 4542 bp, Oryza sativa
  Clone ID: TFbOSC400098j.C1.o17.fg
atgctggctactgagtcagcaccttacttggtggacccgacagtgacacagccacctgccccggagattgtgcacactccactgatctctacaccttctccgcagctgggtttcagtttagagactccgatccaggtcgactccaagacagaggggaccgacactgagccagagatcgagccagacatcactgatctttcagaggatgagacccctgttctccgcatcaccttcctcggaggccctcgcaccctcagcactgcccgcaagagcacccgacccccgggcaagaagcccaagccagatccagaggccactacttccgagccatggggactcagagttatggccactcaaacccaacttctgcaagccattgtaaacaaccaaggcaaccgcggaggatcaagctttggagagtttatgaggaccaagccacccacattcgccacagctgaagaacctatggatgccgaggattggttaaggattattgagaagaagctgacccttgttcgagtacgtaaagccgataaagtgatcttcacagcgaaccaactggaaggaccagccggagactggtgggacacatacaaagaagcccgagaagaggatgctggagaaccaaactgggaggagttcactacggccttccgtgacaacttcgtgcctgctgccgtgatgcgaatgaagaagaatgagttcaggaggctacaacaagggaataccactatacaagagtacctgaaccgtttcactcaactggcgcgttacgcaactggagacctagccgacgaggaggaaaagatcgataagtttatcgaaggcctgaacgacgagttgcgtgggcccatgattggacaggaccatgatagtttccagcgtctaatcaataaggtcgttaggctggaaaacgaccggaaggttgtggagcacaatcacaaaaggagacttgccatgaaccgcccgcctcaggtcgcaccccagcgtcctaaaggggcagcctcctcagtatggaaaccaacagtggtgacaaccaatcgtcctgccgcatccagtaatttccacaggacggttaccattcagaacagagctcctgctccacatcaggccgctactggatcagtgaggccaggaagctatttcaactgtggagagtacgggcatttcgccaacaaatgtcctcatccaaacaagacacccattcgcaccagagctaatgtaatggctattcacgggactactacccctgctgctggacgaggtctattcaggactccgcagactaacaggaccgctaccggatttggccgcgggcaagttaaccacgttcgagctgaagaggcacaggaagaccagggcgtactgatgggtacgttttctatccacttcactccagttaaagttctcttcgatttaggagcatcgcattcatttatatctttgaaagcaagccaacgacacaatttgaccagagttaaactaaggcaaccaatgttagtacattcacctgggggtgaaatagccgtggatacagcttgcattgatgtacctattcgccttagggatgtggtatttccctctaaccttatggtcttggtaccacagacccttgatgttatattaggtatggattggttaacaaagaataggggagtaatcgactgtagacgtagagaagttaccctgaccacaccctggggatcgggtatgagagccaccatggatcaagatcctagactaaccgaacgtgccggaggcatatttaccatgctacccatgaaaggaatgcctatagtgcaacaatttcccgatgtgtttccagaagatttacctgggatgccaccagatcgtgacatagagtttattattgacctgatacccggaactgcccccatatccaagagaccatatcggatgccagtcaatgagttggaggagcttaaaaagcaaatcagagagttgcaagaaaagggatttgtacgtcccagttcatcaccttggggagccccagtgttatttgttaagaagaaggatggtagcatgagaatgtgtgtggactaccgctcactgaacgaagtaactatcaagaacaagtatccactaccacggattgatgaccttttcgatcaacttaaaggagctaaggtgttctctaagattgaccttcgatcaggataccaccaattgaaaattaggaccggggatatacctaagaccgcgttttcaacacgctatggattgtataagttcacagtaatgtcgtttgggttaaccaacgccccggcatactttatgaatcttatgaacaaagtgttcatggattacttggacaaatttatggtagtattcatcgatgatatcctgatctactccaaagacgaggaggagcatgcggagcacttacgattggtactcgagaaacttcggaagcataaattatatgcaaagtttagtaaatgtgagttctggttaaaagaagtcgcttttctaggccacgtaatctcagccggtggagtagcagtggatcctactaaagttgaggccgttacggaatggaaggcacccaaatctgtgactgaaattcggagttttctaggtttggctggatactatcgaaggttcattgaaggattctctatgatagctcgaccaatgacacaactactcaagaaggaaaagaagtttgtgtggtcagaacagtgccaggaaagctttgagcagctcaaagaaaagctgacctcagcgcctattttagttcttcccgacatcaggaaagactttgttatatattgtgatgcatcaaggcaaggactaggaggagtactgatgcaggacggaaaggttgtggcctatgcatcgcgacaattgcgaccacatgaggaaaactaccctacccatgacctagaactcgcagctgtggttcatgcgctaaagatttggagacactatttgattggaaaccattgcgatatctacactgaccacaagagtctgaagtatatttttacccagtcagacctcaacttgaggcaaaggcgatggctggaattaatcaaggattatgacttagaggttcactatcaccccggcaagacaaacgttgtggccgacgctttgagtcagaagagccattgcaatcatctgaggacggaaggaatggctcctgagcttaaggaggaaatagcccaactaaacctacatataataccttatgggcagataaacaccttggacatccaacctcttatgagaacccaaatagaagaggcccagaaggacaacgaggaaatccgagaggtgaaggaatgtctagctgcaggatttgcaaaggaattttcaactgacgagaaggatgtcctatggtataaaaagaggatttatgtacccgaacagggtggacagagaggattaatcctaatggaagctcacgaatcggcatattcattgcaccccggaagtaccaagatgtaccaggatctgaaggaaggatactggtggcccaatataaagagagatgtggccgagtacgtagcgctctgtgatgtatgccagaaggtgaaggctgagcaccagagaccggcaggtttgttgcaaccccttaggattcccgaatggaaatggaatgagataggtatggattttattgttggattgcccaagaccacaacaggatatgattccatttgggtgatcgtggatcgactcaccaagacggcgagattcattcccgttaagacaaattatagcagtgctaagctagccgagttatacatgaccaggatagagaaagtacatgaagccctaggaagttaccttgcgtttagcacagcttatcacccacaaacagatggccagacagagagaacaaaccaggtcttggatgacatgttgagagcttgtgctctggattttagcaaagactgggagagatgtttgtcctacgccgaattctcctacaacaacagctttcaagcaagcctaaagatgtcacccaatgaggcattgtttggtcgacgatgtcgaactccactaatgtggtccgagactggagaacgggcagtatttggacttgacattatccaagaagccgaggaaaagagttacgccgacacccgaagaagaaacctggaatttaaggagggagattatgtttatctaaaggtttctccgttgaggggaacaaaaaggtttaaggtcaaaggaaaactagcaccaagatatgtggaacctttccaaatcaacgctagacgaggagaagttgcctaccagttacagctacccgaaaatatcgccgatgtgcacccagtcttccatgtgtctgaattaaagaagtgcttacgagtgctagaggaacaagctacgttggaagaaattcatattagcaatgatctcacgtatccagaacacccagtccggatattggatgaagctgaaaagaggactagaatgaaagtgtggcgtatgtacaaagtacaatggagtaatcacactaaggatgaagccacttgggaaagcgaagagttcttgaagacggaatag

SEQ ID NO: 14619 - DNA, 3831 bp, Oryza sativa
  Clone ID: TFbOSC400773j.C1.o68.gm
atggccacccaaactcaagttctgcaagctatcgcgaacaaccaaggcgaccgcggagggtcaagctttggagagtttatgaggaccaagccacccacattcgccacagctgaagaacctatggatgctgaagattggttaaggatcattgagaagaagctaactcttgttcgagtacgtgaggccgataaagtgatctttgcggcaaaccaattggaaggaccagccggagactggtgggacacgtacaaagaagcccgagaagaagatgccggagaaccaaactgggaggaatttaccacagccttccgtgacaacttcgtgcctgctgcggtgatgcggatgaagaagaatgagttcaggagactacagcaagggaataccacagtacaagagtacctgaaccgtttcactcagctggcgcgctacgcgactagagatcttgccgacgaggaggaaaagatcgacaaattcattgaaggcttgaatgataaattacgcgggcccatgattggacaagaccacgatagtttccagagtttaatcaataaggtcgttaggctggagaacgaccggaaggtcgtggagcacaatcgtaaaaggaggcttgccatgaaccgctcgcctcagaccgcaccccagcgtcctaaagggacaacctcctcggcatggagaccaacagtggtgacaaccagtcgacctgccgcctccagcaatttccacaggccggttaccattcagaaccgcgctcctgcaccgaatcaggccgccactggatcagtaaggccaggaagctatttcaactgtggagagtacgggcatttcgccaataaatgtcctcatccaaacaagacacccattcgcaccggagctaatgcaacggctattcacgggactgctacccctgctgctggacgagcaaagcatagaggaataattgactgtagacatagagaagttaccctgaccacaccctggggatcggatatgagagcaaccatggatcaagatcctaggctaaccgaacgtgccggaggtatatttaccatgctacccctaaagggaatgcccgtagtgcagcgatttcctgatgtgttcccagaagatttacctggaatgccaccagatcgtgacatagagttcattattgacctgatacccggaactgcccccatatccaagagaccatatcggatgccggtcaatgagttagaagaacttaaaaagcaaatcagggagttgcaagagaagggatttgtacgccccagttcatcaccttggggagccccagtgttatttgttaaaaagaaagacggtagcatgagaatgtgtgtagactaccgatcactgaacaaagtaactattaaaaacaagtatccactaccatggattgatgatctttttgatcaactcaaaggagctaaggtgttctctaagattgaccttcggtcaggataccaccaattgaaaattagaaccggggacatacccaaaaccgcgttctcaacacgctatggattatatgagttcaccgtaatgtcgtttggtttaaccaacgctccggcatactttatgaatcttatgaacaaagtgttcatggactacttggacaaatttgtggtggtattcatcgatgatattctaatctactctaaagatgaggaagaacatgcggaacacttgcgattggtactcgagaaacttcggaagcataagttatatgcaaaattcagcaagtgtgagttctggttaaaagaagtcgcttttctaggccacgtaatctcggccggtggagtagcagtggattctgctaaagtggaggctgtcacggaatggaaagcacccaaatatgtgactgaaattcagagttttctaggcttggctggatactaccgacggttcattgaagggttctctaagatagcccgaccaatgacacaactactcaagaaggaaaagaagtttgtgtggtcagaacagtgtcaggaaagctttgagcagctcaaagaaaagctgacctcggcacctattttagttcttcccgacatcaaaaaagactttgttatatattgtgatgcttcaaggcaaggactaggaggagtattgatgcaggacgggaaagttgtggcctatgcgtcacgacaattgcgaccacatgaggaaaactaccctacccatgacctagaactcgcagctgtggttcatgcgctaaagatttggagacattatctaattggaaaccattgcgatatctacactgaccacaagagtctaaagtatatcttcacccagtcagatctcaacttgaggcaaaggcgatggttagaattaatcaaggactatgatttagaggttcactatcacccaggcaaagcaaacgtggtggccgacgctctgagtcgtaagagccattgcaatcatgtgagaatggaagggatggtccctgagcttagggaggaaatagctcagctgaacctacatatagtacgtcgtggacggataaacaccctagacattcaacctcttttgagaacccaaatagaagaagcccagaaggacaacgaggaagtccgagaggtttctccgatgaggggaacaaaaaggtttaaggtcaaaggaaaactggcaccaagatatgtgggaccattccagatcatcgccaagcgaggagaagttgcatatcagttacagttaccagagaatatcgcggatgtgcacccagtcttccatgtgtctcagctaaagaaatgtttacgagtgccggaggagcaagctccgctggaagagattcacattagcaatgatctcacatatccagaacacccgatccggatattggatgaagccgaaaagaggactaggagcaaacccctcctctgccgcgttgccctcgcgccccgcgcgccgcgcgccgtgcgccgctccgcctcccctctgccgtcgccgtcgccatcaccgcgcgtgccgccgtcgcctcgccgcccgcccgtcgccatcgccgcctgccgccgcgccgacgtcaccgagccgccccgagcccgcgccgacatcgccacccccgtgccgcgcgtgctgccgtcccgttgccgcgtcgcctcgagccccgcgccgccgtcccttcgccacgtcgccgcccgtcgccgtcaagcccgcgccgcgccgcgccgcgccgtcctatcattgctgtcgcgccgtgccgtcgtgtcgccgcccatcgcatcccgccctgagccgcgcgccaccgctgtcgccgtcgccatcgacgtcccgtcgccgcgcgcgtcccatcgccgctgccgcgccgcgcgccgtctcgtcgcctcgcgccgcgagcccgccgcctcgcgccccgcgccgccgtcgtttcacccctcctcctccttcccctctctttattcccctctcccctataaagaccccggcccaatcccccccttctccaccccactccattcccacctcttctccctcttccccttctccacgcgccgccgtcgtcgcgctgccgcgccgccgttgtcgtgccgccgcgccgccaccttcgaagccgccgcgccgtcgccccggagccgccgcgccgtgcgtcgccgccttgcgccgccatcgccgtcgtcgccgccaccgccgccgccgagcccgagggagttgcggatccaagcgaaggccaagacccgcaagactctgagcaaggtgcgctacgatgggacagccgttgaggtagggccgagaagcgtgccctacatcggtgtcgccattgaagcgggagatgaagcctcggaggatccctatgcctactaccaggagggagatgaagacgatggcgctcagtag

SEQ ID NO: 14620 - DNA, 2394 bp, Oryza sativa
  Clone ID: TFbOSC401834j.C1.o22.fg
atgacgagtttggcctcatcagcgacaggtagagagaataacccgttagagttctactctcttccaatctcccccaacattgaacaaaggtcattttcggtagttggctttgctgctgcactgaaaccacatgcttttgatggttctaattataagaggtggaaaacacgtgcactactgtggttgactgtgatgcaatgtttctatgtttcacggggtaaacgaagtgaaccacctctctctcctgaggaagaggttaagttcgaggcttcggattgcctgttccgtggagcattgatcagtgtacttgctgacaatatagtggacgtgtatatgcacatgccttcagggaaggacatgtgggatgcacttgaggccaagttcggagtttccgacgccggcagtgagctgtatgtcatggagcagttctatgactacaagatgtttgtggtaggtggcattattgccaaattgccaacttcttggtcggactttgccacttctctaaagcacaagagacaagagttcagtgtttctgatctcattagctctttgggtgttgaagagaacgcgagggcaaaggacaacagggacaaaaaggttgagggtggttctagtgccaatatggtacagaagaagaaccctcatgcatcccacaacaacaagaaattcaagcctgatgttaaacccatggctacaaccaattttaagaagaaaggcaagggaaaggcaaagggagactgctttgtgtgtggcaagtctgggtattgggccaaggactgtcctaagcgcaaagataggaagtctgccaacatggtcactagcgagggcagaggaacatcggggtacgattggtgggttgatactggtgctaatattcatgtcgggagaggttcctccttgttgatgggaaacgggtcacttacggctgttcatggtgttgatgaagcattgcattactttaagacctataaagctgaggtagaaaaccaacttgaaaggaaaatcaaacggttgaggtctaataggggtggagagtatttttccaatgagtttacatccttttgcgaggagtttggaattattcatgagaggacgcctccctattcaccccaatcaaatggggtagccgaaagaaagaaccgtactctaactgagatggtgaatgccatgttagacactacggactttccaaggaatggtgggcataaggaagtaacaccattcgagaaatgggaaaggaagaaattaaatctctcatacctacgaacatggggctgtttggctaaggtaaatgtacctatagccaaaaagcgtaaacttgtaccgaatactgttgattgtgtgttccttggttatgctattcacagcgtgggttatagattcttaatagtaaactctagagtacccaacatgcgtgttggtacaattattgagtccagggatgctacattctttgagaatgaatttcccatgaaaaatacacctagcacttctagtcaagaaactgtcatatcctatgagcactttgcaccgatagaacacaatgatcaaacgcctgagggaaatcgtgaggaggatagcattgtagatactcgtaggagtaagagacaaagggttgcaaaatcctttggggatgactgcattatatacctcgtggatgacactccaagaaccatagaagaggcatattcatctcctgacgctgactactggaaggaagcagtacacagtgagatggactcaattatgtctaatggtacttgggaagtcgttgagcatccatatgggtgcaagcctgtaggatgcaaatgggttttcaagaaaaagcttaggcctgatggtacaattgaaaagtacaaggcaaggcttgtggccaaggcctctcatggtcttctcgtccatcagatggacgttaagacagctttcctaaacggagagctggaggagatctatatggatcaaccagactgcctcaatgtgattgaggtggtcaaggactttctgtctaagagttttgaaatgaaggatttgggagaggctgatgttattcttaacattaagctactaagaggagatgagggtgggattacacttgtgcaatcccactatgtggacaaggttctgagtcgctttggatacagcgactgcatgccagatcctactccttatgatcccagcgtgctattaaggaaaaaccgaagaatagcaagggatcaactgagatactcccaaatcattggttcattgatgtacttggctagtacaacgaggcctgacatctcatttgctgatggcttataccttaatgtgatccaagtggcttttctaagcagagatgttgacctgaagaacatctcagaaggaacacacctatatgagttcgactgctag

SEQ ID NO: 14621 - DNA, 780 bp, Oryza sativa
  Clone ID: TFbOSC6577j.C1.o3.fg
atggccgcatcaacctctaagggcaaaggctcatggcgagagaagattgagatagcacttgcgctgtctaatatagatttagctctcaccgagccctgtcccactgcgccagttgcgccaaagtacgacactgatcatgcgaagtgggagtcttccaaccgcaagtgcttgatggtaatcaagagctcaatagtggaggcagtaaggggagcaatcccagtatgcaccaccgccacagagtatcttcagagagtggagaatcagtttactatttcttcaaaggcttatgcgagctccttaatcaagagcttagttactatgaagtaccatggcggagatgttagagagtatattttgaagatgagcggtatcacttcaaagctcaagaagatagacttggttctccctgacgacttcctagttcacctcatttttgcctccttgccttcagaattcgagtcatttgctgtgaattacaactcattgcccgaaaactggaacattgagaagttgattgccatgtgtgtgcaagaagaggatagacccaaaactcgtggtgattctgcaaattatgtgaagaacaagaagaggaacaaccacagtcagaatgtcgcctctcccaaagcacgtggaaaggcaccacaggttgatccaaatccacgacaagaagtggagagggacgcttgcaggtggtgcaagcagaaggggcactttcagaaggattgccctgaattcctgaagcatcttttaaaaaagggtgagacatcattacattcgtag

SEQ ID NO: 14622 - DNA, 1529 bp, Oryza sativa
  Clone ID: TFbOSC11374j.C1.o1.fg
atggcagttaaggaccggttcacgggaaaccctgggagacttaccgtgcttaccacaagcgggagtggggatttaatgcacattcagcttagaaattctggttcgagaatttctgggcgtgacaagttggtatcagagccgactttgaccatggagataaggaatggttcacgcgactcgaacaacgccagtggcagcgaagagccgaacaatggagcacgtgccaacggtgcatctgacaacagtccgtccccaccgcccgagaacccaacaattgctcaggtgttggacaatcagactcagatgatgacaatgatgatgcaacagatgcagcaacagtaccatcaggtgttgcagcaggtgcagcagcaagcacagctgcagcagcagaacctgcagtttggtcctccacctcctcagtccaaactgttagaatttcttcgtgtcaagccgcccaccttctcaagcaccaccaacccaatcgaagcccacgactggcttcatgccattgagaagaagctgaatcttttgcaatgcaacgagcaggagaaggttgcttttgctacacaccagctacaaggtcccgcttctatttggtgggacaactacatggtgacccgtccagctggggcagaggttacttggacagagtttcgtcatagtttcaataaagcacaggttcccgagggaattgtggcacaaaagaagagagagttccgttccctgcaacaaggaaccagaacagttatagagtatttgcatgagttcaaccgcctcgcgcgctacgcccctgaggacgtgcgtaccgatgccgagaagcaggagaagtttctgtctggtcttgatgatgaattgactaaccagttgatctctagagattatgaggactttgagaagctggtggataaggctatccgtcaggaggagcacggtaacaaaataaaccgtaagaggaaggcagctcagttcaggactccccaggggaagagtcagaagcctcgtttcacgatgggacgtcacggtggaccttccaccatgattatccgacagcaccgtccctaccacccgggtagcttcaacaagaaccaccataatggcagtcacaacaacagtgagcagcacagtctcaaccctactccgagttcactaaagattccagctcaatcagttcagccagctctgccagaacagcccaagaggttgggagaaaaacccgaactctgcttcaattgtaacaaacccggacacacggttggaaagtgcccgaagccaagacgtgctggacccaagttcgttcaggcccgtgttaatcatgcatctgcagaggaggcgcagtcagcaccagaggttatattgggcacattccccgtcaactcgacaccggcagtaatattgtttgattctggtgcaacccattcctttatttccaagcgttttgctggtgcacatgggttatctttagtgaagcttgcatgcctgcaggtcgactctagaggatccccgggtaccgagctcgaattcgccctata

SEQ ID NO: 14623 - DNA, 1497 bp, Oryza sativa
  Clone ID: TFbOSC11376j.C1.o1.fg
atggcagttaaggaccggttcacgggaaaccctgggagacttaccgtgcttaccacaagcgggagtggggatttaatgcacattcagcttagaaattctggttcgagaatttctgggcgtgacaagttggtatcagagccgactttgaccatggagataaggaatggttcacgcgactcgaacaacgccagtggcagcgaagagccgaacaatggagcacgtgccaacggtgcatctgacaacagtccgtccccaccgcccgagaacccaacaattgctcaggtgttggacaatcagactcagatgatgacaatgatgatgcaacagatgcagcaacagtaccatcaggtgttgcagcaggtgcagcagcaagcacagctgcagcagcagaacctgcagtttggtcctccacctcctcagtccaaactgttagaatttcttcgtgtcaagccgcccaccttctcaagcaccaccaacccaatcgaagcccacgactggcttcatgccattgagaagaagctgaatcttttgcaatgcaacgagcaggagaaggttgcttttgctacacaccagctacaaggtcccgcttctatttggtgggacaactacatggtgacccgtccagctggggcagaggttacttggacagagtttcgtcatagtttcaataaagcacaggttcccgagggaattgtggcacaaaagaagagagagttccgttccctgcaacaaggaaccagaacagttatagagtatttgcatgagttcaaccgcctcgcgcgctacgcccctgaggacgtgcgtaccgatgccgagaagcaggagaagtttctgtctggtcttgatgatgaattgactaaccagttgatctctagagattatgaggactttgagaagctggtggataaggctatccgtcaggaggagcacggtaacaaaataaaccgtaagaggaaggcagctcagttcaggactccccaggggaagagtcagaagcctcgtttcacgatgggacgtcacggtggaccttccaccatgattatccgacagcaccgtccctaccacccgggtagcttcaacaagaaccaccataatggcagtcacaacaacagtgagcagcacagtctcaaccctactccgagttcactaaagattccagctcaatcagttcagccagctctgccagaacagcccaagaggttgggagaaaaacccgaactctgcttcaattgtaacaaacccggacacacggttggaaagtgcccgaagccaagacgtgctggacccaagttcgttcaggcccgtgttaatcatgcatctgcagaggaggcgcagtcagcaccagaggttatattgggcacattccccgtcaactcgacaccggcagtaatattgtttgattctggtgcaacccattcctttatttccaagcgttttgctggtgcacatgggttatctttagtgaagcttgagtattctatagtgtcacctaaatag

SEQ ID NO: 14624 - DNA, 448 bp, Oryza sativa
  Clone ID: TFbOSC11376j.C1.o2.np
atggcaaggcgacgacggcgcacgaccgccggcggtgaccggcggcgcggggagacggcggcggccggcgcgaaggcggcggcggcagccgaagacgacggcgcacgcgcggagggcggcggcgctcacgggggagaggaaaggaaggaggaaaggggattcctcaccggcgagcacgacggccggcgggaaggcgaccatggcggcttgaattgccggccggagacggaggggagagagggtctcaccggcgcgcgaggagaaaagggctccggcggtgattcgcggcaatgaagcggcggccgaggtgcgggcgggctcggtgagcgcgacggcggcgactgcgcggcgcggcggtggctatagtggcggcggcgcgtggccggagacggcggtaggcggcggcgcaaggggcgagcggcgcggcgacgataggaagcacgggagg

SEQ ID NO: 14625 - DNA, 4476 bp, Oryza sativa
  Clone ID: TFbOSC14967j.C1.o1.fg
atggagacaaggaatggttcacgcgactccaacaacgccagtggcagcgaagagccgatcaatggagcacgtgccaacggtgcatctgacaacagtccgtccccaccgcccgagaacccaacgatcgctcaggtgttggacaatcagactcagatgatgacaatgatgatgcaacagatgcagcaacagtaccatcaggtgttgcagcaggtgcagcagcaagcacagctgcagcagcagaacctgcagtttggtcctccacctcctcagtccaaattgttagaatttcttcgtgtcaagccgcccactttctcaagcaccaccaacccaatcgaggcccacgactggcttcatgccgttgagaagaagctgaatcttttgcaatgcaacgagcaggagaaggttgcttttgctacacaccagctacaaggttcccgagggaatcgtggcacaaagaagagagagttccgttccctgcaacaaggacccagaccagttatagagtatttgcatgagttcaaccgcctcgcgcgctatgcccctgaggacgtgcgtaccgatgccgagaggcaggagaagtttttgtctggtcttgatgatgaattgactaaccagttgatctctagagattatgaggactttgagaagctggtggataaggctatccgtcaggaggagcactgtaacaaaataaaccgtaagaggaaggcagctcagttcaggactccccaggggaagagtcagaagcctcgtttcacgatgggacatcacggtggaccttccaccatgattatccggcagcaccgtccctaccacccgggtaacttcaacaagaaccaccatagtgacagtcacaacaatagtgagcagcacagcctcaaccctactccgagttcactaaagattccagctcaatcagttcagccagctctgacagaacagcccaagaggttgggagaaaaacccgaactctgcttcaattgtaacaaacccggacacacggttggaaagtgcccgaagccaagacgtgccggacccaagttcgttcaggcccgtgttaatcatgcatctgcagaggaggcgcagtcagcaccagaggttatattgggcacattccccgtcaactcgacaccggcagtaatattgtttgattctggtgcaacccattcctttatttccaagcgttttgctggtgcacatgggttatctttagtgaagcttaagataccaatgcgagttcatactcctggaggtggcatgaccacaactcactactgcccatctgtgacagttgaaattcaagggttgatttttccagccaacctcattcttctcgaatccaaggacctagatgtcatacttggaatggattggttggcaaggcacagaggagtgattgattgcgccagccgcaccatcaagttgaccaatgcaaaaggagaggtggtaatcttccagtctccagtgccgcagaagccagggattagtttaaaccaggctgctggtgaagaacaagaggtagcagtggagaaaaccactaagaagctggaggatattcccatagtcagagagtatccagaggtttttccggatgatctgacaacaatgccaccaaaaagggatatcgagttccggattgacttggtacctggaactgcaccgatccacaagaggccttacagaatgggagccaacgagttggcggaagtcaagaagcaagttgatgaacagttacagaagggatacatccgcccgagcacgtcgccttggggtgctccggttatctttgtggagaagaaagacaaaaccaagaggatgtgcgttgactaccgcgcactcaatgaggtcaccatcaagaacaagtatcctttgccaaggattgatgacctgtttgatcagttgaaaggagctactgtgttctctaagatagacctgcgatcaggctatcaccagttgaggatccgcgaagaggatattccaaagacagcattcatcactcggtacgggttgttcgaatgcacagttatgtctttcggactcactaacgcacctgccttcttcatgaatttgatgaacaaggtgtttatggaatttctagacaagtttgtcgtggttttcatcgatgacatacttatctactccaagtccgaggaagaacatgagcagcatcttcggctggtacttgaaaagttaaaagagcaccagctatatgccaagttcagcaagtgcgacttctggcttaaggaagttcagtttctcggtcacatcgtgaatgctcaaggagtagctgtggatccagcaaatgtggagtcagttaccaaatggaccccaccaaggacagtcactcaggttcggagtttcttaggacttgcgggttattaccgccggttcattgagaacttctctaaaattgctaagccaatgacacagctattgaagaaggaagaaaagtttatctggtctgctgaatgcaataggagttttgaagaactcaaacgacggttggtgtctgcaccagtcttaatcctgcctgatcagacgaaagatttccaggtctattgtgatgcatctcgccaggggctaggatgtgtgttgatgcaggatggcaaagtggtttcttatgcttcacggcagttgcgtcctcatgaaggcaactacccgacgcatgatctggaattagccgcagttgttcatgctttaaagatttggcggcactatctcatcggtaaccgttgtgaggtatatacagatcacaaaagtctaaagtacatcttcacccaacctgatctgaatctccgacaacgaagatggttggagctaatcaaagattatgatatgggaatacactatcatcccggcaaggccaatgtggtagcagatgccttgagcaggaagagttactgcaacgtcgcatgggtagaggaactatgctgtgaggttcaacatgatttggaacatttgaaccttggtatagttgagcacggattcgtggctgccctagaggcacagcccacactggtggagcaggttcgcatagctcaagcaagtgatcctgaaatagcagagctcaaaaagaacatgagggtcggaaaagcccgaggttttgttgaggatgaacaaggaacaatctggatgggagaaagattgtgtgtacccgaaaacaaggaattaaaagacctgatactaaccgaggctcatcaaactcaatattccattcatcccggtagtactaagatgtaccaagacctcaaagagaagttttggtgggtcagcatgagaagggaaatagctgaattcgtagcactctgtgacgtctgtcaacgagtaaaggcagaacaccaaaggccagcaggtttgctacagccacttcagattccagaatggaagtgggaagaaatcggaatggatttcatcaccggtttgcccaggacgtcatcggggcatgattctatttgggtagtcattgaccgactcaccaaagtggcccacttcattccggtgcacactacctactcagggaagaaattagcagaactctatctggcaagaattatgtgtttacatggtgtacctaagaagatcgtgtctgatcgaggaagccaattcacttcaaagttctggcagaaattacaagaagaattgggaacccggttgaatttcagcaccgcttaccatccacaaacagatggccagaccgagcgagtcaatcaaatactagaggatatgttgagagcctgtgcgcttgattttggtggggcatgggacaaaagcttgccgtatgctgagttctcgtacaacaacagttaccaagctagtctgcagatggcaccatttgaagcactgtatggacggaggtgtcgtactccgctcttctggtatcagacaggggaacgccagttgtttggtacagaagttttaaatgaggcagaagagaaagtcagagctgttagggaaagattgagaatcgcgcagtctcggcagaaaagctatgcagacaaccgccgaagggagctcgctttcgaaacaggggattatgtgtatctccgtgtcactccgctcaggggagtacatcgcttccaaaccaaaggaaagttggcaccacgctttgtgggaccatatcgggttttggaacgtagaggtgaagttgcttaccagctcgagcttccctccaacatgcttggcatccataatgtgttccacgtctcccagttgaagaaatgtttgagagttcctgaggaacaggcaagtccggatcaaatcgaaatccaggaagacttgacgtatgtggagaagccaactcgtatcctcgaaaccagcgagagaaagaccagaaacaaagtaataagattctgcaaggttcagtggagccaccactcagaggaagaggccacttgggaaagagaagatgagttgaaggccacccacccgcacctcttcgccagctcttccgaatctcggggtcgagattccgtttaa

SEQ ID NO: 14626 - DNA, 4518 bp, Oryza sativa
  Clone ID: TFbOSC17627j.C1.o1.fg
atggagacaaggaatggttcacgcgactccaacaacgccagtggcagcgaagagccgatcaatggagcacgtgccaacggtgcatctgacaacagtccgtccccaccgcccgagaacccaacgatcgctcaggtgttggacaatcagactcagatgatgacaatgatgatgcaacagatgcagcaacagtaccatcaggtgttgcagcaggtgcagcagcaagcacagctgcagcagcagaacctgcagtttggtcctccacctcctcagtccaaattgttagaatttcttcgtgtcaagccgcccactttctcaagcaccaccaacccaatcgaggcccacgactggcttcatgccgttgagaagaagctgaatcttttgcaatgcaacgagcaggagaaggttgcttttgctacacaccagctacaaggtcccgcttctatttggtgggacaactacatggtgacccgtccagctggggcagaggttacttggacagagttttgtcatagtttcaataaagcccaggttcccgagggaatcgtggcacaaaagaagagagagttccgttccctgcaacaaggaaccagaacagttatagagtatttgcatgagttcaaccgcctcgcgcgctatgcccctgaggacgtgcgtaccgatgccgagaggcaggagaagtttttgtctggtcttgatgatgaattgactaaccagttgatctctagagattatgaggactttgagaagctggtggataaggctatccgtcaggaggagcactgtaacaaaataaaccgtaagaggaaggcagctcagttcaggactccccaggggaagagtcagaagcctcgtttcacgatgggacatcacggtggaccttccaccatgattatccggcagcaccgtccctaccacccgggtaacttcaacaagaaccaccatagtgacagtcacaacaatagtgagcagcacagcctcaaccctactccgagttcactaaagattccagctcaatcagttcagccagctctgacagaacagcccaagaggttgggagaaaaacccgaactctgcttcaattgtaacaaacccggacacacggttggaaagtgcccgaagccaagacgtgccggacccaagttcgttcaggcccgtgttaatcatgcatctgcagaggaggcgcagtcagcaccagaggttatattgggcacattccccgtcaactcgacaccggcagtaatattgtttgattctgtgaagcttaagataccaatgcgagttcatactcctggaggtggcatgaccacaactcactactgcccatctgtgacagttgaaattcaagggttgatttttccagccaacctcattcttctcgaatccaaggacctagatgtcatacttggaatggattggttggcaaggcacagaggagtgattgattgcgccagccgcaccatcaagttgaccaatgcaaaaggagaggtggtaatcttccagtctccagtgccgcagaagccagggattagtttaaaccaggctgctggtgaagaacaagaggtagcagtggagaaaaccactaagaagctggaggatattcccatagtcagagagtatccagaggtttttccggatgatctgacaacaatgccaccaaaaagggatatcgagttccggattgacttggtacctggaactgcaccgatccacaagaggccttacagaatgggagccaacgagttggcggaagtcaagaagcaagttgatgaacagttacagaagggatacatccgcccgagcacgtcgccttggggtgctccggttatctttgtggagaagaaagacaaaaccaagaggatgtgcgttgactaccgcgcactcaatgaggtcaccatcaagaacaagtatcctttgccaaggattgatgacctgtttgatcagttgaaaggagctactgtgttctctaagatagacctgcgatcaggctatcaccagttgaggatccgcgaagaggatattccaaagacagcattcatcactcggtacgggttgttcgaatgcacagttatgtctttcggactcactaacgcacctgccttcttcatgaatttgatgaacaaggtgtttatggaatttctagacaagtttgtcgtggttttcatcgatgacatacttatctactccaagtccgaggaagaacatgagcagcatcttcggctggtacttgaaaagttaaaagagcaccagctatatgccaagttcagcaagtgcgacttctggcttaaggaagttcagtttctcggtcacatcgtgaatgctcaaggagtagctgtggatccagcaaatgtggagtcagttaccaaatggaccccaccaaggacagtcactcaggttcggagtttcttaggacttgcgggttattaccgccggttcattgagaacttctctaaaattgctaagccaatgacacagctattgaagaaggaagaaaagtttatctggtctgctgaatgcaataggagttttgaagaactcaaacgacggttggtgtctgcaccagtcttaatcctgcctgatcagacgaaagatttccaggtctattgtgatgcatctcgccaggggctaggatgtgtgttgatgcaggatggcaaagtggtttcttatgcttcacggcagttgcgtcctcatgaaggcaactacccgacgcatgatctggaattagccgcagttgttcatgctttaaagatttggcggcactatctcatcggtaaccgttgtgaggtatatacagatcacaaaagtctaaagtacatcttcacccaacctgatctgaatctccgacaacgaagatggttggagctaatcaaagattatgatatgggaatacactatcatcccggcaaggccaatgtggtagcagatgccttgagcaggaagagttactgcaacgtcgcatgggtagaggaactatgctgtgaggttcaacatgatttggaacatttgaaccttggtatagttgagcacggattcgtggctgccctagaggcacagcccacactggtggagcaggttcgcatagctcaagcaagtgatcctgaaatagcagagctcaaaaagaacatgagggtcggaaaagcccgaggttttgttgaggatgaacaaggaacaatctggatgggagaaagattgtgtgtacccgaaaacaaggaattaaaagacctgatactaaccgaggctcatcaaactcaatattccattcatcccggtagtactaagatgtaccaagacctcaaagagaagttttggtgggtcagcatgagaagggaaatagctgaattcgtagcactctgtgacgtctgtcaacgagtaaaggcagaacaccaaaggccagcaggtttgctacagccacttcagattccagaatggaagtgggaagaaatcggaatggatttcatcaccggtttgcccaggacgtcatcggggcatgattctatttgggtagtcattgaccgactcaccaaagtggcccacttcattccggtgcacactacctactcagggaagaaattagcagaactctatctggcaagaattatgtgtttacatggtgtacctaagaagatcgtgtctgatcgaggaagccaattcacttcaaagttctggcagaaattacaagaagaattgggaacccggttgaatttcagcaccgcttaccatccacaaacagatggccagaccgagcgagtcaatcaaatactagaggatatgttgagagcctgtgcgcttgattttggtggggcatgggacaaaagcttgccgtatgctgagttctcgtacaacaacagttaccaagctagtctgcagatggcaccatttgaagcactgtatggacggaggtgtcgtactccgctcttctggtatcagacaggggaacgccagttgtttggtacagaagttttaaatgaggcagaagagaaagtcagagctgttagggaaagattgagaatcgcgcagtctcggcagaaaagctatgcagacaaccgccgaagggagctcgctttcgaaacaggggattatgtgtatctccgtgtcactccgctcaggggagtacatcgcttccaaaccaaaggaaagttggcaccacgctttgtgggaccatatcgggttttggaacgtagaggtgaagttgcttaccagctcgagcttccctccaacatgcttggcatccataatgtgttccacgtctcccagttgaagaaatgtttgagagttcctgaggaacaggcaagtccggatcaaatcgaaatccaggaagacttgacgtatgtggagaagccaactcgtatcctcgaaaccagcgagagaaagaccagaaacaaagtaataagattctgcaaggttcagtggagccaccactcagaggaagaggccacttgggaaagagaagatgagttgaaggccacccacccgcacctcttcgccagctcttccgaatctcggggtcgagattccgtttaa

SEQ ID NO: 14627 - DNA, 1978 bp, Oryza sativa
  Clone ID: TFbOSC2469j.C1.o1.gm
atgccgccgccctccgcacgtgcatcgccgcgcttcggccatgcgccgccacctttcggccgtcgccgccgcttcccgcgacaccggtccccgccgtcggtggtcgtgcctcgccgccgcctcgccccggtcggccttgaggccgagctgagcccggccgatgcctccctccccctcccttttctcccctccacgcgtgcgccgccgcctttggccgtgccgccgctccggccgtccgccgccgccttccgcgccgtccgccgccgtctccccgcaccgccggcggtcgtgcgccgtcgtcgcctcgccatggccggccggccggttttgaagccgagccgagtcgtgcctagtcgccgccgtgccgtccgatcggtctcccggccgatctggaccgtcggtcccgtggaccggcggtggaccacccgcgtggtcccggtccacggtggaccgaccccctttgagccgctgcctagcaccggtggcgagggtgggcgtgatggagttgggtcggccggggtgtccggttgtccagctgccggattcaccgcggcgcaagaggggaccgcccactgccttttgaggggtggggagctgaagatcttcctagttggagctgttttgtcaaagttggtttcgtcgctgccgtcaaggattgcctgtggagtggagtcgctcgctgctgaaatggagataaggaatggttcacgcgactcgaacaacgccagtggcagtgaagagccgatcaatggagcacgtgccaacggtgcatctgacaacagtccgtccccaccacccgagaacccaacaattgctcaggtgttggacaatcagactcagatgatgacaatgatgatgcaacagatgcagcaacagtaccatcaggtgttgcagcaggtgcagcagcaagcacagctgcagcagcagaacctgcagtttggtcctccacctcctcagtccaaactgttagaatttcttcgtgtcaagccgcccaccttctcaagcaccaccaacccaatcgaggcccacgactggcttcatgccattgagaagaagctgaatcttttgcaatgcaacgagcaagagaaggttgcttttgctacacaccagctgcaaggtcccgcttctgtttggtgggacaactacatggtgacccgtccagctggggcagaagttacttggacagagttttgtcatagtttcaataaagcacaggttcccgagggaattgtggcacaaaagaagagagagttccgttccctgcaacaaggaaccagaacagttatagagtatttgcatgagttcaaccgcctcgcgcgctacacccctgaggacgtgcgtaccgatgccgagaggcaggagaagtttttgtcgggtcttgatgatgaattgactaaccagttgatctctagagattatgaggacattgagaagctggtggataaggctatccgtcaggaggagcactgtaacaaaataaaccgtaagaggaaggcagctcagttcaggactccccaggggaagagtcagaagcctcgtttcacgatgggacgtcacggtggaccttccaccatgattatccgacagcaccgtccctaccacccgggtagcttcaacaagaaccaccatagtggcagtcacaacaacagtgagcagcacagtctcaaccctactccgagttcactaaagattccagctcaatcagttcaaccagctctgccagaacagcccaagaggttgggagaaaaacccgaactctgcttcaattgtaacaaacccggacacacggttggaaagtgcccgaagccaagacgtgctggacccaagttcgttcaggcccgtgttaatcatgcatctgcagaggaggcgcagtcagcaccagaagttatattgggcacattccccgtcaactcgacaccggcagtaatattgtttgattctggtgcaacccattccttcatttccaagcgttttgctg

SEQ ID NO: 14628 - DNA, 1161 bp, Oryza sativa
  Clone ID: TFbOSC2478j.C1.o1.fg
taccacccgggtagcttcacaaagaaccaccatagtggcagtcacaacaacagtgagcagcacagtctcaaccctactccgagttcactaaagattccagctcaatcagttcaaccagctctgccagaacagcccaagaggttgggagaaaaacccgaactctgcttcaattgtaacaaacccggacacacggttggaaagtgcccgaagccaagacgtgctggacccaagttcgttcaggcccgtgttaatcatgcatctgcagaggaggcgcagtcagcaccagaagttatattgggcacattccccgtcaactcgacaccggcagtaatattgtttgattctggtgcaacccattccttcatttccaagcgttttgctggtgcacatgggttatctttagtgaagcttaagataccaatgcgagtgcatactcctggaggtggcatgaccacaactcactactgcccatctgtgacagttgaaattcaagggtcgatttttccagccaacctcattcttctcgaatccaaggacctagatgtcatacttggaatggattggttgacaaggcacagaggagtgattgattgcgccagccgcaccatcaagttgaccaatgcaaaaggagaggtggtaactttccagtctccagtaccgcggaagccagggattagtttaaaccaggctgctggtgaagaacaagaggtagcagtggagaaaaccactaagaagctggaggatattcccatagtcagagagtatcgagaggtttttccggacgatctgacaacaatgccaccaaaaagggatatcgagttccggattgacttggtacctggaactgcaccgatccacaagaggccttacagaatgggagccaacgagttggcggaagtcaagaaacaaaagaaagacaaaaccaagaggatgtgcgttgactaccgcgcactcaatgaggtcaccatcaagaacaagtatcctttgccaaggattgatgacctgtttgatcagttgaaaggagctattgtgttctctaagatagacctgcgatcaggctatcaccagttgaggatccgcgaagaggatattccaaagacagcattcatcggggatcctctagagtcgacctgcaggcatgcaagcttgagtattctatag

SEQ ID NO: 14629 - DNA, 765 bp, Oryza sativa
  Clone ID: TFbOSC2964j.C1.o1.fg
atgggacgtcacggtggaccttccaccatgattatccgacagcaccgtccctaccacccgggtagcttcaataagacccaccatagtgatagtcacaacaacagtgagcagcacagcctcaaccctactccgagttcactaaagattccagctcaatcagttcagccagctctgccagaacagcccaagaggttgggagaaaaacccgaactctgcttcaattgtaacaaacccggacacacggttggaaagtgcccgaagccaagacgtgctggacccaagttcgttcaggcccgtgttaatcatgcatctgcagaggaggcgcagtcagcaccagaggttatattgggcacattccccgtcaactcgacaccggcagtaatattgtttgattctggtgcaacccattccttcatttccaagcgttttgctggtgcacatgggttatctttagtgaagcttaagataccaatgcgagttcatactcctggaggtggcatgaccacaactcactactgcccatctgtgacagttgaaattcaagggttgatttttccagccaacctcattcttctcgaatccaaggacctagatgtcatacttggaatggattggttggcaaggcacagaggagtgattgattgcgccagccgcaccatcaagttgaccatgcaaaaggagaggtggtatcttccagtctccagtgccgcagaaggggatcctctagagtcgacctgcaggcatgcaagcttgagtattctatag

SEQ ID NO: 14630 - DNA, 3420 bp, Oryza sativa
  Clone ID: TFbOSC32576j.C1.o1.fg
atggtgaagacaaggaatggttcacgtgactccagcaacgtcagtggcagcgaagagcagattagtggagcacgtgccaacagtgcatctgacaacagtccatctccaccgcccgagaacccaacgatcactcaggtgttggacaatcagactcagatgatgtcaatgattatgcaacagatgcaacaacagtaccatcagccgcccactttctcaagtaccaccaacccaatcgaggccaacgactggcttcgtgctattgagaagaagctgaaccttttgcaatgcaacgaccaagagaaggttgcttttgctatacaccagctgcaaggtcccgcttctgtttggtgggacaactacgtggtgacccgtccagctgggacaaaggttacctgggcagagttttgtcagagtttcaataaagcacaggttcccgagggaattatggcacaaaagaagagagagttccgttctctgcaacaaggaaccaaaacagttatagagtatttgcacgagttcaaccgcctcgcgcactacgctcctgaggaccatcgtccctaccacccgggtagcttcggcaggatctaccatagtggcagtcacggcaacagcgagaagcacagcctcaacctgactccaagtccactaatgtttctagctcagtcagttcagccagctctgcctgctcagtcaaaacagcccaaggagttcgaaggaaagcccgaactctgcttcaattgtaacaaaccgggacacacggttggaaagtgcccaaagccaagacatgctggacccaagtttgtgcaggcccatgtcaatcatgcgtctgcagaggaggcacagtcagcaccagaggtcatattgggcacatttcctgtcaactcgacaccggcagtaatattgtttgattctggtgcaactcattccttcatttccaagcgttttgctggtgcgcatgggttatctttagtgaagctcaagataccaatgcgagttcatactcctggaggtggcatgaccacaactcactactgcccatcagtgactgttgaaatccaagggttgatttttccagccaacctcattcttctcgaatccaaggacctagatgtcatacttagaatggattggttgacaaggcatagaggagtgattgattgcactagccacaccatcaagttgaccaatgcaaaaggagaagtggctgctggtgaagaacaagaagtagcagtggagaaaaccactaagaagttggaggatattcctatcgacagagagtatccagaggtttttccagatgacctgacaacaatgccacctaaaagggatatcgagttccggatcgacttggcacctggaactgcaccgatccacaagaggccttacagaatgggagccaacgagctggcggaagtcaagaagcaagttgatgaacagttacagaagggatacattcgcccgagcacgttgccttggggtgctccggtcatctttgtggaaaagaaagacaaaaccaagaggatgtgcgttgactaccgcgcactcaatgtggttactgttaagaacaagtaccctttgccaaggattgatgatctgttcgatcagctgaaaggagctactgtgttctctaagatagacctgcgatcaggctatcaccagttgaggatccgcgaagaggatattccaaagacagcattcatcactcggtacgacaagtttgtcgtggttttcatcgatgacatacttatctactccaagtccgaggaagaacataagcagcatctccggctagtacttgaaaagttaaaagagcaccagctatatgccaagttcagcaagtgtgacttctggcttaaggaagttcagtttctcggtcacatcgtgaatgctcaaggagtagctgtggatccagcaaatgtggagtcagttacgaaatggaccccaccaaggacagtcactcaggttcggagtttcttaagacttgcgggctattaccgccggttcattgagaacttctctaaaattgctaagccaatgacacagctattgaagaaggaagaaaagtttatctggtctgctgaatgcaataggagttttgaagaactcaaaggacggttggtgtctgcaccagtcttaatcctgcctaatcagacgaaagatttccaggatggcaaagtggtttcttatgcttcacggcagttgcgtcctcatgaaggcagctacccgacgcatgatctggaattggccgcagttgttcatgctttaaagatttggcggcactatctcatcggtaaccgttgtgagcgaagatggttggagctgatcaaggattacgatatgggaatacactaccatcctggcaaggctaatgtggttgcagatgccctgagcaggaagagttactgcaacgtcacatgggtagagcaactatgctgtgaggttcaacgtgatttggaacatctgaaccttggtatagttgagcacggatttgtggttgccctagaggcacagcccacactagtggagcagcgagtaaaggcagaacaccaaaggccagcaggtttgctacagccacttcagattccagaatggaagtgggaagaaatcggaatggatttcattatgggtttgcccaggacgttatcggggcatgattctatttgggtagtcattgatagactcactaaagtggctcacttcattccggtgcatactatctactcagggaagaagttagcagagctttatttggcaagaatcatgtgtctacatggtgtacctaagaagatcgtgtctgatcgaggaagccaattcacctcaaagttctggcagaaattgcaagaagaattgggaacccgtctgaaattcagcacagcgtaccatccacaaactgatggccagactgagcgagtcaatcaaatactagaggatatgttaagagcttgtgcgcttgactttggtggagcatgggacaaaagcttgccgtatgctgagttctcctacaacaacagttaccaggctagtctgcagatggaaccatttgaagcactgtatggacggaagtgtcgtactctgctcttctgggatcagacagaggaacgccagttgtttggtacagaagttttaaatgaagcagaagagaaagttagagctgtcagggaaagtttgagaatcgcgcaatctcgacagaaaagctatgtagacaaccgccgaagagagctcgtttttgaaacaggggattatgtgtatctccgtgtcactccgctcagggagtacatcgcttccaaaccaaaggaaaattggaaccacgctttgtgggaccatacaggatcttggaacgtagaggtgaagttgcttaccagcttgagcttccctccaacatgcttggcatccacaatgtgttccacgtctctcagttga

SEQ ID NO: 14631 - DNA, 4068 bp, Oryza sativa
  Clone ID: TFbOSC32846j.C1.o1.fg
atggagacaaggaatggttcacgcgactcgaacaacgccagtggcagcgaagagccgatcaatggagcacgtgccaacggtgcatctgacaacagtccgtccccaccgcccgagaacccaacaattgctcaggtgttggacaatcagactcagatgatgacaatgatgatgcaacagatgcagcaacagtaccatcaggtgttgcagcaggtgcagcagcaagcacagctgcagcagcagaacctgcagtttggtcctccacctcctcagtccaaactgttagaatttcttcgtgtcaagccgcccaccttctcaagcaccaccaacccaatcgaggcccacgactggcttcatgccattgagaagaagctgaatcttttgcaatgcaacgagcaggagaaggttgcttttgctacacaccagctacaaggtcccgcttctatttggtgggacaactacatggtgacccgtccagctggggcagaggttacttggacagagtttcgtcatagtttcaataaagcacaggttcccgagggaattgtgggacaaaagaagagagagttccgttccctgcaacaaggaaccagaacagttatagagtatttgcatgagttcaaccgcctcgcgcgctacgcccctgaggacgtgcgtaccgatgccgagaagcaggagaagtttatgtctggtcttgatgacgaattgaccaaccagttgatctctagagactatgaggactttgagaagcttgtggacaaggctattcgtcaagaggagcagtgtaacaaaatgacccgtaagaggaaggcagcccagttcaggactccccaggggaagtgtcaaaagcctcgttacacgatgggacgtcacggtggaccttccaccatgattatccgacagcaccgtccctaccacccgggtagcttcaataagacccaccatagtgatagtcacaacaacagtggcagtcacagcagcctcaacccgactccaagtccattaatgattccagctcagtcagatcagccagctctgccagaacagcccaagaggttggtagaaaaacccgaactctgcttcaattgtaacaaacccggacacacggttggaaagtgcccgaagccaagacgtgccggacccaagttcgttcaggcccgtgttaatcatgcatctgcagaggaggcgcagtcagcaccagaggttatattgggcacattccccgtcaactcgacaccggcagtaatattgtttgattctggtgcaacccattcctttatttccaagcgttttgctggtgcacatgggttatctttagtgaagcttaagatacctatgcgagtgcatactcctggaggtggcatgaccacaactcactactgcccatctgtgacagttgaaattcaagggtcgatttttccagccaacctcattcttctcgaatccaaggacctagacaaagacaaaaccaagaggatgtgcgttgactaccgcgcactcaatgaggtcaccatcaagaacaagtatcctttgccaaggattgatgatctgtttgatcagttgaaaggagctacggtgttctctaagatagacctgcgatcaggttatcaccagttgaggatccgcgaagaggatattccaaagacagcattcatcactcggtacgggttgttcgaatgcacagttatgtctttcggactcactaatgcacctgccttcttcatgaatttgatgaacaagtccgaggaagaacataagcagcatcttcggttggtacttgaaaagttaaaagagccccagctatatgccgagttcagcaagtgcgacttctggcttaaggaagttcagtttctcggtcacatcgtgaatgctcaaggagtagctgtggatccagccaatgtgcagtcagttaccaagtggaccccaccaaggacagtcactcaggttcggagtttcttaggacttgcgggctattaccgccggttcattgagaacttctctaaaattgctaagccaatgacacagctattgaagaaggaagaaaagtttatctggtctgctgaatgcaataggagttttgaagaactcaaacgacggttggtgtctgcaccagtcttaatcctgcctgatcagacgaaagatttccaggtctattgtgatgcatctcgccaggggctaggatgtgtgttgatgcaggatggcaaagtggtttcttatgcttcacggcagatgcgtcctcatgaaggcaactacccgacgcatgatctggaattagccgcagttgttcatgctttaaagatttggcggcactatctcatcagtaaccgttgtgaggtatatacagatcacaaaagtctaaagtacatcttcactcaagctgatttgaatctcagacagcgaagatggttggagctgatcaaggattatgatatgggaatacattatcatcccggcaaggctaatgtggttgcagatgccttgagcaggaagagctactgcaatgttgcatgggtagagcaactatgttgcgaggttcaacgcgatctggaacatctgaaccttggtatagttgagcacggattcgtggctgccctagaggcacagcccacactggtggagcaggttcgcatagctcaagcaagtgatcctgaaatagcagagctcaaaaagaacatgagggtcggaaaagcccgaggttttgttgaggacgaacaaggaacaatctggatgggagaaagattgtgtgtacccgaaaacaaggaattaaaagacctgatactaaccgaggctcatcaaactcagtattccattcatcccggtagtactaagatgtaccaagacctcaaagagaagttctggtgggtcagcatgagaagggaaatagctgaattcgtagcactctgtgacgtctgtcaacgagtaaaggcagaacaccaaaggccagcaggtttgctacagccacttcagattccagaatggaagtgggaagaaatcggaatggatttcgtcaccggtttgcccaggacgtcatcggggcatgattctatttgggtagtccgtgaccgactcaccaaagtggctcactttcattcggtgcacactacctactcagggaagaaattagcagaactctatctggcaagaattatgtgtttacatggagtacctaagaagatcgtgtctgatcgaggaagccaattcacttcaaagttctggcagaaattacaagaagaattgggaacccggttgaatttcagcaccgcttaccatccacaaacagatggccagaccgagcgagtcaatcaaatactagaggatatgttgagagcctgtgcgcttgactttggtggggcatgggacaaaagcttgccgtatgctgagttctcgtacaacaacagttaccaagctagtctgcagatggcaccatttgaagcactgtatggacggaggtgtcgtactccgctcttctgggatcagacaggggaacgccagttgtttggtacagaagttttaaatgaggcagaagagaaagtcagagctgttagggaaagattgagaatcgcgcagtctcgggagaaaagctatgcagacaaccgccgaagggagctcgttttccaagtaggggattatgtgtatctccgtgtcactccgctcaggggagtacatcgctttcaaaccaaaggaaagttggcaccacgctttgtgggaccatatcggattttggaacgtagaggtgaagttgcttaccagctcgagcttccctccaacatgcttggcatccataatgtgttccacgtctcccagttgaagaaatgtttgagagttcctgaggaacaggcaagtccggatcaaatcgaaatccaggaagacttgacgtatgtggagaagccaactcgtatcctcgaaaccagcgagagaaagaccagaaacaaagtaataagattctgcaaggttcagtggagccaccactcagaggaagaggccacttgggaaagagaagatgagttgaaggccacccacccgcacctcttcgccagctcttccgaatctcggggtcgagattccgtttaa

SEQ ID NO: 14632 - DNA, 4023 bp, Oryza sativa
  unsure (1)..(4023): unsure at all n locations
  Clone ID: TFbOSC400061j.C1.o1.fg
atggcagcgaagagccgatcaatggagcacgtgccaacggtgcatttgacaacagtccgtctcccaccgcccgagaacccaacaatttgctcaggtgttggacaatcagactcagatgatgacaatgatgatgcaacagatgcagcaacagttccatcaggtgttgacagcagagattatgaggactttgagaagttggtggataaggctatccgtcaggaggagcactgtaacaaaataaaccgtaagagaaaggcagctcagttcaggactccccagngnaagagtcaaaagcctcggttcacgatgggacatcacggtggaccttccaccatgattatccgncagcaccgtccctaccacccgggtaggttcttcaagaaccaccatagtggcagccacaacaacagtgagcagcacagtctcaaccctactccgagttcactaaagattccagctcaatcagttcagccagctctgccagaacagcccaagaggttggtagaaaaacccgaactctgcttcaattgtaacaaacccggacacacggttggaaagtgcccgaagccaagacgtgctggacccaagttcgttcaggcccgtgttaatcatgcatctgcagaggaggcgcagtcagcaccagaggttatattgggcacattccccgtcaactcgacaccggcagtaatattgtttgattctggtgcaacccattccttcatttccaagcgttttgctggtgcacatgggttatctttagtgaagcttaagataccaatgcgagttcatactcctggaggtggcatgaccacaactcactactgcccatctgtgacagttgaaattcaagggtcgatttttccagccaacctcattcttctcgaatccaaggacctagatgtcatacttggaatggattggttgacaaggcacagaggagtgattgattgcgccagccgcaccatcaagttgaccaatgcaaaaggagaggtggtaaccttccagtccccagtgccgcagaagccaaggatcagtttaaaccaggctgctggtgaagaacaagaggtagcagtggagaaaaccactaagaagctggaggatattcccatagtcagagagtatccagaggtttttccggacgatctgaccacaatgccaccaaaaagggatatcgagttccggattgacttggtacctggaactgcaccgatccacaagaggccttacagaatgggagccaacgagttggcggaagtcaagaagcaagttgatgaacagttacagaagggatacatccgcccgagcacgtcgccttggggtgctccggttatctttgtggagaagaaagacaaaaccaagaggatgtgtgttgactaccgcgcactcaatgaggtcaccatcaagaacaagtatcctttgccaaggattgatgatctgttcgatcagctgaaaggagctactgtgttctctaagatagaccttcggtcaggctatcaccagttgaggatccgcgaagaggatattccaaagacagcattcatcactcggtacgggttgttcgaatgcacagttatgtctttcggactcactaatgcacctgccttcttcatgaatttgatgaacaaggtgtttatggaatttctagacaagtttgtcgtggtttttatcgatgacatacttatctactccaagtccgaggaagaacatgagcagcatcttcggctggtacttgaaaagttaaaagagcaccaactatatgccaagttcagcaagtgcgacttctggcttaaggaagttcagtttctcggtcacatcgtgaatgctcaaggagtagctgtggatccagcaaatgtggagtcagttaccaaatggaccccaccaaggacagtcactcaggttcggagtttcttaggacttgcgggctattaccgccggttcattgagaacttctctaaaattgctaagccaatgacacagctattgaagaaggaagaaaagtttatctggtctgctgaatgcaataggagttttgaagaactcaaacgacggttggtgtctgcaccagtcttaatcctgcctgatcagacgaaagatttccaggtctattgtgatgcatctcgccaggggctaggatgtgtgttgatgcaggatggcaaagtggtttcttatgcttcacggcagttgcgtcctcatgaaggcaactacccgacgcatgatctggaattagccgcagttgttcatgctttaaagatttggcggcactatctcatcggtaaccgttgtgaggtatatacagatcacaaaagtctaaagtacatctttactcaacctgatttgaatcttagacagcgaagatggttggagctgatcaaggattatgatatgggaatacattatcatcccggcaaggctaatgtggttgcagatgccttgagcaggaagagtcactgcaacgtcgcatgggtagaggaactatgctgtgaggttcaacgtgatttgggacatttgaaccttggtatagttgagcacggattcgtggctgccctagaggcacagcccacactggtggagcaggttcgcatagctcaagcaagtgatcctgaaatagcagagctcaaaaagaacatgagggttggaaaagcccgaggttttgttgaggacgaacaaggaacaatctggatgggagaaagattgtgtgtacccgaaaacaaggaattaaaagacctaatactaaccgaggctcatcaaactcaatattccattcatcccggcagtaccaaaatgtaccaagacctcaaagaaaagttctggtgggtcagcatgagaagggaaatagctgaattcgtagcactctgcgacgtctgtcaacgagtaaaggcagaacaccaaaggccagcaggtttgctacagccacttcagattccagaatggaagtgggaagaaatcggaatggatttcatcaccggtttgcccaggacgtcatcggggcatgattctatttgggtagtcgttgaccgactcaccaaaatggctcacttcattccggtgcacactacctactcagggaagaaattagcagaactctatctggcaagaatcatgtgtttacatggtgtacctaagaagatcgtgtctgatcgaggaagtcaattcacttcaaagttctggcagaaattgcaagaagaattgggaacccgtctaaacttcagcactgcttaccatccacaaacagatggccagaccgagcgagtcaatcaaatactagaggatatgttgagagcctgtgcgcttgactttggtggagcatgggacaaaagcttaccgtatgctgagttctcgtacaacaacagttaccaagctagtctgcagatggcaccgtttgaagcactgtatggacgaaggtgtcgtactccgctcttctgggatcagacaggggaacgccagttgtttggtacagaagttttaaatgaggcagaagagaaagtcagagctgtcagggaaagattgagaatcgcgcaatctcggcagaaaagctatgcagacaaccgccgaagggagctcgctttcgaaacaggggattatgtgtatctccgtgtcactccgctcaggggagtacatcgcttccaaaccaaaggaaagttggcaccacgctttgtgggaccatacaggatcttggaacgtagaggtgaagttgcttaccagctcgaacttccctccaacatgcttggcatccacaatgtgttccacgtctctcagttgaaaaaatgtttgagagttcctgaggaacaggcaagtccggatcacatcgaaattcaggaagacttgacgtatgtggagaagccaactcgtatcctcgaaaccagcgagagaaagaccagaaacaaagtaataagattctgcaaggttcagtggagccaccactcagaggaagaggccacttgggaaagagaagatgagttgaaggccacccacccgcacctcttcgccagcccttccgaatctcggggtcgagattccgtttaa

SEQ ID NO: 14633 - DNA, 1812 bp, Oryza sativa
  Clone ID: TFbOSC400219j.C1.o1.fg
atggagataaggaatggttcacgcgactcgaacaacgccagtggcagcgaagagccgatcaatggagcacgtgccaacggtgcatctgacaacagtccgtccccaccgcccgagaacccaacaattgctcaggtgttggacaatcagactcagatgatgacaatgatgatgcaacagatgcagcaacagtaccatcaggtgttgcaacaggtgcagcagcaagcacagcagcagcaacagaacctgcagtttggtcctccacctcctcagtccaaactgttagaattccttcgtgtcaagccgcccactttctcaagcaccaccaacccaatcgaggcctatgactggcttcatgccattgagaagaagctgaatcttttgcaatgcaacgagcaggagaaggttgcttttgctacacaccagctacaaggtcccgcttctatttggtgggacaactacatggtgacccgtccagctggggcagaggttacttggacagagtttcgtcatagtttcaataaagcacaggttcccgagggaattgtggcacaaaagaagagagagttccgctccctgcaacaaggaaccagaacagttatagagtatttgcatgagttcaaccgcctcgcgcgctacgcccctgaggacgtgcgtaccgatgccgagaggcaggagaagtttttgtctggtcttgatgatgaattgactaaccagttgatctctagagattatgaggactttgagaagcaggtccacaaggccatccgtcaagaggagcagtgtagcaaaatgaaccgtaagaggaaggcagcccagttcaggactccccaggggaagtgtcagaagcctcgtttcacgatgggacgtcagggtggaccttccaccatgattatccgacagcaccgtccctaccacccgggtaatttcaacaagaacaacaacagtggcagtcacagcagcctcaacccgactccaagtctattaatgattccagctcagtcagatcagccagctcagccagctctgccagaacagcccaagaggttgggagaaaaacccgaactctgcttcaattgtaaccaacccggacacacggttggaaagtgcccgaagccaagacgtgctggacccaagttcgttcaggcccgtgttaatcatgcatctgcagaggaggcgcagtcagcaccagaggttatattgggcacattccccgtcaactcgacaccggcagtaatattgtttgattctggtgcaactcattccttcatttctaagcgttttgctggtgcacatgggttatctttagtgaagcttaagataccaatgcgagttcatactcctggaggtggcatgaccacaactcactactgcccagctgtgacagttgaaattcaagggttgatttttccagccaacctcattcttctcgaatccaaggacctagatgtcatacttggaatggattggttgacaaggcatagaggagtgattgattgcgccagccgcaccatcaagttgaccaatgcaaaaggagaggtggtaaccttccagtctccagtgctgcagaagccaaggatcagtttaaaccaggctgctggtgaagaacaagaggtagcagtggagaaaaccactaagaagctggaggatattcccatagtcagagagtatccagaggtttttccggacgatctgacaacaatgccaccaaaaagggatatcgagttccggattgacttggtacctggaactgcaccgatccacaagaggccttacagaatgggagccagcgagttggcggaagtcaagaagcaa

SEQ ID NO: 14634 - DNA, 4569 bp, Oryza sativa
  Clone ID: TFbOSC400221j.C1.o7.fg
atggagataaggaatggttcacgcgactcgaacaacgccagtggcagcgaagagccgatcaatggagcacgtgccaacggtgcatctgacaacagtccgtccccaccgcccgagaacccaacaattgctcaggtgttggacaatcagactcagatgatgacaatgatgatgcaacagatgcagcaacagtaccatcaggtgttgcaacaggtgcagcagcaagcacagcagcagcaacagaacctgcagtttggtcctccacctcctcagtccaaactgttagaattccttcgtgtcaagccgcccactttctcaagcaccaccaacccaatcgaggcctatgactggcttcatgccattgagaagaagctgaatcttttgcaatgcaacgagcaggagaaggttgcttttgctacacaccagctacaaggtcccgcttctatttggtgggacaactacatggtgacccgtccagctggggcagaggttacttggacagagtttcgtcatagtttcaataaagcacaggttcccgagggaattgtggcacaaaagaagagagagttccgctccctgcaacaaggaaccagaacagttatagagtatttgcatgagttcaaccgcctcgcgcgctacgcccctgaggacgtgcgtaccgatgccgagaggcaggagaagtttttgtctggtcttgatgatgaattgactaaccagttgatctctagagattatgaggactttgagaagcaggtccacaaggccatccgtcaagaggagcagtgtagcaaaatgaaccgtaagaggaaggcagcccagttcaggactccccaggggaagtgtcagaagcctcgtttcacgatgggacgtcagggtggaccttccaccatgattatccgacagcaccgtccctaccacccgggtaatttcaacaagaacaacaacagtggcagtcacagcagcctcaacccgactccaagtctattaatgattccagctcagtcagatcagccagctcagccagctctgccagaacagcccaagaggttgggagaaaaacccgaactctgcttcaattgtaaccaacccggacacacggttggaaagtgcccgaagccaagacgtgctggacccaagttcgttcaggcccgtgttaatcatgcatctgcagaggaggcgcagtcagcaccagaggttatattgggcacattccccgtcaactcgacaccggcagtaatattgtttgattctggtgcaactcattccttcatttctaagcgttttgctggtgcacatgggttatctttagtgaagcttaagataccaatgcgagttcatactcctggaggtggcatgaccacaactcactactgcccagctgtgacagttgaaattcaagggttgatttttccagccaacctcattcttctcgaatccaaggacctagatgtcatacttggaatggattggttgacaaggcatagaggagtgattgattgcgccagccgcaccatcaagttgaccaatgcaaaaggagaggtggtaaccttccagtctccagtgctgcagaagccaaggatcagtttaaaccaggctgctggtgaagaacaagaggtagcagtggagaaaaccactaagaagctggaggatattcccatagtcagagagtatccagaggtttttccggacgatctgacaacaatgccaccaaaaagggatatcgagttccggattgacttggtacctggaactgcaccgatccacaagaggccttacagaatgggagccagcgagttggcggaagtcaagaagcaagtcgatgaacagttacagaagggatacatccgcccgagcacgtcgccttggggtgctccggttatctttgtggagaagaaagacaaaaccaagaggatgtgcgttgactaccgcgcactcaatgaggtcaccatcaagaacaagtatcctttgccaaggattgatgatctgtttgatcagttgaaaggagctactgtgttctctaagatagacctgcgatcaggctatcaccagttgaggatccgcgaagaggatattccaaagacagcattcatcactcggtacgggtcgttcgaatgcacagttatgtctttcggactcactaatgcacctgccttcttcatgaatttgatgaacaaggtgtttatggaatttctagacaagtttgtcgtggttttcatcgatgacatacttatctactccaagtccgaggaagaacatgagcagcatcttcggctggtacttgaaaagttaaaagagcaccagctatatgccaagttcagcaagtgcgacttctggcttaaggaagttcagtttctcggtcacatcgtgaatgctcaaggagtagccgtggatccagcaaatgtggagtcagttaccgagtggaccccaccaaggacagtcactcaggttcggagtttcttaggacttgcgggctattaccgccggttcattgagaacttctctaaaattgctaagccaatgacacagctattgaagaaggaagaaaagtttatctggtctgctgaatgcaataggagttttgaagaactcaaacgacggttggtgtctgcaccagtcttaaccctgcctgatcagacgaaagatttccaggtctattgtgatgcatctcgccagggggtaggatgtgtgttgatgcaggatggcaaactggtttcttatgcttcacggcagttgcgtcctcatgaaggcaactacccgacgcatgatctggaattggccgcagttgttcatgctttaaagatttggcggcactatctcatcggtaaccgttgtgaggtatatacagatcacaaaagtctaaagtacatcttcactcaacctgatttgaatctcagacagcgaagatggttggagctgatcaaggattatgatatgggaatacattatcatcccggcaaggctaatgtggttgcagatgccttgagcaggaagagctactgcaatgttgcatgggtagagcaactatgctgtgaggttcaacgtgatttggaacatctgaaccttgggatagttgagcacggattcgtggctgccctagaggcacagcccacactggtggagcaggttcgcatagctcaagcaagtgatcctgaaatagcagagctcaaaaagaacatgagagttggaaaagcccgaggttttgttgaggatgaacaaggaacaatctggatgggagaaagattgtgtgtacccgaaaacaaggaattaaaagacctgatactaaccgaggctcatcaaactcaatattccattcatcccggcagtaccaaaatgtaccaagacctcaaagaaaagttctggtgggtcagcatgagaagggaaatagctgaattcgtagcactctgtgacgtctgtcaacgagtaaaggcagaacaccaaaggccagcaggtttgctacagccacttcagattccagaatggaagtgggaagaaatcggaatggatttcatcaccggtttgcccaggacgtcatcggggcatgattctatttgggtagtcgttgaccgactcaccaaagtggctcacttcattccggtgcacactacctactcagggaagaaattagcagaactctatctggcaagaattatgtgtttacatggtgtacctaagaagatagtgtctgatcgagggagccaattcacctcaaagttctggcagaaattacaagaagaattgggaacccggttgaatttcagcactgcttaccatccacaaacagatggccagaccgagcgagtcaatcaaattctagaggatatgttgagagcctgtgcgcttgactttggtggagcatgggacaaaagcttgccgtatgctgagttctcttacaacaacagttaccaagctagtctgcagatggcaccgtttgaagcactgtatggacgaaggtgtcgtactccgctcttctgggatcagacaggggaacgccagttgtttggtacagaagttttaaatgaggcagaagagaaagtcagagctgttagggaaagattgagaatcgcgcagtctcggcagaaaagctatgcagacaaccgccgaagagagctcgctttcgaaacaggggattatgtgtatctccgtgtcactccgctcaggggagtacatcgcttccaaaccaaaggaaagttggcaccacgctttgtgggaccatacaggatcttggaacgtagaggtgaagttgcttaccagctcgagcttccctccaacatgcttggcatccacaacgtgttccacgtctctcagttgaagaaatgtttgagagttcctgaggaacaggcaagtccggatcacatcgaaattcaggaagatctgacgtatgtggagaagccgattcgtatcctcgaaaccagcgagagaaggaccagaaacaaagtaataagattctgcaaggttcagtggagccaccactcagaggaagaggccacttgggaaagagaagatgagttgaaggccacccacccgcacctcttcgccagctcttccgaatctcggggtcgagattccgtttaa

SEQ ID NO: 14635 - DNA, 3786 bp, Oryza sativa
  Clone ID: TFbOSC400271j.C1.o5.fg
atggcagttaagtactggttcacgggaaaccctgggagacttaccgtgcttaccacaagcgggactgttttaccgttttcaactactggttttaaatgcctgctttatgcaaatgaacctttagccttttttggttataccctgcatcatacctcctcttccgagctgaagatcttcctagttggagctgtcttgttgaggtttgttgcttgtgggttagtcggcggtcgatatcatgtgtcagtgatggtgaagacaaggaatggttcccatgactccaacaacgctagtggcagcgaagagcggatcagtggaccatgtgccagcgatacattcgacaacagctcatctccatcgcccgagaacccaacgattgctcaggtgttggaaaatcagactcagatgatgacaatgatgatgcaacagatgcagcaacagtaccatcaggtgttgcagcaggtgcagcagcaagcagcagcagaacttgcagcgtggtcttccgcctccctgctgggacagaagttacttggtcagagttttgccagagttttaataaggcacaggttcccgagggaatcatggcacaaaagaagagagagttctgttccctgcaacaagaaaccagaacagttagagtatttgcatgagttcaaccgcctcgcgcgctacgcccctaaggacgtgcgtaccgatgccgagaggcaggagaagtttctgtctggtcttgatgatgaattgaccaaccagttgatccctagagattatgaggactttgagaagctggtggataaggctatccgtcaggaggagttgtgtaacaaaatgaaccgtaagaggaaggcagctcagttcaggactccccaaggggagagtcagaagccttgtttcacgatgggacatcagggtggaccttccaccatgattatccggcagcaccgtccctaccacccgggtagcttcaacaagaaccaccataatggcagtcacaacaacagtgagcagcacagcctcaaccctactccgagttcactaatgattctagctcaatcagttcagccagctctgccagaacagcccaagaggttgggagaaaagcccgaactctgcttcaattgtaacaaacccggacacacggttggaaagtgcccgaagccaagacatgctggacccaagtttgtgcaggcccgtgtcaatcatgcgtctgcagaggaggcacagtcagcaccagaggttatattgggcacatttcccatcaactcgacaccggcagtaatattgtttgattctggtgcaactcattccttcatttccaagcgttttgctggtgcacatgggttatcttttgtgaagcttaagataccaatgcgagttcatactcctggaggtggcatgaccacaactcactactgcccatccgtgacagttgaaatccaagggttgatttttccagccaacctcattcttctcgaatccaaggacctagatgttatacttgggatggattggttgacacggcacaaaggagtgattgattgcgctagccgcatcatcaagttgaccaatgcgaaaggagaagtggtaaccttccagtctccagtgccgcagaagccagggatcagtttgaaccaggctgttggtgaaggacaagaggtagcagtggagaaaaccactaagaagttggaggatattcccatagtcagagagtatccagaggtttttctggatgatctgacaacaatgccaccaaaaagggatatcgagttccggattgacttggcacctggaactgcaccgatccacaagaggccttacataatgggagccaacgagttggcggaagacaagtttgtcgtggttttcatcgatgacatactgatctactccaagtcccaggaagaacatgagcagcatcttcggttggaactcgaaaagttaaaagagcaccagctatatgccaagttcggcaagtgtgacttctggcttaaggaagttcagtttctcggtcacatcgtgaatgctcaaggagtggctgtggatccagcaaatgtggagtcagttaccaaatggacctcaccaaagacagttactcagattcggagtttcttaggactcgcgggctattaccgccggttcattgagaacttctctaaaattgccaagccaatgacacagctcttgaagaaggaggaaaagtttatctggtctgctgaatggaataggagttttgaagaactcaaacgacggttggggctaggatgtgtgttgatgcaagatggcaaagtggtttcttatgcttcacgacagttgcgtcctcatgaaggcaactacccgacccatgatctggaattggccgcagttgttcatgctttaaagatttggcggcactatcttatcggtaaccgttgtgaggttcgcatagctcaagcaagtgatcctgagatagccgagctcaaaaagaacatgagagttggaaaagcccgaggttttgttgaggatgaacaaggaacaatctggatgggagaaagattgtgtgtacctaaaaacaaggagttaaaggacttgatactgacagaagctcatcaaactcggtattcaattcatcccggcagtactaagatgtaccaagacctcaaggaaaaattctggtgggtaagcatgagaagggaaatagctgaatttgtcgcactctgtgacgtctgccagcgagtaaaggcagaacacgaaaggccagcaggtctgctacagccccttcagattccagaatggaagtgggaagaaattggaatggactttatcaccggcttgcccaggacatcatctggacatgattccatttgggtagtcgttgatcgactcactaaagtggctcacttcattccggtgcatactacctactcagggaagaaaagccaattcacctcaaagttctggcagaaattgcaagaagaattgggaacccgtctgaacttcagcacagcctaccatccgcagactgatggccagaccgagcgagttaaccaaatattggaggatatgttgagagcttgtgcgcttgattttggtggagcatgggacaaaagcttgccatatgctgagttctcctacaacaacagttaccaggctagtctgcaaatggcaacgtttgaagcattgtatggacggaggtgtcgcactccgctcttctggaatcagacaggggaacgccagttgtttggtacagaagttttaaatgaggcagaagagaaagtcagagctgtcatggaaagattgagaatcgcgcaatctcgacagaaaagctatgcagacaatcgtcaaagggagctcactttcgaagcaggggactatgtgtaccttcgtgtcactccgctcagaggagtacaccgcttccaaaccaaaggaaagttggcaccacgctttgtgggaccatatcgggttttggaacgtagaggtgaagttgcttaccagcttgagcttccctccaacatgtttggcattcataatgtgttccacgtctcacagttgaagaaatgtttgagagttcctgaggaacaggcaagtccggatcaaatcgaaattcaggaagatctgacgtatgtggagaagccgactcgtatcctcgaaatcagtgagagaaggaccaggaacaaagtaatcagattctgcaaggttcagtggagccatcactcagagaaagaggccacttggaaaagagaagatgagttgaaggccacccatccgcaccttttcgccagctcttccgaatctcggggccgagattccgtttaa

SEQ ID NO: 14636 - DNA, 4326 bp, Oryza sativa
  Clone ID: TFbOSC400535j.C1.o1.fg
atggagacaaggaatggttcacgcgactcgaacaacgccagtggcagcgaaaagccgatcaatggagcacgtgccaacagtgcatctgacaacagtccgtccccaccgcccgagaacccaacaattgctcaggtgttggacaatcagactcagatgatgacaatgatgatgcaacagatgcagcaacagtaccatcaggtgttgcaacaggtgcagcagcaagcacagctgcagcagcagaacctgcagtttggtcctccacctcctcagtccaaactgttagaatttcttcgtgtcaagccgcccaccttctcaagcaccaccaacccaatcgaggcccacgactggcttcatgccattgagaagaagctgaatcttttgcaatgcaacgagcaggagaaggttgcttttgctacacaccagctacaaggtcccgcttctatttggtgggacaactacatggtgacccgtccagctggggcagaggttacttggacagagtttcgtcatagtttcaataaagcgcaggttcccgagggaattgtggcacaaaagaagagagagttccgttccctgcaacaaggaaccagaacagttatagagtatttgcatgagttcaaccgcctcgcgcgctacgcccctgaggacgtgcgtaccgatgccgagaggcaggagaagtttctgtcgggtcttgatgatgaattgaccaaccagttgatctctagagattatgaggactttgagaagcttgtggacaaggctatccgtcaagaggagcagtgtaacaaaatgaaccgtaagaggaaggcagcccagttcaggactccccaggggaagtgtcagaagcctcgtttcacgatgggacatcagggtggaccttccaccatgattatccggcagcaccgtccctaccacccgggtaatttcaacaagaacaacaacagtggcagtcacagcagcctcaacccgactccaagtccattaatgattccagctcagtcagatcagtcagatcagctagctcagccagctctgccagaacagcccaagaggttgggagaaaagcccgaactctgcttcaattgtaacaaacccggacacacggttggaaagtgcccgaagccaagacgtgctggacccaagtttgttcaggcccgtgtcaatcatgcgtctgcagaggaggcgcagtcagcaccagaggttatattgggcacattccccgtcaactcgacaccggcagtaatattgtttgattctggtgcaacccattccttcatttccaagcgttttgctggtgcacatgggttatccttagtgaagcttaagataccaatgcgagtgcatactcctggaggtggcatgaccacaactcactactgcccatctgtgacagttgaaattcaagggttgatttttccagccaacctcattcttctcgaatccaaggacctagatgtcatacttggaatggattggttaacaaggcacagaggagtgattgattgcgccagccgcaccatcaagttaaccaatgcaaaaggagaggtggtaaccttccagtctctagtgccgcggaagccagggatcagtttaaaccaggttgctggtgaagaacaagaggtagcagtggagaaaaccactaagaagctggaggatattcccatagtcagagagtatccagaggtttttccggacgatctgacaacaatgccaccaaaaagggatatcgagttccggattgacttggtacctggaactgcaccgatccacaagaggccttacagaatgggagccagcgagttggcggaagtcaagaagcaagtcgatgaacagttacagaagggatacatccgcccgagcacgtcgccttggggtgctccggttatctttgtggagaagaaagacaaaaccaagaggatgtgcgttgactaccgcgcactcaatgaggtcaccatcaagaacaagtatcctttgccaaggattgatgacctgtttgatcaattgaaaggagctactgtgttctctaagatagacctgcgatcaggctatcaccagttgaggatccgcgaagaggatattccaaagacagcattcatcactcggtacgggttgttcgaatgcacagttatgtctttcggactcactaatgcacctgccttcttcatgaatttgatgaacaaggtgtttatggaatttctagacaagtttgtcgtggttttcatcgatgacatacttatctactccaagtccgaggaagaacatgagcagcatcttcggctggtacttgaaaagttaaaagagcaccagctatatgccaagttcagcaagtgcgacttctggcttaaggaagttcagtttctcggtcacatcgtgaatgctcaaggagtagctgtggatccagcaaatgtggagtcagttaccaaatggaccccaccaaggacagtcactcaggatggcaaagtggtttcttatgcttcacggcagttgcgtcctcatgaaggcaactacccgacgcatgatctggaattagccgcagttgttcatgctttaaagatttggcggcactatctcatcggtaaccgttgtgaggtatatacagatcacaaaagtctaaagtacatctttactcaacctgatttgaatctcagacagcgaagatggttggagctaatcaaagattatgatatgggaatacactatcatcccggcaaggctaatgtggttgcagatgccttgagcaggaagagctactgcaatgttgcatgggtagagcaactatgttgtgaggttcaacgcgatttggaacatctgaaccttggtatagttgagcacggattcgtggctgccctagaggcacagcccacactggtggagcaggttcgcatagctcaagcaagtgatcctgaaatagcagagctcaaaaagaacatgagggttggaaaagcccgaggttttgttgaggacgaacaagggacaatctggatgggagaaagattgtgtgtacccgaaaacaaggaattaaaagacctgatactaaccgaggctcatcaaactcagtattccattcatcccggtagtactaaaatgtaccaagacctcaaagaaaagttctggtgggtcagcatgagaagggaaatagctgaattcgtagcactatgtgacgtctgtcaacgagtaaaggcagaacaccaaaggccagcaggtttgctacagccacttcagattccagaatggaagtgggaagaaatcggaatggatttcatcaccggtttgcccaggacgtcatcggggcatgattctatttgggtagtcgttgaccgactcaccaaagtggctcacttcattccggtgcacactacctactcagggaagaaattagcagaactctatctatcaagaatcatgtgtttacatggtgtacctaagaagatcgtgtctgatcgaggaagccaattcacttcaaagttctggcagaaattacaagaagaattgggaacccgtctaaacttcagcactgcttaccatccacaaacagatggccagaccgagcgagtcaatcaaatactagaggatatgttgagagcctgtgcgcttgactttggtggagcatgggacaaaagcttgccgtatgctgagttctcttacaacaacagttaccaagctagtctgcagatggcaccgtttgaagcactgtatggacggaggtgtcgtactccgctcttctgggatcagacaggggaacgccagttgtttggtacagaagttttaaatgaggcagaagagaaagtcagagctgttagggaaagattgagaatcgcgcaatctcggcagaaaagctatgcagacaaccgccgaagggagctcgttttccaagtaggggattatgtgtatctccgtgtcactccgctcaggggagtacaccgcttccaaaccaaaggaaagttggcaccacgctttgtgggaccatatcggattttggaacgcaggggtgaagttgcttaccagcttgagcttccctccaacatgcttggcatccataatgtgttccacgtctcccagttgaagaaatgtttgagagttcctgaggaacaggcaagtccggatcaaatcgaaatccaggaagacttgacgtatgtggagaagccaactcgtatcctcgaaaccagcgagagaaagaccagaaacaaagtaataagattctgcaaggttcagtggagtcaccactcagaggaagaggccacttgggaaagagaagatgagttgaaggccacccacccgcacctcttcgccagctcttccgaatctcggggtcgagattccgtttaa

SEQ ID NO: 14637 - DNA, 4575 bp, Oryza sativa
  Clone ID: TFbOSC400563j.C1.o6.fg
atggagataaggaatggttcacgcgactcgaacaacgccagtggcagcgaagagccgatcaatggagcacgtgccaacggtgcatctgacaacagtccgtccccaccgcccgagaacccaacaattgctcaggtgttggacaatcagactcagataatgacaatgatgatgcaacagatgcagcaacagtaccatcaggtgatgcagcaggtgcagcagcaagcacagctgcagcagcagaacctgcagtttggtcctccacctcctcagtccaaactgttagaatttcttcgtgtcaagccgcccactttctcaagcaccaccaacccaatcgaggcccacgactggcttcatgccattgagaagaagctgaatcttttgcaatgcaacgagcaggagaaggttgcttttgctacacaccagctacaaggtcccgcttctatttggtgggacaactacatggtgacccgtccggctggggcagaggttacttggacagagtttcgtcatagtttcaataaagcacaggttcccgagggaattgtgggacaaaagaagagagagttccgttccctgcaacaaggaaccagaacagttatagagtatttgcatgagttcaaccgcctcgcgcgctacgcccctgaggacgtgcgtaccgatgccgagaagcaggagaagtttatgtctggtcttgatgatgaattgaccaaccagttgatctctagagactatgaggactttgagaagcttgtggacaaggctattcgtcaagaggagcagtgtaacaaaatgaaccgtaagaggaaggcagcccagttcaggactccccaggggaagtgtcagaagcctcgttacacgatgggacgtcacggtggaccttccaccatgattatccgacagcaccgtccctaccacccgggtagcttcaataagacccaccatagtgatagtcacaacaacagtgagcagcacagcctcaaccctactccgagttcactaaagattccagctcaatcagttcagccagctctgccagaacagcccaagaggttgggagaaaaacccgaactctgcttcaattgtaacaaacccggacacacggttggaaagtgcccaaagccaagacgtgctggacccaagttcgttcaggcccgtgttaatcatgcatctgcagaggaggcgcagtcagcaccagaggttatattgggcacattccccgtcaactcgacaccggcagtaatattgtttgattctggtgcaacccattccttcatttccaagcgttttgctggtgcacatgggttatctttagtgaagcttaagataccaatgcgagttcatactcctggaggtggcatgaccacaactcactactgcccatctgtgacagttgaaattcaagggttgatttttccagccaacctcattcttctcgaatccaaggacctagatgtcatacttggaatggattggttggcaaggcacagaggagtgattgattgcgccagccgcaccatcaagttgaccaatgcaaaaggagaggtggtaatcttccagtctccagtgccgcagaagccagggattagtttaaaccaggctgctggtgaagaacaagaggtagcagtggagaaaaccactaagaaactagaggatattcctatagtcagagagtatccagaggtttttccggatgatctgacaacaatgccaccaaaaagggatatcgagttccggatagacttggtaactggaactgcaccgatccacaagaggccttacagaatgggagccagcgagttggcggaagtcaagaagcaagtcgatgaacagttacagaagggatacatccgtccgagcacgtcgccttggggtgctccggttatctttgtggagaagaaagacaaaaccaagaggatgtgcgttgactaccgcgcactcaatgaggtcactattaagaacaagtaccctttgccaaggattgatgatctgttcgatcagctgaaaggagctactgtgttctctaagatagacctgcgatcaggttatcaccagttgaggatccgcgaagaggatattccaaagacagcattcatcactcggtacgggttgttcgaatgcacagttatgtctttcggactcactaatgcacctgccttcttcatgaatttgatgaacaaggtgtttatggaatttctagacaagtttgttgtggttttcatcgatgacatacttatctactccaagtccgaggaagaacatgagcagcatcttcggctggtacttgaaaagttaaaagagcaccagctatatgccaagttcagcaagtgcgacttctggcttaaggaagttcagtttctcggtcacatcgtgaatgctcaaggagtagctgtggatccagcaaatgtggagtcagttaccaaatggaccccaccaaggacagtcactcaggttcggagtttcttaggacttgcgggttattaccgccggttcattgagaacttctctaaaattgctaagccaatgacacagctattgaagaaggaagaaaagtttatctggtctgctgaatgcaataggagttttgaagaactcaaacgacggttggtgtctgcaccagtcttaatcctgcctgatcagacgaaagatttccaggtctattgtgatgcatctcgccaggggctaggatgtgtgttgatgcaggatggcaaagtggtttcttatgcttcacggcagttgcgtccccatgaaggcaactacccgacgcacgatctggaattggccgcagtcgttcatgctttaaagatttggcggcactatctcatcagtaaccgttgtgaggtatatacagatcacaaaagtctaaagtacatcttcacccaacctgatctgaatccccgacagcgaagatggttggagctaattaaagattatgatatgggaatacactatcatcccggcaaggctaatgtggtagcagatgccttgagcaggaagagttactgcaacgtcgcatgggtagaggaactatgctgtgaggtacaacgtgatttggaacatttgaaccttggtatagttgagcacggattcgtggctgccctagaggcacagcccacactggtggagcaggttcgcatagctcaagcaagtgatcctgaaatagcagagctcaaaaagaacatgagagttggaaaagcccgaggttttgttgaggatgaacaaggaacaatctggatgggagaaagattgtgtgtacccgaaaacaaggaattaaaagacctgatactaaccgaggctcatcaaactcaatattccattcatcccggcagtaccaaaatgtaccaagaactcaaagaaaagttctggtgggtcagcatgagaagggaaatagctgaattcgtagcactctgtgacgtctgtcaacgagtaaaggcagaacaccaaaggccagcaggattgctacagccacttcagattccagaatggaagtgggaagaaatcggaatggatttcatcaccggtttgcccaggacgtcatcggggcatgattctatttgggtagtcgttgaccgactcaccaaagtggctcacttcattccggtgcacactacctactcagggaagaaattagcagaactctatctggcaagaattatgtgtttacatggtgtacctaagaagatcgtgtctgatcgaggaagccaattcacttcaaagttctggcagaaattacaagaagaattaggaacccggttgaatttcagcactgcttaccatccacaaacagatggccagactgagcgagtcaatcaaatactagaggatatgttgagagcatgtgcgcttgactttggtggagcatgggacaaaagcttaccgtatgctgagttctcgtacaacaacagttaccaagctagtctgcagatggcaccatttgaagcactgtatggacgaaggtgtcgtactccgctcttctgggatcagacaggggaacgccagttgtttggtacagaagttttaaatgaggcagaagagaaagtcagagctgtcagggaaagattgagaatcgcgcagtctcggcagaaaagctatgcagacaaccgccgaagggagctcgctttcgaaacaggggattatgtgtatcttcgtgtcactccgctcagaggagtacaccgtttccaaaccaaagggaagttggcaccacgctttgtgggaccatacaggatcttggaacgtagaggtgaagttgcttaccagctcgagcttccctccaacatgcttggcatccacaacgtgttccacgtctctcagttgaagaaatgtttgagagttcctgaggaacaggcaagtccggatcaaatcaaaatccaggaagacttgacgtatatggagaagccgactcgtatcctcgaaaccagcgagagaaggaccagaaacaaagtaataagattctgcaaggttcagtggagccaccactcagaggaagaggccacttgggaaagagaagatgagttgaaggccacccacccgcacctcttcgccagctcttccgaatctcggggtcgagattccgtttaa

SEQ ID NO: 14638 - DNA, 1485 bp, Oryza sativa
  Clone ID: TFbOSC400719j.C1.o30.fg
atggcagttaaggaccggttcacgggaaaccctgggagacttaccgtgcttaccacaagcgggagtggagttgaagttcttctcagttggagccgtctcagagaggttggtttcgtcgctgccgtcaagatggagataaggaatggttcacgcgactccaacaacgccagtggcagcgaagagctgatcaatggagcacgtgccaacagtgcatctgacaacagtccgtccccaccgcccgagaacccaacaattgctcaggtgttggacaatcagactcagatgatgacaatgatgatgcaacagatgcagcaacagtaccatcaagtgttgcaacaggtgcagcagcaagcacagcagcagcagcagaacctgcagtttggtcctccacctcctcagtccaaactgttagaatttcttcgtgtcaagccgcccactttctcatgcaccaccaacccaatcgaggcccacgactggcttcatgccattgagaagaagctgaatcttttgcaatgcaacgagcaagagaaggttgcttttgctacacaccagctgcaaggtcccgcttctgtttggtgggacaactacatggtgacccgtctagctggggcagaggttacttggacagagttttgtcatagtttcaataaagcacaggttcccgagggaattgtggcacaaaagaagagagagttccgttccctgcaacaaggaaccagaacagttatagagtatttgcatgagttcaaccgcctcgcgcgctacgcccctgaggacgtgcgtacagatgacgggaggcaggagaagtttctgtctggtcttgatgatgaattgactaaccagttgatctctagagattatgaggactttgagaagttggtggataaggctatccgtcaggaggagcactgtaacaaaataaaccgtaagaggaaggcagctcagttcaggactccccaagggaagagtcagaagcctcgtttcacgatgggacgtcacggtggaccttccaccatgattatccggcagcaccgtccctaccacccgggtagcttcaacaagaaccaccatagtggcagtcacaacaacagtgagcagcacagcctcaaccctactccgagttcactaaagattccaacccaatcagttcagccagctctgccagaacagccaaagaggttgggagaaaaacccgaactctgcttcaattgtaacaaacccggacacacggttggaaagtgcccgaagccaagacgtgctggacccaagttcgttcaggcccgtgttaatcatgcatctgcagaggaggcgcagtcagcaccaaaggttatattgggcacattccccgtcaactcgacaccggcagtaatattgtttgattctggtgcaacccattccttcatttccaagcgttttgctggtgcacatgggttatctttagtgaagcttaagataccaatgcgagttcatactcctgaagcttaa

SEQ ID NO: 14639 - DNA, 4578 bp, Oryza sativa
  Clone ID: TFbOSC400746j.C1.o1.fg
atggagataaggaatggttcacgcgactcgaacaacgccagtggcagcgaagagccgatcaatggagcacgtgccaacggtgcatctgacaacagtccgtccccaccacccgagaacccaacaattgctcaggtgttggacaatcagactcagatgatgacaatgatgatgcaacagatgcagcaacagtaccatcaggtgttgcagcaggtgcagcagcaagcacagctgcagcagcagaacctgcagtttggtcctccacctcctcagtccaaactgttagaatttcttcgtgtcaagccgcccactttctcaagcaccaccaacccaatcgaggcccacgactggcttcatgccattgagaagaagctgaatcttttgcaatgcaacgagcaggagaaggttgcttttgctacacaccagctacaaggtcccgcttctatttggtgggacaactacatggtgacccgtccagctggggcagaggttacttggacagagtttcgtcatagtttcaataaagcacaggttcccgagggaattgtggcacaaaagaagagagagttccgttccctgcaacaaggaaccagaacagttatagagtatttgcatgagttcaaccgcctcgcgcgctacgcccctgaggacgtgcgtaccgatgctgagaggcaggagaagtttctgtcgggtcttgatgatgaattgaccaaccagttgatctctagagattatgaggactttgagaagcttgtggacaaggctatccgtcaagaggagcagtgtaacaaaatgaaccgtaagaggaaggcagcccagttcaggactccccaggggaagtgtcagaagcctcgtttcacgatgggacatcagggtggaccttccaccatgattatccggcagcaccgtccctaccacccgggtaatttcaacaagaacaacaacagtggcagtcacagcagcctcaacccgactccaagtccattaatgattccagctcagtcagatcagtcagatcagctagctcagccagctctgccagaacagcccaagaggttgggagaaaaacccgaactctgcttcaattgtaacaaacccggacacacggttggaaagtgcccgaagccaagacatgctggacccaagttcgttcaggcccgtgttaatcatgcatctgcagaggaggcgcagtcagcaccagaggttatattgggcacattccccgtcaactcgacaccggcagtaatattgtttgattctggtgcaacccattccttcatttccaagcgttttgctggtgcacatgggttatccttagtgaagcttaagataccaatgcgagtgcatactcctggaggtggcatgaccacaactcactactgcccatctgtgacagttgaaattcaagggttgatttttccagccaacctcattcttctcgaatccaaggacctagatgtcatacttggaatggattggttaacaaggcacagaggagtgattgattgcgccagccgcaccatcaagttaaccaatgcaaaaggagaggtggtaaccttccagtctctagtgccgcggaagccagggatcagtttaaaccaggctgctggtgaagaacaagaggtagcagtggagaaaaccactaagaagctggaggatattcccatagtcagagagtatccagaggtttttccggatgatctgacaacaatgccaccaaaaagggatatcgagttccggattgacttggtacctggaactgcaccgatccacaagaggccttacagaatgggagccaacgagttggcggaagtcaagaagcaagttgatgaacagttacagaagggatacatccgcccgagcacgtcgccttggggtgctccggttatctttgtggaaaagaaagacaaaaccaagaggatgtgcgtggactaccgcgcactcaatgaggtcactattaagaacaagtaccctttgccaaggattgatgatctgttcgatcagctgaaaggagctactgtgttctctaagatagaccttcggtcaggctatcaccagttgaggatccgcgaagaggatattccaaagacagcattcatcactcggtacgggttgttcgaatgcacagttatgtctttcggactcactaacgcacctgccttcttcatgaatttgatgaacaaggtgtttatggaatttctagacaagtttgtcgtggttttcatcgatgacatacttatctactccaagtccgaggaagaacatgagcagcatcttcggctggtacttgaaaagttaaaagagcaccagctatatgccaagttcagcaagtgcgacttctggcttaaggaagttcagtttctcggtcacatcgtgaatgctcaaggagtagctgtggatccagcaaatgtggagtcagttaccaagtggaccccaccaaggacagtcactcaggttcggagtttcttaggacttgcgggttattaccgccggttcattgagaacttctctaaaattgctaagccaatgacacagctattgaagaaggaagaaaagtttatctggtctgctgaatgcaataggagttttgaagaactcaaacgacggttggtgtctgcaccagtcctaatcctgcctgatcagacgaaagattttcaggtctattgtgatgcatctcgccaggggctaggatgtgtgttgatgcaggatggcaaagtggtttcttatgcttcacggcagttgcgtcctcatgaaggcaactacccgacgcatgatctggaattagccgcagttgttcatgctttaaagatttggcggcactatctcatcggtaaccgttgtgaggtatatacagatcacaaaagtctaaagtacatcttcacccaacctgatctgaatctccgacaacgaagatggttggagctaatcaaagattatgatatgggaatacactatcatcccggcaaggctaatgtggtagcagatgccttgagcaggaagagttactgcaacgtcgcatgggtagaggaactatgctgtgaggttcaacgtgatttggaacatttgaaccttggtatagttgagcacggattcgtggctgccctagaggcacagcccacactggtggagcaggttcgcatagctcaggcaagtgatcctgaaatagccgagctcaaaaagaacatgagggtcggaaaagcccgaggttttgttgaggatgaacaaggaacaatctggatgggagaaagattgtgtgtacccgaaaacaaggaattaaaagacctgatactaaccgaggctcatcaaactcaatattccattcatcccggtagtactaagatgtaccaagacctcaaagaaaaattctggtgggtcagcatgagaagggaaatagctgagttcgtagcactctgtgacgtctgtcaacgagtaaaggcagaacaccaaaggccagcaggtctgctacagccacttcagattccagaatggaagtgggaagaaatcggaatggatttcatcaccggtttgcccaggacgtcatcggggcatgattctatttgggtagtcgttgaccgactcaccaaagtggctcacttcattccggtgcacactacctactcagggaagaaattagcagaactctatctggcaagaattatgtgtttacatggtgtacctaagaagatcgtgtctgatcgaggaagccaattcacttcaaagttctggcagaaattacaagaagaattgggaacccggttgaatttcagcaccgcttaccatccacaaacagatggccagaccgagcgagtcaatcaaatactagaggatatgttgagagcctgtgcgcttgactttggtggagcatgggacaaaagcttgccgtatgctgagttctcttacaacaacagttaccaagctagtctgcagatggcaccgtttgaagcactgtatggacgaaggtgtcgtactccgctcttctgggatcagacaggggaacgccagttgtttggtacagaagttttaaatgaggcagaagagaaagtcagagctgttagggaaagattgagaatcgcgcaatctcggcagaaaagctatgcagacaaccgccgaagggagctcgttttccaagtaggggattatgtgtatctccgtgtcactccgctcaggggagtacaccgcttccaaaccaaaggaaagttggcaccacgctttgtgggaccatatcggattttggaacgcaggggtgaagttgcttaccagcttgagcttccctccaacatgcttggcatccataatgtgttccacgtctcccagttgaagaaatgtttgagagttcctgaggaacaggcaagtccggatcaaatcgaaattcaggaagatctgacgtatgtggagaagccgactcgtatcctcgaaaccagcgagagaaggaccagaaacaaagtaataagattctgcaaggttcagtggagccaccactcagaggaagaggccacttgggaaagagaagatgagttgaaggccacccacccgcacctcttcaccagctcttccgaatctcggggtcgagattccgtttaa

SEQ ID NO: 14640 - DNA, 6047 bp, Oryza sativa
  Clone ID: TFbOSC400770j.C1.o18.np
atggcggccggacctcccgcgcctattccttccccaccggccgctctctcccccttccaaccctatataaaccctccccgcacctcctccgtccgtttccgcctctcgccgcccttcctcctcgccggaatcgagctcgcgccgtcgctctctctctccgccgtcgccgccgagctccggtccgccgtcgtcgtcgccccggaccacctcccacctcggcgccgcctccttcggcttcgccgcatcctcgccgacctcgtccacccctccgtttcgctcgtcgaccgccggagcgccgccgtccccgtcgacccgaaccgcgccgccgccttcctccgctccggccgccttttcgtcgtcgccgtcgacctagggtgagccgtggaccgccgcctcatttccccctttccctcccttctctcggccgccgctccgccatgcctatggccgccgccggcgaccataggggcgcggacgcgccgcctcccgctggccgtgccgccgtggccgccttcgggcgcaccgagctgctgccgcgtggggcccggccgtcagccgctcgcgccctcgggtgcggctgacgcgtggggcccacggcgccggccggtgtgagcccgggtgcacccggtccaccgtggacccacctcggccatataaggaccggtcttcgggcctctgttgcaaagcgctaccgtacttccacatgtctagtgggacaaatgaaggctacacgagctacggcctggtagccaagatgtcatggcacagggccggtgtcctgctgctaggggctcagtcctgcctacctgtcccgggggttccggccgtaggtggggttgggtcgatgtacacctctgatcagagtataatctattcgaatagccgcgccctcggttatgggcaagccgagcaatgtacccaaatggccggcagcatcaaccgtcgtggtctggacctgactggattcgttttggaactgcggggcatgtgcgttgttctggggtatccgcatggagtggactaccagggcaagcagctcccggagcaggagggtgacgatgcagagccccacgctgcttgggaggttactgcagtgatcctcactggctcacccgagaggacttcgttggcggtcaccgcgggtggagattccttctccgctgcttgccagaacgccgcactcctcgccatcggcactcttcaccagcgctacccggacgagttgcagcacttgccctaccgctaccaccctcgtcgcggaggagcccgcgactacgccaccttccgggatgctagctcggaggatgacgctaccatcatgcacctggcgcacatggtggaggcatacgacgcggcccgtatcgacttccatcagatggtgcgtcgcgggttggtcaagaacaacatgaagatcctggagctgcgtcaggagaatctgcagttgaagaaggacttagacgcagtggaggcgcagctgcgtcagctcaagatcgcccagggagaggtctgtcgccccaagcgtcgccgcgtctgccgcagcctgaagatcaccgcccgcaagagtacctccaggcccgagcttgttcgtcagtccctggcgtggacctgcttcgtcgagacccctcgtgccgagcccgcgcccgtggttcctcaggaggatggagcctccggcgttggcagtacggaggatgcgctgttgctcaccttccatggtgacaaccaggagaagtgctgctaccggtgaaggcagtcaccccgaaggcagcaaccacaacaaccatgtcagcccacctccacctccttctccgcctccaccaccaccaccagacaccaacgccatcctcacccaaatcgtcgcccagtaggccaacatgatggctgctttcctccaccacatccaaaatccgccacaacataatgctccaccaccacccccacaacactctaaactcgccgagttcctccgcatctgtccgcctaccttctctagctctaataaccccgtggatgcattggattggttgcatgccgtggagaaaaagttagacaccgtgcagtgcagtgatgaggagaaagtcatcttcgccgcccaccaactgcaggggcccgcatctctatggtggaaccatttccaggctacgcagctagaggggcaacctattacttgggcccgcttcaccgccgctttccagagaacccatgtgcccgccggagtcatggcccttaagaaaagggaattccgagagttgaagcaaggcaaccgctccgtgatggagtatttgcatgagtttaacaacctggcctggtacgccccggaggatgttcgtgaagatgaggagaagtaagagaagttcttggcaggaatggatcctgagctgtccgtgcgtctggtctccggggactactcggatttccaacgtctggtggacaagagcatccgcttggaagccaagcacaaggaactggagtcgcacaagcgtcgcttggcgaatttccgcaatcaacagggggctaaccaaagggtccgctacaccaatccctatccagggggatcatcctcgcagcagcaacagcagcagcaacctcgctccgcgccccgacctcaattcgtggtgcgcatcccacagccgcagcaacagcagagtcagcaagggactcgtgcgccccgtccccctacgccagccgtgcagcctggtcaaggccgcagggacgttcaaggtcagcagcgtctgtgcttcaactgcttcgagcatgggcactttgcggataaatgcccaaagccgaggcgccagcaaggccaagcgcctccccgctccaacaacggtggtaaggatgtcattcggggacgtgtgaaccacgtgacggccgaggacgtgctgacaactccagacatcatcgttggtacgttcctcattcattccatccctgctaccattttgttcgactctggagcttcccactcgtttatatctgtgccattcgtggggagaaatcggttggggatagaaaggcttaggaaccctctgctcatcaccacccctggaggggttatgacagcaaagtattatagccctgccattcctatagaaatccagggaattccttttccctcggatctgattcttctagacaccaagaacttggatgtgatccttgggatgaattggttggctcaattccaaggagtagtggattgcgcaagacgcactgtcactctgtaccgagggccggaacaaccggttgttttctttgcacccccaacttctgtcggtagttcagaacttcatcagataggactgtcagaaatccccatcgtcagagagttcggagacgtgtttccagaaaaactacccggtatgctgccgaagcgagagattgagttccggatagatcttgctccaggaaccactcccctgtacaagcgaccctaccgtatggcagcaaatgaactggccgaagtcaagaaacagttggaagagttgaaagaaaaggggtatatacggccgagtacttccccctggggtgctcctgtgatttttgtggagaagaaagacaagacaaagaggatgtgcgttgactacagagctctcaatgaagttactatcaaaaacaagtaccctcttccccggatcgatgatctgttcgatcagcttaaaggtgccactgtattctccaagattgatcttcgttccggatatcaccaattacgtattcgtgaagaagatatcccgaagaccgcattcaccacgcgatacggactgtatgaattcacggtgatgtcgttcggtttaaccaatgctcctgccttcttcatgaacttagtgaacaaagtgttcatggaatacctggataagtttgttgtggttttcattaacgacattctggtgtactcacaatcagaggaagaccatcagcaccatctccgtctggtgttgggaaagttgcgggaacatcaattgtatgccaaacttagcaagtgtgagttttggttgtccgaagtcaaattcttagggcacgtgatatctgctaaaggagtcgctgtggaccccgaaacagtgaccgccgtcattgattggaagcaacccaagacagtcactcaaattcgcagcttcttgggtttggcaggatactaccggaggttcatcgagaacttctccaaaatcgctcgacccatgacacagttgttgaagaaagaagagaaatttgtgtggagcccgcaatgcgagaaggcattccaaactctcaaggaaaggttggtttcctcgccagttttagtctgaccggatactcgcaaggacttcatggtgtactgtgacgcttcgcgccaaggattggggtgcgtgctcatgcaggaaggtcatgtggtggcctatgcctcaaggcagctacggcctcatgaaggcaactaccctacccatgatttggagttagccgcggtagttcatgctctaaaaatctggcggcactatctcattgggaatcgctgtgaaatatatactgatcataagagtttgaaatacatcttcacccagtcggatctgaatcttcggtagaggagatggttagaactcatcaaggattatgatgtgggaattcactatcatcctggtaaggccaacgtggtcgccgacgctctaagtcgaaaaagccattgcaacactcttgacgtccgtggcattccacccgaacttaatcaacagatggaagccttgaacctaagcatagttggtcgtggattcttggctacgctggaagccaagcccaccttgctcgatcaaatccgcgaggctcagaagaatgatccggatatgcatggactcctcaagaatatgaaacagggtaaagccgctggtttcacagaggatgaacacggaaccctatggaacggaaatcggcgtgtcaaggcagagcaccaacgaccggccggacttctccaacctctccaagtaccagaatggaaatgggatgaaattgggatggatttcatcaccggacttccaaaaacccaaggcggatatgattctatatgggtagttgtggaccgactaaccaaggtagctcggtttattcctgtgaagaccacctatggagggaacaaactagccgagctctacttcgctagaatcgtgagtctccatggcgttcctaagaaaattgtatctgataggggaagccaattcacctctcacttttggaagaagctccaagaagagctgggtaccagattaaatttcagcaccgcgtatcacccgcagacagatggacagaccgagcgtctaaatcagatcctagaagatatgcttcgctcatgtgtcctagatttcgggaagacctgggataagagtctcccctatgccgagttctcctacaataacagctaccaagccagcttataaatggcaccctatgaagcgttgtatggacgcaaatgccggacaccgctattgtgggaccaagttggggaaagccaagtgttcgggactgatatcctgagagaggctgaagctaaagtcagaaccattcgggataatctaaaggtggcacagtcccggcagaagagttatgcagataaccgacgccgtaacctggaattcgcagtggacgattttgtgtaccttcgggtcacgccattgcgaggtgtacacatgtttcagacgaaagggaagctcgcacctcggtttgtgggtcctttccgtatcattgctcgacgcggggaagtcgcttaccagttggagctgcccgcctccttgggcaacgtgcatgatgtgttccatgtgtcgcaactcaagaaatgtcttcgagtgccatccgagcaggccgattcagagcaaattgaagttcgcgaagacttgacctacgtggagaggcccgtgaaaatcctggacaccatggagcgcaggaccaggaactgggtaatccgtttttgcaaggtccaatggagcaaccacgccgaggaagaagctacatgggagcgtgaagacgagctgaaggcagcccatcccaatctcttcggcagttcttccgaatctcggggtcgagattccgtt

SEQ ID NO: 14641 - DNA, 4575 bp, Oryza sativa
  Clone ID: TFbOSC400903j.C1.o71.fg
atggagataaggaatggttcacgcgactcgaacaacgccagtggcagcgaagagccgatcaatggagcacgtgccaacggtgcatctgacaacagtccgtccccaccgcccgagaacccaacaattgctcaggtgttggacaatcagactcagatgatgacaatgatgatgcaacagatgcagcaacagtaccatcaggtgttgcagcaggtgcagcggcaagcacagcagcaacaacagaacctgcagtttggtcctccacctcctcagtccaaactgttagaatttcttcgtgtcaagccgcccaccttctcaagcaccaccaacccaatcgaggcccacgactggcttcatgccattgagaagaagctgaatcttttgcaatgcaacgagcaagagaaggttgcttttgctacacaccagctgcaaggtcccgcttctgtttggtgggacaactacatggtgacccgtccagctggggcagaggttacttggacagagtttcgtcatagtttcaataaagcacaggttcccgagggaattgtggcacaaaagaagagagagttccgttccctgcaacaaggaaccagaacagttatagagtatttgcatgagttcaacctcctcgcgcgctacgcccctgaggacgtgcgtaccgatgccgagaagcaggagaagtttatgtctggtcttgatgacgaattgaccaaccagttgatctctagagactatgaggactttgagaagcttgtggacaaggctattcgtcaggaggagcactgtaacaaaataaaccgtaagaggaaggcagctcagttccggactccccaggggaagagtcagaagcctcgtttcacgatgggacatcacggtggaccttccaccatgattatccggcagcaccgtccctaccacccgggtaacttcaacaagaaccaccataatggcagtcacaacaacagtgagcagcacagtctcaaccctactccgagttcactaaagattccagctcaatcagttcagccagctctgccagaacagcccaagaggttgggagaaaaacccgaactctgcttcaattgtaacaaacccggacacacggttggaaagtgcccgaagccaagacgtgccggacccaagttcgttcaggcccgtgttaatcatgcatctgcagaggaggcgcagtcagcaccagaggttatattgggcacattccccgtcaactcgacaccagcagtaatattgtttgattctggtgcaacccattccttcatttccaagcgttttgctggtgcacatgggttatccttagtgaagcttaagataccaatgcgagtgcatactcctggaggtggcatgaccacaactcactactgcccatctgtgacagttgaaattcaagggttgatttttccagccaacctcattcttctcgaatccaaggacctagatgtcatacttggaatggattggttaacaaggcacagaggagtgattgattgcgccagccgcaccatcaagttaaccaatgcaaaaggagaggaggtaaccttccagtctctagtgccgcggaagccaggggttagtttaaaccaggctgctggtgaagaacaagaggtagcagtggagaaaaccactaagaagctggaggatattcccatagtcagagagtatccagaggtttttccggatgatctgacaacaatgccaccaaaaagggatatcgagttccggattgacttggtacctggaactgcaccgatccacaagaggccttacagaatgggagccaacgagttggcggaagtcaagaagcaagttgatgaacagttacagaagggatacatccgcccgagcacgtcgccttggggtgctccggttatctttgtggaaaagaaagacaaaaccaagaggatgtgcgtggactaccgcgcactcaatgaggtcactattaagaacaagtaccctttgccaaggattgatgacctgtttgatcagttgaaaggagctactgtgttctctaagatagaccttcggtcaggctatcaccagttgaggatccgcgaagaggatattccaaagacagcattcatcactcggtacgggttgttcgaatgcacagttatgtctttcggactcactaacgcacctgccttcttcatgaatttgatgaacaaggtgtttatggaatttctagacaagtttgtcgtggttttcatcgatgacatacttatctactccaagtccgaggaagaacatgagcagcatcttcggctggtacttgaaaagttaaaagagcaccagctatatgccaagttcagcaagtgcgacttctggcttaaggaagttcagtttctcggtcacatcgtgaatgctcaaggagtagctgtggatccagcaaatgtggagtcagttaccaaatggaccccaccaaggacagtcactcaggttcggagtttcttaggacttgcgggttattaccgccggttcattgagaacttctctaaaattgctaagccaatgacacagctattgaagaaggaagaaaagtttatctggtctgctgaatgcaataggagttttgtagaactcaaacgacggttggtgtctgcaccagtcttaatcctgcctgatcagacgaaagatttccaggtctattgtgatgcatctcgccaggggctaggatgtgtgttgatgcaggatggcaaagtggtttcttatgcttcacggcagttgcgtcctcatgaaggcaactacccgacgcatgatctggaattagccgcagttgttcatgctttaaagatttggcggcactatctcatcggtaaccgttgtgaggtatatacagatcacaaaagtctaaagtacatctttactcaacctgatttgaatctcagacagcgaagatggttggagctgatcaaggattatgatatgggaatacattatcatcccggcaaggctaatgtggttgcagatgccttgagcaggaagagctactgcaatgttgcatgggtagagcaactatgttgtgaggttcaacgcgatttggaacatctgaaccttggtatagttgagcacggattcgtggctgccctagaggcacagcccacactggtggagcaggttcgcatagctcaagcaagtgatcctgaaatagcagagctcaaaaagaacatgagggtcggaaaagcccgaggttttgttgaggatgaacaaggaacaatctggatgggagaaagattgtgtgtacccgaaaacaaggaattaaaagacctgatactaaccgaggctcatcaaactcaatattccattcatcccggtagtactaagatgtaccaagacctcaaagagaagttttggtgggtcagcatgagaagggaaatagctgagttcgtagcactctgtgacgtctgtcaacgagtaaaggcagaacaccaaaggccagcaggtttgctacagccacttcagattccagaatggaagtgggaagaaatcggaatggatttcatcaccggtttgcccaggacatcatcggggcatgattctatttgggtagtcgttgaccgactcaccaaagtggcccacttcattccggtgcacactacctactcagggaagaaattagcagaactctatctggcaagaattatgtgtttacatggtgtacctaagaagatcgtgtctgatcgaggaagccaattcacttcaaagttctggcagaaattacaagaagaattgggaacccggttgaatttcagcaccgcttaccatccacaaacagatggccagaccgagcgagtcaatcaaatactagaggatatgttgagagcctgtgcgcttgactttggtggggcatgggacaaaagcttgccgtatgctgagttctcgtacaacaacagttaccaagctagtctgcagatggcaccgtttgaagcactgtatggacgaaggtgtcgtactccactcttctgggatcagacaggggaacgccagttgtttggtacagaagttttaaatgaggcagaagagaaagtcagagctgttagggaaagattgagaatcgcgcagtctcggcagaaaagctatgcagacaaccgccgaagggagctcgctttcgaaacaggggattatgtgtatctccgtgtcactccgctcaggggagtacatcgcttccaaaccaaaggaaagttggcaccacgctttgtgggaccatatcggattttggaacgtagaggtgaagttgcttaccagctcgagcttccctccaacatgcttggcatccataatgtgttccacgtctcccagttgaagaaatgtttgagagttcctgaggaacaggcaagtccggatcaaatcgaaatccaggaagacttgacgtatgtggagaagccaactcgtatcctcgaaaccagcgagagaaagaccagaaacaaagtaataagattctgcaaggttcagtggagccaccactcagaggaagaggccacttgggaaagagaagatgagttgaaggccacccacccgcacctcttcgccagctcttccgaatctcggggtcgagattccgtttaa

SEQ ID NO: 14642 - DNA, 4689 bp, Oryza sativa
  Clone ID: TFbOSC401058j.C1.o66.fg
atggcagttaaggaccggttcacgggaaaccctgggagacttaccgtgcttaccacaagcgggagtgggtttgttgcttgtgggctagtcggcggccgatatcatgtgtcagtgatggagataaggaatggttcacgcgactcgaacaacgccagtggcagcgaagagccgatcaatggagcacgtgccaacggtgcatcttacaacagtccgtccccaccgcccgagaacccaacaattgctcaggtgttggacaatcagactcagatgatgacaatgatgatgcaacagatgcagcaacagtaccatcaggtgttgcaacaggtgcaacagcaagcacagccgcagcagcagaacctgcagtttggtcctccacctcctcagtccaaattgttagaatttcttcgtgtcaagccgcccactttctcaagcaccaccaccccaatcgaggcccacgactggcttcatgccattgagaagaagctgaatcttttgcaatgcaacgagcaggagaaggttgcttttgctacacaccagctacaaggtcccgcttctatttggtgggacaactacatggtgacccgtccagctggggcagaggttacttggacagagttttgtcatagtttcaataaagcccaggttcccgagggaatcgtggcacaaaagaagagagagttccgttccctgcaacaaggaaccagaacagttatagagtatttgcatgagttcaaccgcctcgcgcgctacgcccctgaggacgtgcgtaccgatgccgagaggcaggagaagtttatgtctggtcttgatgatgaattgaccaaccagctgatctctagagactatgaggactttgagaagcttgtggacaaggccatccgtcaagaggagcagtgtaacaaaatgaaccgtaagaggaaggcagcccagttcaggactccccaggggaagtgtcggaagcctcgtttcacgatgggacgtcacggtggaccttccaccatgattatccgacagcaccgtccctaccacccgggtagcttcaacaagaaccaccatagtggcagttacaacaacagtgagcagcacagcctcaaccctactccgagttcactaaagattccagctcaatcagttcagccagctctgccagaacagcccaagaggttgggagaaaaacccgaactctgcttcaattgtaacaaacccggacacacggttggaaagtgcccgaagccaagacgtgccggacccaagttcgttcaggcccgtgttaatcatgcatctgcagaggaggcgcagtcagcaccagaggttatattgggcacattccccgtcaactcgacaccggcagtaatattgtttgattctggtgcaacccattccttcatttccaagcgttttgctggtgcacatgggttatctttagtgaagcttaagataccaatgcgagttcatactcctggaggtggcatgaccacaactcactactgcccatctgtgacagttgaaattcaagggttgatttttccagccaacctcattcttctcgaatccaaggacctagatgtcatacttggaatggattggttggcaaggcacagaggagtgattgattgcgccagccgcaccatcaagttgaccaatgcaaaaggagaggtggtaatcttccagtctccagtgccgcagaagccagggattagtttaaaccaggctgctggtgaagaacaagaggtagcagtggagaaaaccactaagaagctggaggatattcccatagtcagagagtatccagaggtttttccggatgatctgacaacaatgccaccaaaaagggatatcgagttccggattgacttggtacctggaactgcaccgatccacaagaggccttacagaatgggagccaacgagttggcggaagtcaagaagcaagttgatgaacagttacagaagggatacatccgcccgagcacgtcgccttggggtgctccggttatctttgtggagaagaaagacaaaaccaagaggatgtgcgttgactaccgcgcactcaatgaggtcaccatcaagaacaagtatcctttgccaaggattgatgatctgtttgatcagttgaaaggagctactgtgttctctaagatagacctgcgatcaggctatcaccagttgaggatccgcgaagaggatattccaaagacagcattcatcactcggtacgggttgttcgaatgcacagttatgtctttcggactcactaatgcacctgccttcttcatgaatttgatgaacaaggtgtttatggaatttctagacaagtttgtcgtggttttcatcgatgacatactaatctactccaagtccgaggaagaacatgagcagcatcttcgactggtacttgagaagttaaaagagcaccagctatatgccaagttcagcaagtgcgacttctggcttaaggaagttcagtttctcggtcacatcgtgaatgctcaaggagtagctgtggatccagcaaatgtggagtcagttaccaagtggaccccaccaaggacagtcactcaggttcggagtttcttaggacttgcgggctattaccgccggttcattgagaacttctctaaaattgctaagccaatgacacagctattgaagaaggaagaaaagtttatctggtctgctgaatgcaataggagttttgaagaactcaaacgacggttggtgtctgcaccagtcttaatcctgcctgatcagacgaaagattttcaggtctattgtgatgcatctcgccaggggctaggatgtgtgttgatgcaggatggcaaagtggtttcttatgcttcacggcagttgcgtcctcatgaaggcaactacccgacgcatgatctggaattagccgcagttgttcatgctttaaagatttggcggcactatctcatcggtaaccgttgtgaggtatatacagatcacaaaagtctaaagtacatctttactcaacctgatttgaatctcagacagcgaagatggttggagctggtcaaggattatgatatgggaatacattatcatcccggcaaggctaatgtggttgcagatgccttgagcaggaagagctactgcaatgttgcatgggtagagcaactatgttgtgaggttcaacgcgatttggaacatctgaaccttggtatagttgagcacggattcgtggctgccctagaggcacagcccacactggtggagcaggttcgcatagctcaagcaagtgaccctgaaatagcagagctcaaaaagaacatgagagttggaaaagcccgaggttttgttgaggatgaacaaggaacaatctggatgggagaaagattgtgtgtacccgaaaacaaggaattaaaagacctgatactaaccgaggctcatcaaactcaatattccattcatcccggtagtactaagatgtaccaagacctcaaagaaaagttctggtgggtcagcatgagaagggaaatagctgagttcgtagcactctgtgacgtctgtcaacgagtaaaggcagaacaccaaaggccagcaggtttgctacagccacttcagattccagaatggaagtgggaagaaatcggaatggatttcatcaccggtttgcccaggacgtcatcggggcatgattctatttgggtagtcgttgaccgactcaccaaagtggctcacttcattccggtgcacactacctactcagggaagaaattagcagaactctatctggcaagaattatgtgtttacatggtgtacctaagaagatcgtgtctgatcgaggaagccaattcacttcaaagttctggcagaaattacaagaagaattgggaacccggttgaatttcagcaccgcttaccatccacaaacagatggccagaccgagcgagtcaatcaaatactagaggatatgttgagagcatgtgcgcttgactttggtggagcatgggacaaaagcttaccgtatgctgagttctcgtacaacaacagttaccaagctagtctgcagatggcaccatttgaagcactgtatggacgaaggtgtcgtactccgctcttctgggatcagacaggggaacgccagttgtttggtacagaagttttaaatgaggcagaagagaaagtcagagctgttagggaaagattgagaatcgcgcagtctcggcagaaaagctatgcagacaaccgccgaagggagctcgttttccaagtaggggattatgtgtatctccgtgtcactccgctccggggagtacatcgcttccaaaccaaaggaaagttggcaccacgctttgtgggaccatatcggattttggaacgtagaggtgaagttgcttaccagctcgagcttccctccaacatgcttggcatccataatgtgttccacgtctcccagttgaagaaatgtttgagagttcctgaggaacaggcaagtccggatcaaatcgaaatccaggaagacttgacgtatgtggagaagccaactcgtatcctcgaaaccagcgagagaaagaccagaaacaaagtaataagattctgcaaggttcagtggagccaccactcagaggaagaggccacttgggaaagagaagatgagttgaaggccacccacccgcacctcttcgccagctcttccgaatctcggggtcgagattccgtttaa

SEQ ID NO: 14643 - DNA, 4704 bp, Oryza sativa
  Clone ID: TFbOSC401064j.C1.o47.fg
atggcaattaaggaccggttcacgggaaaccctgggagacttaccgtgcttaccacaagcgggagtggagttgaagttcttctcagttggagccgtcttagagaggttggtttcgttgctgccgtcaagatggagataaggaatggttcacgcgactcgaacaacgccagtggtagcgaagagccgatcaatggagcacgtgccaacggtgcatctgacaacagtccgtccccaccgcccgagaacccaacaattgctcaggtgttggacaatcagactcagatgatgacaatgatgatgcaacagatgcagcaacagtaccatcaggtgttgcagcaggtgcagcagcaagcacagctgcagcagcagaacctgcagtttggtcctccacctcctcagtccaaactgttagaatttcttcgtgtcaagccgcccaccttctcaagcaccaccaacccaatcgaggcccacgactggcttcatgccattgagaagaagctgaatcttttgcaatgcaacgagcaggagaaggttgcttttgctacacaccagctacaaggtcccgcttctatttggtgggacaactacatggtgacccgtccagctggggcagaggttacttggacagagtttcgtcatagtttcaataaagcacaggttcccgagggaattgtggcacaaaagaagagagagttccgttccctgcaacaaggaaccagaacagttatagagtatttgcgtgagttcaacctcctcgcgcgctacgcccctgaggacgtgcgtaccgatgccgagaggcaggagaagtttctgtctggtcttgatgatgaattgactaaccagttgatctctagagattatgaggactttgagaagctggtggataaggctatccgtcaggaggagcactgtaacaaaataaaccgtaagaggaaggcagctcagttcaggactccccaggggaagagtcagaagcctcgtttcacgatgggacatcacggtggaccttccaccatgattatccggcagcaccgtccctaccacccgggtaacttcaacaagaaccaccatagtgacagtcacaacaatagtgagcagcacagcctcaaccctactccgagttcactaaagattccagcccaatcagttcagccagctctgccagaacaacccaagaggttgggagaaaaacccgaactctgcttcaattgtaacaaacccggacacacggttggaaagtgcccgaagccaagacgtgccggacccaagttcgttcaggcccgtgttaatcatgcatctgcagaggaggcgcagtcagcaccagaggttatattgggcacattccccgtcaactcgacaccggcagtaatattgtttgattctggtgcaacccattccttcatttccaagcgttttgctggtgcacatgggttatctttagtgaagcttaagataccaatgcgagtgcatactcctggaggtggcatgaccacaactcactactgcccatctgtgacagttgaaattcaagggttgatttttccagccaacctcattcttctcgaatccaaggacctagatgtcatacttggaatggattggttggcaaggcacagaggagtgattgattgcgccagccgcaccatcaagttgaccaatgcaaaaggagaggtggtaatcttccagtctccagtgccgcagaagccagggattagtttaaaccaggctgctggtgaagaacaagaggtagcagtggagaaaaccactaagaagctggaggatattcccatggtcagagagtatccagaggtttttccggatgatctgacaacaatgccaccaaaaagggatatcgagttccggattgacttggtacctggaactgcaccgatccacaagaggccttacagaatgggagccaacgagttggcggaagtcaagaagcaagttgatgaacagttacagaagggatacatccgcccgagcacgtcgccttggggtgctccggttatctttgtggaaaagaaagacaaaaccaagaggatgtgcgtggactaccgcgcactcaatgaggtcactattaagaacaagtaccctttgccaaggattgatgatctgttcgatcagctgaaaggagctactgtgttctctaagatagaccttcggtcaggctatcaccagttgaggatccgcgaagaggatattccaaagacagcattcatcactcggtacgggttgttcgaatgcacagttatgtctttcggactcactaacgcacctgccttcttcatgaatttgatgaacaaggtgtttatggaatttctagacaagtttgtcgtggttttcatcgatgacatacttatctactccaagtccgaggaagaacatgagcagcatcttcggctggtacttgaaaagttaaaagagcaccagctatatgccaagttcagcaagtgcgacttctggcttaaggaagttcagtttctcggtcacatcgtgaatgctcaaggagtagctgtggatccagcaaatgtggagtcagttaccaaatggaccccaccaaggacagtcactcaggttcggagtttcttaggacttgcgggttattaccgccggttcattgagaacttctctaaaattgctaagccaatgacacagctattgaagaaggaagaaaagtttatctggtctgctgaatgcaataggagttttgaagaactcaaacgacggttggtgtctgcaccagtcttaatcctgcctgatcagacgaaagatttccaggtctattgtgatgcatctcgccaggggctaggatgtgtgttgatgcaggatggcaaagtggtttcttatgcttcacggcagttgcgtcctcatgaaggcaactacccgacgcatgatctggaattggccgcagtcgttcatgctttaaagatctggcggcactatctcatcggtaaccgttgtgaggtatatacagatcacaaaagtctaaagtacatcttcacccaacctgatctgaatctccgacaacgacgatggttggagctaatcaaagattatgatatgggaatacactatcatcccggcaaggctaatgtggtagcagatgccttgagcaggaagagttactgcaacgtcgcatgggtagaggaactatgctgtgaggttcaacatgatttggaacgtttgaaccttggtatagttgagcacggattcgtggctgccctagaggcacagcccacactggtggagcaggttcgcatagctcaagcaagtgatcctgaaatagcagagctcaaaaagaacatgagggtcggaaaagcccgaggttttgttgaggatgaacaaggaacaatctggatgggagaaagattgtgtgtacccgaaaacaaggaattaaaagacctgatactaaccgaggctcatcaaactcaatattccattcatcccggtagtactaagatgtaccaagaccttaaagaaaagttctggtgggtcagcatgagaagggaaatagctgagttcgtagcactctgtgacgtctgtcaacgagtaaaggcagaacaccaaaggccagcaggtttgctacagccacttcagattccagaatggaagtgggaagaaatcggaatggatttcatcaccggtttgcccagaacgtcatcggggcatgattctatttgggtagtcgttgaccgactcaccaaagtggctcacttcattccggtgcacactacctactcagggaagaaattagcagaactctatctggcaagaattatgtgtttacatggtgtacctaagaagatcgtgtctgatcgaggaagccaattcacttcaaagttctggcagaaattacaagaagaattgggaacccggttgaatttcagcaccgcttaccatccacaaacagatggccagaccgagcgagtcaatcaaatactagaggatatgttgagagcctgtgcgcttgactttggtggagcatgggacaaaagcttgccgtatgctgagttttcttacaacaacagttaccaagctagtctacagatggcaccgtttgaagcactgtatggacggaggtgtcatactccgctcttctgggatcagacaggggaacgccagttgtttggtatagaagttttaaatgaggcagaagagaaagtcagagctgttagggaaagattgagaatcgcgcaatctcggcagaaaagctatgcagacaaccgccgaagggagctcgttttccaagtaggggattatgtgtatctccgtgtcactccgctcaggggagtacaccgcttccaaaccaaaggaaagttggcaccacgctttgtgggaccatatcggattttggaacgcaggggtgaagttgcttaccagcttgagcttccctccaacatgcttggcatccataatgtgttccacgtctcccagttgaagaaatgtttgagagttcctgaggaacaggcaagtccggatcaaatcgaaatccaggaagacttgacgtatgtggagaagccaactcgtatcctcgaaaccagcgagagaaagaccagaaacaaagtaataagattctgcaaggttcagtggagccaccactcagaggaagaggccacttgggaaagagaagatgagttgaaggccacccacccgcacctcttcgccagcccttccgaatctcggggtcgagattccgtttaa

SEQ ID NO: 14644 - DNA, 5490 bp, Oryza sativa
  Clone ID: TFbOSC401065j.C1.o27.gm
atggagacaaggaatggttcacgcgactcgaacaacgccagtggcagcgaagagccgatcaatggagcacgtgccaacggtgcatctgacaacagtccgtccccaccacctgagaacccaacaattgctcaggtgttggacaatcagactcagatgatgacaatgatgatgcaacagatgcagcgacagtaccatcaggtgttgcagcaggtgcaacagcaagcacagcagcagcagcagaacccgcaatttggtcctccgcctcctcagtccaaactgttagaatttcttcgtgtcaagccgcccaccttctcaagcaccaccaacccaatcgaggcccacgactggcttcatgccattgagaagaagctgaatcttttgcaatgcaacgagcaggagaaggttgcttttgctacacaccagctacaaggtcccgcttctatttggtgggacaactacatggtgacccgtccaactggggcagaggttacttggacagagtttcgtcatagtttcaataaagcacaggttcccgagggaattgtgggacaaaagaagagagagttccgttccctgcaacaaggaaccaaaacagttatagagtatttgcatgagttcaaccgcctcgcgcgctacgcccctgaggacgtgcgtaccgatgccgagaagcaggagaagtttatgtctggtcttgatgatgaattgaccaaccagttgatctctagagactatgaggactttgagaagcttgtggacaaggctattcgtcaagaggagcagtgtaacaaaatgaaccgtaagaggaaggcagcccagttcaggactccccaggggaagtgtcagaagcctcgttacacgatgggacgtcacggtggaccttccaccatgattatccgacagcaccgtccctaccacccggctcaatcagttcagccagctctgccagaacagcccaagaggttgggagaaaaacccgaactctgcttcaattgtaacaaacccggacacacggttggaaagtgcccgaagccaagacgtgctggacccaagttcgttcaggcccgtgtcaatcatgcatctgcagaggaggcgcagtcagcaccagaggttatattgggcacattccccgtcaactcgacaccggcagtaatattgtttgattctggtgcaacccattccttcatttccaagcgttttgctggtgcacatgggttatctttagtgaagcttaagataccaatgcgagtgcatactcctggaggtggcatgaccacaactcactactgcccatctgtgacagttgaaattcaagggttgatttttccagccaacctcattcttctcgaatccaaggacctagatgtcatacttggaatggattggttgacaaggcacagaggagtgattgattgcgccagccgcaccatcaagttgaccaatgcaaaaggagaggtggtaatcttccagtctccagtgccgcagaagccagggattagtttaaaccaggctgctggtgaaggacaagaggtagcagtggagaaaaccactaagaagctggaggatattcccatagtcagagagtatccagaggtttttccggacgatctgacaacaatgccaccaaaaagggatatcgagttccggatagacttggtacctggaactgcatcgatccacaagaggccttacagaatgggagccagcgagttggcggaagtcaagaagcaagtcgatgaacagttacagaagggatacatccgtccgagcacgtcgccttggggtgctccgattatctttgtggagaagaaagacaaaaccaagaggatgtgcgttgactaccgcgcactcaatgaggtcaccatcaagaacaagtatcctttgccaaggattgatgatctgtttgatcagttgaaaggagctactgtgttctctaagatagacctgcgatcaggttatcaccagttgaggatccgcgaagaggatattccaaagacagcattcatcactcggtacgggttgttcgaatgcacagttatgtctttcggactcactaatgcacctgccttcttcatgaatttgatgaacaaggtgtttatggaatttctagacaagtttgtcgtggttttcattgatgacatacttatctactccaagtccgaggaagaacatgagcagcatcttcgactggtacttgaaaagttaaaggagcatcagctatatgccaagttcagcaagtgtgacttctggcttaaggaagttcagtttctcggtcacatcgtgaatgctcaaggagtagcggtggatccagcaaatgtggagtcggttaccaagtggaccccaccaaggacagtcactcaggttcggagtttcttagggcttgcgggctattaccgccggttcattgagaacttctctaaaattgctaagccgatgacacagctattgaagaaggaagaaaagttcatctggtctgctgaatgcaataggagttttgaagaactcaaacgacggttggtgtctgcaccagtcttaatcctgcctgatcagacgaaagattttcaggtctattgtgatgcatctcgccaggggctaggatgtgtgttgatgcaggatggcaaagtggtttcttatgcttcacggcagttgcgtcctcatgaaggcaactacccgacgcatgatctggaattagccgcagttgttcatgctttaaagatttggcggcactatctcatcggtaaccgttgtgaggattatgatatgggaatacattatcatcccggcaaggctaatgtggttgcggatgccttgagcaggaagagctactgcaatgttgcatgggtagagcaactatgttgtgaggttcaacgtgatttggaacatttgaaccttggtatagttgagcacggattcgtggctgccctagaggcacagcccacactggtggagcagatggcaccatttgaagcactgtatggacgaaggtgtcgtactccgctcttctgggatcagacaggggaacgccaattgtttggtacagaagttttaaatgaggcagaagagaaagtcagagctgttagggaaagattgagaatcgcgcagtctcggcagaaaagctatgcagacaaccgccgaagggagctcgctttcgaaacaggggattatgtgtatctccgtgtcactccgctcaggggagtacatcacttccaaaccaaaggaaagttggcaccacgctttgtgggaccatacaggatcttggaacgtagaggtgaagttgcttaccagctcgagcttccctccaacatgcttggcatccacaacgtgttccacgtctctcagttgaagaaatgtttgagagttcctgaggaacaggcaagtccggatcacatcgaaattcaggaagatctgacgtatgtggagaagccgactcgtatcctcgaaaccagcgagagaaggacaagaaacaaagtaataagattctgcaaggttcagtggagccaccactcagaggaagaggccacttgggaaagagaagatgagttgaaggccacccacccgcacctcttcgccagctcttccgaatctcgggcgccgccgcttgccgccgcctttggccgcgagccgccgccgctagagtcgccgccgcgccaaaccgccgccgctgttagcttcgccgccgcaagagctttcccggccgccgcctcgcgtcgccggaatcccaccggagcacctctcccctcgcgagccgggtgtcgccgccgcccgtccgtgcctccgcgtcgccggtcatcgccgctcgtctcttcccacgccggtcgccgccatcgcctcggtgaggaatcccctttcctccttcctttcctctcccccgtgagcgccgccgccctccgcgcgtgcgccgtcgtcttcggctgccgccgccgccttcgcgccggccgccgccgtctccccgcgccgccggtcaccgccggcggcaccggtggcgagggtgggcgtgatggagttgggtcggccggggtgtccggttgtccagctgccggattcaccgcggcgcaagaggggaccgcccactgccttttgaggggtggggagctggagatcttcctagttggagctgttttgtcaaagttggtttcgtcgctgccgtcaaggattgcctgtggagtggagtcgcccgctgctgaagtcaagcttcccgggcagacttctaagtctgctaatgtgaccattggcaacactggaaatggaagcgggtatggtaatttacctactgtcgcacggcgttccaccgtcctaatagggaatgggtcacatgcttctgttcatggtgttggcacggtagatctgaagtttaattcgggaaagatcgtgcagctgaagaacgggcagcatgtcccttctatcgacatgaatcttgttagtggctcccgtctgactagagacggatttaagttggtttttgagtctaataaagtagtcgtgtctaaacatggatattttattggtaaaggttatgagtgcggaggcctgttccacttttccctttctgatttctgcaataatgaagctcctcgaaggagtaagagacaaaggacggctaagtcctttggtgatgatttcactgtgtacctcatggatgacactcctaagtcaatttcagaagcatatgcatctcctgatgcagactactggaaggaggctgtccgtagtgaaatggattccattatcactaacgggacttgggaggtgacagagcgaccctgtgggtgtaaacctgtggggtgcaagtgggtgttcaagaagaagcttaggcctgacgcctcacatggtcttctcgttcatcaaatggacgttaagacagcttttcttaatggagagctggatgaggagatctatatggatcaacctaatgggtttgtagttgaaggctttgcagtcaatgaggcagataaatgtgtgtactatcgccatggtgggggtgagggagttattctgtgcttgtatgttgatgacgtactgatatttgggacaaaccttgaggtgataaatgagtcccattatgtggagaagattttgaatcgttttggctacattgatagtaagccctctccaacaccttatgatcctagcttgttgcttcgcaagaacaagagaattgctaggaatcaactggaatactcacaaatcattggctcgctgatgtacctggctagtgcaactaggcttgatatctcctttgctggtttgcctcctactctgtaccgcgcgtcgctcgtagactactccatcccgctcgccggcatgcaccggcgatcgggagagcaggtctccggaacctctgccttcgacgtcctgcaccgggagaaggcggcaataaggtttttgggaagcgcttcgctcgactgctccctgttcgttcgtgacggctcggcttcctctccgctcgcgtgcttcgcgccttcgtcgacgctcgcaaccgcgagtagttcctag

SEQ ID NO: 14645 - DNA, 4575 bp, Oryza sativa
  Clone ID: TFbOSC401242j.C1.o1.fg
atggagacaaggaatggttcacgcgactcgaacaacgccagtggcagcgaagagccgatcaatggagcacgtgccaacggtgcatctgacaacagtccgtccccaccgcccgagaacccaacaattgctcaggtgttggacaatcagactcagatgatgacaatgatgatgcaacagatgcagcaacagtaccatcaggtgttgcagcaggtgcagcagcaagcacagctgcagcagcagaacctgcagtttggttctccacctcctcagtccaaactgctagaatttcttcgtgtcaagccgcccaccttctcaagcaccaccaacccaatcgaggcccacgactggcttcatgccattgagaagaagctgaatcttttgcaatgcaacgagcaggagaaggttgcttttgctacacaccagctacaaggtcccgcttctatttggtgggacaactacatggtgacccgtccaactggggcagaggttacttggacagagtttcgtcatagtttcaataaagcacaggttcccgagggaattgtgggacaaaagaagagagagttccgttccctgcaacaaggaaccagaacagttatagagtatttgcatgagttcaaccgcctcgcgcgctacgcccctgaggacgtgcgtaccgatgccgagaggcaggagaagtttttgtctggtcttgatgatgaattgactaaccagttgatctctagagattatgaggactttgagaagctggtggataaggctatccgtcaggaggagcactgtaacaaaataaaccgtaagaggaaggcagcccagttcaggactccccaggggaagagtcagaagcctcgtttcacgatgggacatcacggtggaccttccaccatgattatccggcagcaccgtccctaccacccgggtaacttcaacaagaaccaccatagtgacagtcacaacaatagtgagcagcacagcctcaaccctactccgagttcactaaagattccagctcaatcagttcagccagctctgccagaacagcccaagaggtggggagaaaaacccgaactctgcttcaattgtaacaaacccggacacacggttggaaagtgcccgaagccaagacgtgccggacccaagttcgttcaggcccgtgttaatcatgcatctgcagaggaggcgcagtcagcaccagaggttatattgggcacattccccgtcaactcgacaccggcagtaatattgtttgattctggtgcaacccattcctttatttccaagcgttttgctggtgcacatgggttatctttagtgaagcttaagataccaatgcgagttcatactcctggaggtggcatgaccacaactcactactgcccatctgtgacagttgaaattcaagggttgatttttccagccaacctcattcttctcgaatccaaggacctagatgtcatacttggaatggattggttggcaaggcacagaggagtgattgattgcgccagccgcaccatcaagttgaccaatgcaaaaggagaggtggtaatcttccagtctccagtgccgcagaagccagggattagtttaaaccaggctgctggtgaagaacaagaggtagcagtggagaaaaccactaagaagctggaggatattcccatagtcagagagtatccagaggtttttccggatgatctgacaacaatgccaccaaaaagggatatcgagttccggattgacttggtacctggaactgcaccgatccacaagaggccttacagaatgggagccaacgagttggcggaagtcaagaagcaagttgatgaacagttacagaagggatacatccgcccgagcacgtcgccttggggtgctccggttatctttgtggaaaagaaagacaaaaccaagaggatgtgcgtggactaccgcgcactcaatgaggtcactattaagaacaagtaccctttgccaaggattgatgatctgtttgatcagttgaaaggagctactgtgttctctaagatagacctgcgatcaggctatcaccagttgaggatccgcgaagaggatattccaaagacagcattcatcactcggtacgggttgttcgaatgcacagttatgtctttcggactcactaatgcacctgccttcttcatgaatttgatgaacaaggtgtttatggaatttctagacaagtttgtcgtggttttcatcgatgacatacttatctactccaagtccgaggaagaacatgagcagcatcttcggctggtacttgaaaagttaaaagagcaccagctatatgccaagttcagcaagtgcgacttctggcttaaggaagttcagtttctcggtcacatcgtgaatgctcaaggagtagctgtggatccagcaaatgtggagtcagttaccaaatggaccccaccaaggacagtcactcaggttcggagtttcttaggacttgcgggttattaccgccggttcattgagaacttctctaaaattgctaagccaatgacacagctattgaagaaggaagaaaagtttatctggtctgctgaatgcaataggagttttgaagaactcaaacgacggttggtgtctgcaccagtcttaatcctgcctgatcagacgaaagatttccaggtctattgtgatgcatctcgccaggggctaggatgtgtgttgatgcaggatggcaaagtggtttcttatgcttcacggcagttgcgtcctcatgaaggcaactacccgacgcacgatctggaattggccgcagtcgttcatgctttaaagatttggcggcactatctcatcggtaaccgttgtgaggtatatacagatcacaaaagtctaaagtacatcttcacccaacctgatctgaatctccgacaacgaagatggttggagctaatcaaagattatgatatgggaatacactatcatcccggcaaggctaatgtggtagcagatgccttgagcaggaagagttactgcaacgtcgcatgggtagaggaactatgctgtgaggttcaacatgatttggaacatttgaaccttggtatagttgagcacggattcgtggctgccctagaggcacagcccacactggtggagcaggttcgcatagctcaagcaagtgatcctgaaatagcagagctcaaaaagaacatgagggtcggaaaagcccgaggttttgttgaggatgaacaaggaacaatctggatgggagaaagattgtgtgtacccgaaaacaaggaattaaaagacctgatactaaccgaggctcatcaaactcaatattccattcatcccggtagtactaagatgtaccaagacctcaaagagaagttttggtgggtcagcatgagaagggaaatagctgaattcgtagcactctgtgacgtctgtcaacgagtaaaggcagaacaccaaaggccagcaggtttgctacagccacttcagattccagaatggaagtgggaagaaatcggaatggatttcatcaccggtttgcccaggacgtcatcggggcatgattctatttgggtagtcgttgaccgactcaccaaagtggctcatttcattccggtgcacactacctactcagggaagaaattagcagaactctatctggcaagaattatgtgtttacatggtgtacctaagaagattgtgtctgatcgaggaagccaattcacttcaaagttctggcagaaattacaagaagaattgggaacccgattgaatttcagcactgcttaccatccacaaacagatggccagaccgagcgagtcaatcaaatactagaggatatgttgagagcctgtgcgcttgactttggtggggcatgggacaaaagcttgccgtatgctgagttctcgtacaacaacagttaccaagctagtctgcagatggcaccgtttgaagcactgtatggacggaggtgtcgtactccgctcttctgggatcagacaggggaacgccagttgtttggtacagaagttttaaatgaggcagaagagaaagtcagagctgttagggaaagattgagaatcgcgcagtctcggcagaaaagctatgcagacaaccgccgaagggagctcgctttcgaaacaggggattatgtgtatctccgtgtcactccgctcagtggagtgcatcgcttccaaaccaaaggaaagttggcaccacgctttgtgggaccatatcggattttggaacgtagaggtgaagttgcttaccagctcgagcttccctccaacatgcttggcatccataatgtgttccacgtctcccagttgaagaaatgtttgagagttcctgaggaacaggcaagtccggatcaaatcgaaatccaggaagacttgacgtatgtggagaagccaactcgtatcctcgaaaccagcgagagaaagaccagaaacaaagtaataagattctgcaaggttcagtggagccaccactcagaggaagaggccacttgggaaagagaagatgagttgaaggccacccacccgcacctcttcgccagctcttccgaatctcggggtcgagattccgtttaa

SEQ ID NO: 14646 - DNA, 3690 bp, Oryza sativa
  Clone ID: TFbOSC401246j.C1.o16.fg
atgattatccggcagcaccgtccctaccacccgggtaacttcaacaagaaccaccatagtgacagtcacaacaatagtgagcagcacagcctcaaccctactccgagttcactaaagattccagctcaatcagttcagccagctctgccagaacagcccaagaggttgggagaaaaacccgaactctgcttcaattgtaacaaacccggacacacggttggaaagtgcccgaagccaagacgtgccggacccaagttcgttcaggcccgtgttaatcatgcatctgcagaggaggcgcagtcagcaccagaggttatattgggcacattccccgtcaactcgacaccggcagtaatattgtttgattctggtgcaacccattcctttatttccaagcgttttgctggtgcacatgggttatctttagtgaagcttaagataccaatgcgagttcatactcctggaggtggcatgaccacaactcactactgcccatctgtgacagttgaaattcaagggttgatttttccagccaacctcattcttctcgaatccaaggacctagatgtcatacttggaatggattggttggcaaggcacagaggagtgattgattgcgccagccgcaccatcaagttgaccaatgcaaaaggagaggtggtaatcttccagtctccagtgccgcagaagccagggattagtttaaaccaggctgctggtgaagaacaagaggtagcagtggagaaaaccactaagaagctggaggatattcccatagtcagagagtatccagaggtttttccggatgatctgacaacaatgccaccaaaaagggatatcgagttccggattgacttggtacctggaactgcaccgatccacaagaggccttacagaatgggagccaacgagttggcggaagtcaagaagcaagttgatgaacagttacagaagggatacatccgcccgagcacgtcgccttggggtgctccggttatctttgtggagaagaaagacaaaaccaagaggatgtgcgttgactaccgcgcactcaatgaggtcaccatcaagaacaagtatcctttgccaaggattgatgatctgtttgatcagttgaaaggagctactgtgttctctaagatagacctgcgatcaggctatcaccagttgaggatccgcgaagaggatattccaaagacagcattcatcactcggtacgggttgttcgaatgcacagttatgtctttcggactcactaatgcacctgccttcttcatgaatttgatgaacaaggtgtttatggaatttctagacaagtttgtcgtggttttcatcgatgacatactaatctactccaagtccgaggaagaacatgagcagcatcttcgactggtacttgaaaagttaaaagagcaccagctatatgccaagttcagcaagtgcgacttctggcttaaggaagttcagtttctcggtcacatcgtgaatgctcaaggagtagctgtggatccagcaaatgtggagtcagttaccaagtggaccccaccaaggacagtcactcaggttcggagtttcttaggacttgcgggttattaccgccggttcattgagaacttctctaaaattgctaagccaatgacacagctattgaagaaggaagaaaagtttatctggtctgctgaatgcaataggagttttgaagaactcaaacgacggttggtgtctgcaccagtcttaatcctgcctgatcagacgaaagatttccaggtctattgtgatgcatctcgccaggggctaggatgtgtgttgatgcaggatggcaaagtggtttcttatgcttcacggcagttgcgtcctcatgaaggcaactacccgacgcatgatctggaattagccgcagttgttcatgctttaaagatttggcggcactatctcatcggtaaccgttgtgaggtatatacagatcacaaaagtctaaagtacatcttcacccaacctgatctgaatctccgacaacgaagatggttggagctaatcaaagattatgatatgggaatacactatcatcccggcaaggccaatgtggtagcagatgccttgagcaggaagagttactgcaacgtcgcatgggtagaggaactatgctgtgaggttcaacatgatttggaacatttgaaccttggtatagttgagcacggattcgtggctgccctagaggcacagcccacactggtggagcaggttcgcatagctcaagcaagtgatcctgaaatagcagagctcaaaaagaacatgagggtcggaaaagcccgaggttttgttgaggatgaacaaggaacaatctggatgggagaaagattgtgtgtacccgaaaacaaggaattaaaagacctgatactaaccgaggctcatcaaactcaatattccattcatcccggtagtactaagatgtaccaagacctcaaagagaagttttggtgggtcagcatgagaagggaaatagctgaattcgtagcactctgtgacgtctgtcaacgagtaaaggcagaacaccaaaggccagcaggtttgctacagccacttcagattccagaatggaagtgggaagaaatcggaatggatttcatcaccggtttgcccaggacgtcatcggggcatgattctatttgggtagtcgttgaccgactcaccaaagtggcccacttcattccggtgcacaccacctactcagggaagaaattagcagaactctatctggcaagaattatgtgtttacatggtgtacctaagaagatcgtgtctgatcggggaagccaattcacttcaaagttctggcagaaattacaagaagaattgggaacccggttgaatttcagcaccgcttaccatccacaaacagatggccagaccgagcgagtcaatcaaatactagaggatatgttgagagcctgtgcgcttgattttggtggggcatgggacaaaagcttgccgtatgctgagttctcgtacaacaacagttaccaagctagtctgcagatggcaccatttgaagcactgtatggacggaggtgtcgtactccgctcttctgggatcagacaggggaacgccagttgtttggtacagaagttttaaatgaggcagaagagaaagtcagagctgttagggaaagattgagaatcgcgcagtctcggcagaaaagctatgcagacaaccgccgaagggagctcgctttcgaaacaggggattatgtgtatctccgtgtcactccgctcaggggagtacatcgcttccaaaccaaaggaaagttggcaccacgctttgtgggaccatatcgggttttggaacgtagaggtgaagttgcttaccagctcgagcttccctccaacatgcttggcatccataatgtgttccacgtctcccagttgaagaaatgtttgagagttcctgaggaacaggcaagtccggatcaaatcgaaatccaggaagacttgacgtatgtggagaagccaactcgtatcctcgaaaccagcgagagaaagaccagaaacaaagtaataagattctgcaaggttcagtggagccaccactcagaggaagaggccacttgggaaagagaagatgagttgaaggccacccacccgcacctcttcgccagctcttccgaatctcggggtcgagattccgtttaa

SEQ ID NO: 14647 - DNA, 5485 bp, Oryza sativa
  Clone ID: TFbOSC401339j.C1.o12.np
atgtcatggcacagggctggtgtcctgctgctaggggctcagtcctgcctacctgtcccggaggttccggccgtaggtagggttgggtcggtactcttgtctatggctaggatgggttggaaactatgtcatgtcttccgttcgtatgccgtggtgatggccgacaccctcaaccgtcgtggtctggacttgactggctttgttttagagctgcggggcttgtgcgttgtcctggggtatccgcatggagtggactaccagtgcaagaagcttccggagcaggatggtgacgatgcagagccccgcgccgcttgggaggtcaccgcggtgatcctcaccggctctcccgagaggacttctttggcaatcaccacggatggagattctttccccgccgcttgccagaacgccgcgctcctcgccatcggcactcttcaccagcgctatccggacgagctgtagcactcgccctaccgctaccaccctcgtcgaggaggagcccgcgattacgccaccttcagggatgctagctcggaggatgacgctaccatcatgtacctggcgcgcatggtggaggagtacgacgcggcccgtatcgacttccatcatatggtgcgccgcgggttggtcgagaacaacatgaagatcctggagctgcgtcaggagaatttgcagctgaagaaggacttggacgcggtggaggcacagttgtgtcagctcaagatcgcccagggagaggtctgtcgccccaagcgtcgccgcgtctgccgcagcctgaagatcactgcccacaagagtacctccaggcctgagctggttcgtcagtccttggcatggacttgcttcgtggagacccctcgcgcggagcccgcgcccttggttcctcaggaggaggaagcctctggcgttggtagcacggaggatctctctctgtttgctagttctgtgtgggattttcagatggtgacaaccaggagaagcgctgctactggtgactggtgagggcagtcatcctgaaggcagcaaccacaacaaccatggcagcccacctccacctcctccccagccaccaccaccgccacaagacaccaaccccatcctcacccaaatcctcgcccagcaagccaacatgatggttgctttcctccaccacatccagaatccgccgcaacacaatgctccacccccaccaccacccccgcagcattctaagcttgccgagttcctccgcatccgcccgcctaccttctctagctcccataaccctgttgatgctttggattggttgcatgccgtagggaaaaacttagacaccgtacagtgcaatgatgaggagaaagtcatcttcgccgctcaccaactgcaggggcccgcatctctatggtgggaccacttccaggctacgcagccagagggacagcctatcatttgggcccgtttcgccgccgccttccggaggacccatgtgcccgccggagtcatggcccttaagaagagggaatttcgggagttgaaacaaggcaactgctccgtgatggagtatttgcacgagttcaataatttggcccggtacgccccagaggatgttcgtgaagatgaggagaagcaggagaaatccctagcagggatggaccctgagctgtctatgcgtctggtctccggggactatcctgatttccagcgcctagtagacaagagcattcgcctggaagccaagcacaaggaattggagtcgcacaagcgtcgcttggcgaatttccgcaaccaacagggggctaaccaaaggatccgctacaccaatccctatccagggggatcctcctcgcagcagcagtagcaacaacctcgctccgcgccccgacctcaattcgtggtgcgcgtcctacagccacagcagcaacagaatcagcaagggacccgtgcaccccaccctcctgcaccagccgtgcagcctggacaaggccgcagggatgctcaaggtcaacagcgtctgtgcttcaactgcttcgagcacgggcactttgcggataaatgcccaaagccgaggcgccaacaaggtcaagcgcctccccgccccaacaacggtggtaaggatgtcactcggggccgtgtgaaccacgtgactgccgaggatatgctgacaactccagacgtcatcgttggtacgttcctcattcattccatccctgctaccattttgttcgactctggagcttcccactcatttatatctgtgccattcgtggggagaaatcagctgggggtagaaaggcttaggaaccctctgctcatcaccacccctggaggggttatgacagcaaagtattatagccctgccgttcctatagaaatccagggaattcctttcccctcggatttgattcttctagacaccaagaacttggatgtgatcctcgggatgaattggttggctcaattccaaggagtagtggattgcgcaaggcgcactgtcactctgtatcggggccctgatcaaccggttgttttctttgcacccccaacttccgccggcagttcagtacttcatcagctaggattgccagaaatacccatcgtcagtgagttcggagatgtgtttccggaagaactacccggtatgccgcccaagcgagagattgagttccggatagatcttgctccaggaaccactcctctgtacaagcgaccctaccatatggcagcaaatgaactggccgaagttaagagacagttggaagagttgaaagaaaaggggtatatacggccgagcacttccccctggggtgctcccgtgatttttgtggagaagaaagacaagacaaagagaatgtgtgttgactacagagctctcaatgaagttactatcaaaaacaagtaccctcttccccggatcgatgatctgttcgatcagcttaaaggtgccactgtattctccaagattgatcttcgttccggatatcaccagttgcgcatccgtgaagaagatatcccgaagaccgcattcaccacgcgatacggactgtatgaattcatggtaatgtcattcggtctaaccaatgctcctgccttcttcatgaacttaatgaacaaagtgttcatggaatacctggataagtttgttgtggtctttattgacgacatactggtgtactcacaatcagaggcagaccatcagcagcatctccgtttagtgttgggaaagctccgggagcaccaattgtatgccaagctcagcaagtgtgagttctgattgtccgaagtcaagttcttagggcacgtgatatctgctaaaggagttgctgtggatcccgaaacggtgaccgccgtcactgattggaagcaacccaagacagtcactcaggttcgcagctttttgggtttggcaggatactaccaaagattcatcgagaatttctccaaaattgccagacccatgacgcagttgctgaagaaggaagaaaaatttgtgtggagccctcaatgcgagaaagcattccaaactctcaaagaaaagctggtttcctcgccagtgttaatcttaccggatactcgcaaggaattcctggtgtactgtgacgcttcacgccaaggattggggtgcgtgttaatgcaggaaggtcatgtggtagcctatgcctcacgccagctacggccccatgaaggcaactaccctacccatgatttggagttggccgctgtggttcatgctctaaaaatctggcggcattatctcattggaaatcgctgcgaaatatataccgatcataagagtttgaaatacatcttcactcagtcggatctgaatcttcggcagagaagatggttagagctcatcaaggattatgatgtgggaatccactatcacccttgtaaggccaacgtggtcgcagacgcgctgagtcgaaaaagccgttgcaacactcttggcgtccgtggcattccacctgagcttaatcaatagttggaagccctgaacctaagcatcgttagccatggattcttggctacactggaagccaagcctaccttgctcgatcaaatccgcgaggctcagaagaatgatccagatatgcatgggatcctcaagaatatgaaacagggtaaagccgttggtttcatagaagatgaacacggaaccctatggaacggaaatcgtgtatgcgttccaaacgacaaggaacttaaacagttgatacttcaggaagctcacgaaagtccttattccatccaccctggcagcacgaagatgtacttagacttgaaagagaaatactggtgggttagtatgaagcgggaaattgcagagttcgtggccctttgtgatgtgtgccagcgtgtcaaagcaaagcaccaacgaccggccggacttctccaacctctccaagtaccagaatggaaatgggatgaaattgggatggatttcatcaccggagttccaaaaagccaagatggatatgattctatatgggtagtcgtggatcgactaaccaaggtggctcggtttattcctgtgaagaccacctatggagggaacaaattaactgaagtctacttcgctaggatcgtgagtctccatggcgtccctaagaaaattgtatctgataggggaagtcaattcacctctcacttctggaagaagctccaagaagagttgggtacccgattaaatttcagcaccgcgtatcacccgcaaaccgatggacagaccgagcgtctaaatcagatcctagaagatatgctccgtgcctgtgttctagattttgggaagacctgggataagagtctcccctatgccgagttctcctacaataacagctaccaatccagcatacaaatggcaccttatgaagcgttgtatggccgcaaatgccggacaccactattgtgggaccaagttggggaaagccaagtgttcgggacggatatcctgagagaagttgaagctaaagtcagaaccattcgggataatctaaaggtggcacagtcccggcagaagagttatgcagataaccgacgccgtaacctggaattcgcagtggatgattttgtgtaccttcgggtcacgccattgcggggtgtacacaggttccagacgaaagggaacctcgcacctaggtttgtgggtcctttccgcatcattgctcgacgcggagaagtcgcttaccagttggagctgcccgcatccttgggcaatgtgcatgatgtgttccatgtgtcgcaactcaagaaatgtcttcgagtgccgtccgagcaggccgattcagagcaaattgaagttcgcgaagacttgacctatgtagagaagccggtgaaggttctggacaccatggagcgcaggactaggaaccgggtaatccgtttttgcaaggtccaatggagcaaccacgccgaggaagaagctacctgggaacgtgaagacaagctgaaggcagcctatcccgatctcttcgccagttcttccgaatctcagggtcgagattccgtt

SEQ ID NO: 14648 - DNA, 4578 bp, Oryza sativa
  Clone ID: TFbOSC401513j.C1.o9.fg
atggagacaaggaatggttcacgcgactcgaacaacgccagtggcagcgaagagccgatcaatggagcacgtgccaacggtgcatctgacaacagtccgtccccaccgcccgagaacccaacaattgctcaggtgttggacaatcagactcagatgatgacaatgatgatgcaacagatgcagcaacagtaccatcaggtgttgcagcaggtgcagcagcaagcacagctgcagcagcagaacctgcagtttggttctccacctcctcagtccaaactgctagaatttcttcgtgtcaagccgcccaccttctcaagcaccaccaacccaatcgaggcccacgactggcttcatgccattgagaagaagctgaatcttttgcaatgcaacgagcaagagaaggttgcttttgctacacaccagctacaaggtcccgcttctatttggtgggacaactacatggtgacccgtccaactggggcagaggttacttggacagagtttcgtcatagtttcaataaagcacaggttcccgagggaattgtggcacaaaagaagagagagttccgttccctgcaacaaggaaccagaacagttatagagtatttgcatgagttcaaccgcctcgcgcgctacgcccctgaggacgtgcgtaccgatgccgagaggcaggagaagtttctgtcgggtcttgatgatgaattgaccaaccagttgatctctagagattatgaggactttgagaagcttgtggacaaggctatccgtcaagaggagcagtgtaacaaaatgaaccgtaagaggaaggcagcccagttcaggactccccaggggaagtgtcagaagcctcgtttcacgatgggacatcagggtggaccttccaccatgattatccggcagcaccgtccctaccacccgggtaatttcaacaagaacaacaacagtggcagtcacagcagcctcaacccgactccaagtccattaatgattccagctcagtcagatcagtcagatcagctagctcagccagctctgccagaacagcccaagaggttgggagaaaaacccgaactctgcttcaattgtaacaaacccggacacacggttggaaagtgcccgaagccaagacgtgccggacccaagttcgttcaggcccgtgttaatcatgcatctgcagaggaggcgcagtcagcaccagaggttatattgggcacattccccgtcaactcgacaccggcagtaatattgtttgattctggtgcaacccattcctttatttccaagcgttttgctggtgcacatgggttatctttagtgaagcttaagataccaatgcgagttcatactcctggaggtggcatgaccacaactcactactgcccatctgtgacagttgaaattcaagggttgatttttccagccaacctcattcttctcgaatccaaggacctagatgtcatacttggaatggattggttgacaaggcacagaggagtgattgattgcgccagccgcaccatcaagttgaccaatgcaaaaggagaggtggtaaccttccagtctcaagtgccgcagaagccagggattagtttaaaccaggctgctggtgaagaacaagaggtagcagtggagaaaaccactaagaaactagaggatattcctatagtcagagagtatccagaggtttttccggacgatctgacaacaatgccaccaaaaagggatatcgagttccggattgacttggtacctggaactgcaccgatccacaagaggccttacagaatgggagccaacgagttggcggaagtcaagaagcaagttgatgaacagttacagaagggatacatccgcccgagcacgtcgccttggggtgctccggttatctttgtggaaaagaaagacaaaaccaagaggatgtgcgtggactaccgcgcactcaatgaggtcactattaagaacaagtaccctttgccaaggattgatgatctgttcgatcagctgaaaggagctactgtgttctctaagatagaccttcggtcaggctatcaccagttgaggatccgcgaagaggatattccaaagacagcattcatcactcggtacgggttgttcgaatgcacagttatgtctttcggactcactaacgcacctgccttcttcatgaatttgatgaacaaggtgtttatggaatttctagacaagtttgtcgtggttttcatcgatgacatacttatctactccaagtccgaggaagaacatgagcagcatcttcggctggtacttgaaaagttaaaagagcaccagctatatgccaagttcagcaagtgcgacttctggcttaaggaagttcagtttctcggtcacatcgtgaatgctcaaggagtagctgtggatccagcaaatgtggagtcagttaccaagtggaccccacaaaggacagtcactcaggttcggagtttcttaggacttgcgggttattaccgccggttcattgagaacttctctaaaattgctaagccaatgacacagctattgaagaaggaagaaaagtttatctggtctgctgaatgcaataggagttttgaagaactcaaacgacggttggtgtctgcaccagtcttaatcctgcctgatcagacgaaagattttcaggtctattgtgatgcatctcgccaggggctaggatgtgtgttgatgcaggatggcaaagtggtttcttatgcttcacggcagttgcgtcctcatgaaggcaactacccgacgcatgatctggaattagccgcagttgttcatgctttaaagatttggcggcactatctcatcggtaaccgttgtgaggtatatacagatcacaaaagtctaaagtacatcttcacccaacctgatctgaatctccgacagcgaagatggttggagctaattaaagattatgatatgggaatacattatcatcccggcaaggctaatgtggttgcggatgccttgagcaggaagagctactgcaatgttgcatgggtagagcaactatgttgtgaggttcaacgcgatttggaacatctgaaccttggtatagttgagcacggattcgtggctgccctagaggcacaacccacactggtggagcaggttcgcatagctcaggcaagtgatcctgaaatagcagagctcaaaaagaacatgagggttggaaaagcccgaggttttgttgaggatgaacaaggaacaatctggatgggagaaagattgtgtgtacccgaaaacaaggaattaaaagacctgatactaaccgaggctcatcaaactcaatattccattcatcccggtagtactaagatgtaccaagacctcaaagagaagttttggtgggtcagcatgagaagggaaatagctgaattcgtagcactctgtgacgtctgtcaacgagtaaaggcagaacaccaaaggccagcaggtttgctacagccacttcagattccagaatggaagtgggaagaaatcggaatggatttcatcaccggtttgcccaggacatcatcggggcatgattctatttgggtagtcgttgaccgactcaccaaagtggctcacttcattccggtgcacactacctactcagggaagaaattagcagaactctatctggcaagaattatgtgtttacatggtgtacctaagaagatcgtgtctgatcgaggaagccaattcacttcaaagttctggcagaaattacaagaagaattaggaacccggttgaatttcagcaccgcttaccatccacaaacagatggccagaccgagcgagtcaatcaaatactagatgatatgttgagagcctgtgcgcttgactttggtggggcatgggacaaaagcttgccgtatgctgagttctcgtacaacaacagttaccaagctagtctgcagatggcaccgtttgaagcactgtatggacggaggtgtcgtactccgctcttctgggatcagacaggggaacgccagttgtttggtacagaagttttaaatgaggcagaagagaaagtcagagctgttagggaaagattgagaatcgcgcagtctcggcagaaaagctatgcagacaaccgccgaagggagctcgctttcgaaacaggggattatgtgtatctccgtgtcactccgctcaggggagtacatcgcttccaaaccaaaggaaagttggcaccacgctttgtgggaccatatcggattttggaacgtagaggtgaagttgcttaccagctcgagcttccctccaacatgcttggcatccataatgtgttccacgtctcccagttgaagaaatgtttgagagttcctgaggaacgggcaagtccggatcaaatcgaaatccaggaagacttgacgtatgtggagaagccaactcgtatcctcgaaaccagcgagagaaagaccagaaacaaagtaataagattctgcaaggttcagtggagccaccactcagaggaagaggccacttgggaaagagaagatgagttgaaggccacccacccgcacctcttcgccagctcttccgaatctcggggtcgagattccgtttaa

SEQ ID NO: 14649 - DNA, 4662 bp, Oryza sativa
  Clone ID: TFbOSC401564j.C1.o13.fg
atggcagttaaggaccggttcacgggaaaccctgggagacttaccgtgcttaccacaagcgggagtggctgttttactgctttcaactactgctttgaaatgcctgctttatgcaaaagaacccctagcttcctttggttatatcctgcatcatacctcctcttccggtttgttgcttgtgggttagtcagcggtcgatatcatgtgtcagtgatggggacaaggaatggttcacgcaactccaacaacgccagtggcagcgaagagccgatcaatggagcacgtgccaacggtgcatctgacaacagtccgtccccaccgcccgagaacccaacaattgctcaggtgttggacaatcagactcagatgatgacaatgatgatgcaacagatgcagcaacagtacaatcaggtgttgcaacaggtgcagcagcaagcacagcagcagcaacagaacctgcagtttggtcctccacctcctcagtccaaactgttagaatttcttcgtgtcaagccacccactttctcaagcaccaccaacccaatcgaggcccacgactggcttcatgccattgagaagaagctgaatcttttgcaatgcaacgagcaagagaaggttcccgagggaattgtggcacaaaagaagagagagttccgttccctgcaacaaggaaccagaacagttatagagtatttgcatgagttcaaccgcctcgcacgctacgcccctgaggacgtgcgtaccgatgacaggaggcaggagaagtttctgtccggtcttgatgatgaattgactaaccagttgatctctagagattatgaggactttgagaagctggtgaataaggctatccgtcaggaggagcactgtaacaaaataaaccgtaagaggaaggcagctcagttcaggactccccaggggaagagtcagaagcctcgtttcacgatgggacatcacggtggaccttccaccatgattatccgacagcaccgtccctaccacccgggtagcttcaacaagaaccaccatagtggcagtcacaacaacagtgagcagcacagcctcaaccctactccgagttcactaaagattccagcccaatcagttcagccagctctgccagaacagcccaagaggttgggagaaaaacccgaactctgcttcaattgtaacaaacccggacacacggttggaaagtgcccgaagccaagacgtgctggacccaagttcgttcaggcccgtgttaatcatgcatctgcagaggaggcgcagtcagcaccagaggttatattgggcacattccccgtcaactcgacaccggcagtaatattgtttgattctggtgcaacccattccttcatttccaagtgttttgctggtgcacatgggttatctttagtgaagcttaagataccaatgcgagttcatactcctggaggtggcatgaccacaactcactactgcccatctgtgacagttgaaattcaagggttgatttttccagcccacctcattcttctcgaatccaaggatctagatgtcatacttggaatggattggttgacaaggcacagaggagtgattgattgcgccagccgcaccatcaagttgaccaatgcaaaaggagaggtggtaaccttccagtctccagtgccgcagaagccagggatcagtttaaaccaggctgctggtgaagaacaagaggtagcagtggagaaaaccactaagaagctggaggatattcccatagtcagagagtatccagaggtttttccggacgatctgacaacaatgccaccaaaaagggatatcgagttccggattgacttggtacctggaactgcaccgatccacaagaggccttacagaatgggagccaacgagttggcggaagtcaagaagcaagtcgatgaacagttacagaagggatacatccgcccgagcacgtcgccttggggtgctccagttatctttgtggagaagaaagacaaaaccaagagaatgtgcgttgactaccgcgcactcaatgaggtcaccatcaaaaacaagtatcctttgccaaggattgatgatctgtttgatcagttgaaaggagctactgtgttctctaagatagacctgcgatcaggctatcaccagttgaggatccgcgaagaggatattccaaagacagcattcatcactcggtacgggttgttcgaatgcacagttatgtctttcggactcactaatgcacctgccttcttcatgaatttgatgaacaaggtgtttatggaatttctagataagtttgtcgtggttttcatcgatgacatacttatctactctaagtccgaggaagaacatgagcagcatctccggctggtacttgaaaagttaaaagagcaccagctatatgccaagttcagcaagtgcgacttctggcttaaggaagttcagtttctcgggcacatcgtgaatgctcaaggagtagctgtggatccagcaaatgtggagtcagttaccaaatggaccccaccaaggacagtcactcaggttcggagtttcttaggacttgcgggctattaccgccggttcattgagaacttctctaaaattgctaagccaatgacacagctattgaagaaggaagaaaagtttatctggtctgctgaatgcaataggagttttgaagaactcaaacgacggttggtgtctgcaccagtcttaatcctgcctgatcagacgaaagatttccaggtctattgtgatgcatctcgccaggggctaggatgtgtgttgatgcaggatggcaaagtggtttcttatgcttcacggcagttgcgtcctcatgaaggcaactacccaacgcatgatctggaattggccgcagttgttcatgctttaaagatttggcggcactatctcatcggtaaccattgtgaggtatatacagatcacaaaagtctaaagtacatcttcactcaacctgatttgaatctcagacagcgaagatggttggagctgatcaaggattatgatatgggaatacattatcatcctggcaaggctaatgtggttgcagatgcctcgagcaggaagagctactgcaatgttgcatgggtagagcaactatgttgtgaggttcaacgcaatttggaacatctgaaccttggtatagttgagcacggattcgtggttgccctagaggcacagcccacactggtggagcaggttcgcatagctcaagcaagtgatcctgaaatagcagagctcaaaaagaacatgagagttggaaaagcccgaggttttgttgaggatgaacaaggaacaatctggatgggagaaagattgtgtgtacccgaaaacaaggaattaaaagacctgatactaaccgaggctcatcaaactcaatattccattcatcccggtagtactaagatgtaccaagacctcaaagagaagttttggtggatcagcatgagaagggaaatagctgaattcgtagcactctgtgacgtctgtcaacgagtaaaggcagaacaccaaaggccagcaggtttgctacagccacttcagattctagaatggaagtgggaagaaatcggaatggatttcatcaccggtttgcccaggacgtcattggggcatgattctatttgggtagtcgttgaccgactcaccaaagtggctcacttcattccggtgcacactacctactcagggaagaaattagcagaactctatctggcaagaattatgtgtttacatggtgtacctaagaagatcgtgtctgatcgaggaagccaattcacttcaaagttctggcagaaattacaagaagaattgggaacccggttgaatttcagcactgcttaccatccacaaacagatggccagaccgagcgagtcaatcaaatactagaggatatgttgagagcctgtgcgcttgactttggtggagcatgggacaaaagcttgccgtatgctgagttctcgtacaacaacagttaccaagctagtctgcagatggcaccgtttgaagcactgtatggacgaaggtgtcgtactccgctcttctgggatcagacaggggaacgccaattgtttggtacagaagttttaaatgaggcagaagagaaagtcagagctgtcagggaaagattgagaattgcgcaatctcggcagaaaagctatgcagacaaccgccgaagggagctcgctttcgaaacaagggattatgtgtatctccgtgtcactccgctcaggggagtacatcgcttccaaaccaaaggaaagttggcaccacgctttgtgggaccatacaggatcttggaacgtagaggtgaagttgcttaccagcttgagcttccctccaacatgcttggcatccacaacgtgttccacgtctctcagttgaagaaatgtttgagagttcctgaggaacaggcaagtccggatcacatcgaaattcaggaagatctgacgtatgtggagaagccgactcgtatcctcgaaaccagcgagagaaagaccagaaacaaagtaatcagattctgcaaagttcagtggagtcatcactcagaagaagaggccacttgggaaagagaagatgagttgaaggccacccacccgcacctcttcgccagctcttccgaatctcgaggtcgagattccgtttaa

SEQ ID NO: 14650 - DNA, 6120 bp, Oryza sativa
  Clone ID: TFbOSC401577j.C1.o9.gm
atggagacaaggaatggttcacgcgactccaacaacgccagtggcagcgaagagccgatcaatggagcacgtgccaacagtgcatctgacaacagtccgtccccaccgcccgagaacccaacaattgctcaggtgttggacaatcagactcagatgatgacaatgatgatgcaacagatgcagcaacagtaccatcaagtgttgcagcaggtgcagcagcaagcacagcagcagcagcagaacctgcagtttggtcctccacctcctcagtccaaactgttagaatttcttcgtgtcaagccgcccactttctcaagcaccaccaacccaatcgaggcccacgactggcttcatgccattgagaagaagctgaatcttttgcaatgcaacgagcaagagaaggttcccgagggaattgtggcacaaaagaagagagagttccgttccctgcaacaaggaactagaacagttatagagtatttgcatgagttcaaccgcctcgcgcgctacgcccctgaggacgtgcgtaccgatgacgggaggcaggagaagtttctgtctggtcttgatgatgaattgactaaccagttgatctctaaagattatgaggactttgagaagctggtggataaggctatccgtcaggaggagcactgtaacaaaataaaccgtaagaggaaggcagctcagttcaggactccccaggggaagagtcagaagcctcgtttcacgatgggacgtcacggtggaccttccaccatgattatccggcagcaccgtccctaccacccgggtagcttcaacgagaaccaccatagtggcagtcacaacaacagtgagcagcatagcctcaaccctactccgagttcactaaagattccagctcaatcagttcagctagctctgccagaacagcccaagaggttgggagaaaaacccgaactctgcttcaattgtaacaaacccggacacacggttggaaagtgcccaaagccaagatgtgctggacccaagttcgttcaggcctgtgtcaatcatgcatctgcagaggaggcgcagtcagcaccagaggttatattgggcacattccccgtcaactcgacaccggcagtaatattgtttgattctggtgcaacccattccttcatttccaagcgttttgctggtgcacatgggttatctttagtgaagcttaagataccaatgcgagttcatactcctggaggtggcatgaccacaactcactactgcccatctgtgacagttgaaattcaagggttgatttttccaaccaacctcattcttctcgaatccaaggacctggatgtcatacttggaatggattggttgacaaggcacagaggagtgattgattgcgccagccgcaccatcaagttaaccaatgcaaaaggagaggtggtaaccttccagtctccagtgccgcagaagccagggatcagtttaaaccaggctgctggtgaagaacaagaggtagcagtggagaaaaccactaagaagctggaggatattcccatagtcagagagtatccagaggtttttccggacgatctgacaacaatgccaccaaaaagggataccgagttccggattgacttggtacctggaactgcaccgatccacaagaggccttacagaatgggagccaacgagttggcggaagtcaagaagcaagtcgatgaacagttacagaagggatacattcgcccgagcacgtcgccttggggtgctccggttatctttgtggagaagaaagacaaaaccaagaggatgtgcgttgactaccgcgcactcaatgaggtcaccatcaagaacaagtatcctttgccaaggattgatgatctgtttgatcagttgaaaggagctactgtgttctctaagatagacctgcgatcaggctatcaccagttgaggatccgcgaagaggatattccaaagacaacattcatcactcggtacgggttgttcgaatgcacagttatgtctttcggactcactaatgcacctgtcttcttcatgaatttgatgaacaaggtgtttatggaatttctagacaagtttgtcgtggtttttatcgatgacatacttatctactccaagtccgaggaagaacatgagcagcatctctggctggtacttgaaaagttaaaagagcaccagctatatgccaagttcagcaagtgcgacttctggcttaaggaagttcagtttctcggtcacatcgtgaatgctcaaggagtagctgtggatccagcaaatatggagtcagttaccaaatggaccccaccaaggacagtcactcaggttcggagtttcttaggacttgcgggctattaccgccggttcattgagaacttctctaaaattgctaagccaatgacagctattgaagaaggaagaaaagtttatctggatggcaaagtggtctcttatgcttcacggcagttgcgtcctcatgaaggcaactacccgacgcatgatctggaattggccgcagttgttcatgctttaaagatttggcggcactatctcatcggtaaccgttgtgaggtatatacatatcacaaaagtctaaagtacatcttcactcaacctgatttgaatctcagacagcgaagatggttggagctgatcaaggattatgatatgagaatacattatcatcccggcaaggctaacgtggttgcagatgccttgagcaggaagagctactgcaatgttgcatgggtagagcaactatgttgtgaggttcaacgcgatttggaacatctgaaccttggtatagttgagcacggattcgtggttgccctagaggcacagcccacactggtggagcaggttcgcatagctcaagcaagtaatcctgaaatagcagagctcaaaaagaacatgagagttggaaaagcccgaggttttgttgaggatgaacaaggaacaatctggatgggagaaagattgtgtgtacccgaaaacaaggaattaaaagacctgatactaaccgaggctcatcaaactcagtattccattcatcccggtagtactaagatgtaccaagacctcaaagagaagttctggtgggtcagcatgagaagggaaatagctgaattcgtagcactctgtgacgtctgtcaacgagtaaaggcagaacaccaaaggccagcagaagttttaaatgaggcagaagagaaagtcagagctatcagggaaagattgagaatcgcgcaatctcggcagaaaagctatgcagacaaccgccgaagggagctcgctttcgaaacaggggattatgtgatcttggaacgtagaggtgaagttgcttaccagcttgagcttccctccaacatgcttggcatccacaacgtgttccatgtctctcagttaaagaaatgtttgagagttcctgaggaacaggcaagtccggatcacatcgaaattcaggaagatctgacgcagcctgtagtgaattgtgatgtgtatgcaatttgtggacctttcacaatctgcaatgacaataaggatccgttctgcgactgtatgaaaggctactccataagatcaccgaaggactgggagcttgatgatcgaacaggagggtgcatgaggaatactcctttaagttgtggtgctggtaaggacaggacaggtctcacagataagttctaccctgtgcaaagcattaggttgcctcacaatgcagaaaatttgcaggctcctaccagtcgagaagaatgctcacagcaattatctgatgcttctccaaatggggatgagggggttctttacattcgacttgctgcaaaagagttgcaaaattcacaaaggaagatgagtggaaaaataattggtgttgccattgattttggaatggcgaagatgttggggagagaatttagtcgtgctatgactacaatgagaggaacaattggatacatagctcctgaatggattagtggaacagttgttacatccaaagtagatgtttatagctacgggatggttttgtttgaaatcatatcaggaaggaggaaccgaagtcatgaacatttcatggatggtgattattccttctactttcccatgcaagttgcacgcaagcttctcaaaggagagattggatgtcttgtggatgccaatttggaaggtgatgttaacctcatggaggttgaaagagcttgcaaaattgcatgttggtgcattcaagatcacgaatttgatcggccaacaatggccgaggtggtacagtcccttgaagacagggataagccaattgatgatcccacagcagtggagctaacaatctccaggatgaacgtgcgagtgatacacagagctgagtggggaggattgagagataggttagctaatcacaacacggggcacgttttccttctccaccactcttcccccgtgttcatcttctgcttccccatgcttctcccttgtcatgtccttcttggcctcctgctcctctccctgcacactccggcgagctccgccgccgccacggataccgtgtcacccggccattcacttgccggcagtgacaggcttgtctccaataacagtaagttcgccctcggcttcttcaagccaggtaatgagtcctcctacaccaaccacaactcctaccttggcatatggttcaacaaggtctccaagctaaccccgttgtggaccgccaatggcgagaatccagtggtggaccccacttcaccggagctcgcaatctccggtgatggaaacctggccatcctggatcatgccaccaaatccatcatatggtctacccgtgccaacatcacaaccaatgacaccattgccgtgcttctgaacaatggcaaccttgtcctacgaagctcctcaaactcatccaacattttctggcagagcttcgactacccaacagatacacttttcgctggtgcaaagattggctgggacaaggtcaccggcatgaaccgccgtcttgtttccaggaaaagttcggttgatcaggctcctggtatattttccttggagttagggctcaatggggagggtcatctgctatggaactcaactgtggcgtattggtccagtggggactggaacggtcgatacttcggcctagcgccagagatgataggcgatgtcatgccaaatttcacatttgtccacaatgacaaagaggcctacttcacatacaccttgtatgatgacacggctatcgtgcacgctggactagatgtctttgggataggttttgtgggtatgtggttggaaggaaaccaagaatggttcaagaattacaggcagcctgtagttcactgtgatgtgtatgcagtttgtggacctttcacaatctgtgacgacaataaggatctgttctgtgactgtatgaagggcttctccgtaagatcaccgaaggattgggagcttgacgatcaaacaggaggttgcatcaggaatactccattaagttgtggaagtagcaaggacaggacaagcctcacagataagttctaccctatgcaaaattttggaatggcaaagattttggggagggaatttagccgtgcaatgacaacaatgagaggaactattggatatatggctcctgaatggattagtggaacagttgttacatcaaaagtagatgtttacagctatggaatggttttgtttgagatcatatcaggaaggaggaactcaagtcatgaatgtttcagggatggtgattattcattcttttttcccatgcaagttgcacgcaaacttctcaatggagacatcggaagtcttgtggatgccagtttgaaaggtgacatgaacctagtggaggttgaaagagcttgcaaaattgcatgttggtgcattcaagacaacgaatttgatcgaccaacaatggctgaggtggtacaggcccttgagggtctacttgaactcgacatgcctccattgccaagactactaagtgctatcacaggagactcacattcagtgacaccacaatattttgattcagtgcccatcgtcttcatcaccgtggccgaagaagcccaccacagcccacctaacttacggacaacgggacaatgccgcgacaggtccagcgatacataa

SEQ ID NO: 14651 - DNA, 4545 bp, Oryza sativa
  Clone ID: TFbOSC401766j.C1.o14.fg
atggagataaggaatggttcacgcgactcgaacaacgccagtggcagcgaagagctgatcaatggagcatgtgccaacagtgcatctgacaacagtccgtccccaccgcccgagaacccaacaattgctcaggtgttggacaatcagactcagatgatgacagtgatgatgcaacagatgcagcaacagtaccatcaggtgttgcaacaggtgcagcagcaagcacagcagcagcagcagaacctgcagtttggtcctccacctcctcagtccaaactgttagaatttcttcgtgtcaagccgcccactttctcaagcaccaccaacccaatcgaggcccacgactggcttcatgccattgagaagaagctgaatcttttgcaatgcaacgagcaagagaaggttgcttttgctacacaccagctgcaaggtcccgcttctgtttggtgggacaactacatggtgacccgtccaactggggcagaagttacttggacagagttttgtcatagtttcaataaagcacaggttcccgagggaattgtggcacaaaagaagagagagttccgttccctgcaacaaggaaccagaacagttatagagtatttgcatgagttcaaccgcctcgcacgctacgcccctgaggacgtgcgtaccgatgacgggaggcgtgagaagtttctgtctggtcttgatgatgaattgactaaccagttgatctctagagattatgaggactttgagaagctggtggataaggctatccgtcaggaggagcactgtaacaaaataaaccgtaagaggaagacagctcagttcaggactccccaggggaagagtcagaagcctcgtttcacgatgggacatcacggtggaccttccaccatgattatccggcagcaccgtccctaccacccgggtagcttcaacaagaaccaccatagtggcagtcacaacaacagtgagcagcacagcctcaaccctactccgagttcactaaagattccagcccaatcagttcagccagctctgccagaacagcccaagaggttgggagaaaaacccgaactctgcttcaattgtaacaaacccggacacacggttggaaagtgcccgaagccaagacgtgctggacccaagttcgttcaggcccgtgttactcatgcatctgcagaggaggcgcagtcagccccagaggttatattgggcacattccccgtcaactcgacaccggcagtaatattgtttgattctggtgcaacccattccttcatttccaagcgttttgctggtgcacatgggttatctttagtgaagcttaagataccaatgcgagttcatactcctggaggtggcatgaccacaactcactactgcccatctgtgacagttgaaattcaagggttgatttttccagccaacctcattcttctcgaatccaaggacctagatgtcatacttggaatggattggttgacaaggcacagaggagtgattgattgcgccagccgcaccatcaagttgaccaatgcaaaaggagaggtggtaaccttccagtctctagtgccgcagaagccagggatcagtttaaaccaggctgctggtgaagaacaagaggtagcagtggagaaaaccactaagaagctggaggatattcccatagttagagagtatccaaaggtttttccggacgatctgacaacaatgccaccaaaaagggatatcgagttccggattgacttggtacctggaactgcaccgatccacaagaggccttacagaatgggagccaacgagttggcggaagtcaagaagcaagtcgatgaacagttacagaagggatacatccacccgagcacgtcgccttggggtgctccggttatctttgtggagaagaaagacaaaaccaagaggatgtgcgttgactaccgcgcattcaatgaggtcaccatcaagaacaagtatcctttgccaaggattgatgatctgtttgatcagttgaaaggagctactgtgttctctaagatagacctgcgatcaggctatcaccagttgaggatccacgaagaggatattccaaagacagcattcatcactcggtacgggttgttcgaatgcacagttatgtctttcggactcactaatacacctgccttcttcatgaatttgatgaacaaggtgtttatgaaatttctagacaagtttgtcgtggttttcatcgatgacatacttatctactccaagtccgaggaagaacatgagcagcatcttcggctggtacttgaaaagttaaaagagcaccagctatatgccaagttcagcaagtgcgacttctggcttaaggaagttcagtttctcggtcacatcgtgaatgctcaaggagtagctatggatccagcaaatgtggagtcagttaccaaatggaccccaccaaggacagtcactcaggttcggagtttcttaggacttgcgggctattaccgccggttcattgagaacttctctaaaattgctaagccaatgacacagctattgaagaaggaagaaaagtttatctggtctgctaaatgcaataggagttttgaagaactcaaacgacggttggtgtctgcaccagtcttaatcctgcctgatcagacgaaagatttccaggtctattgtgatgcatctcgccaggggctaggatgtgtgttgatgcaggatggcaaagtggtttcttatgcttcacggcagttgcgtcctcatgaaggcaactacccgacgcatgatctggaattggccgcagttgttcatgctttaaagatttggcggcactatctcatcggtaaccgttgtgaggtatatacagatcacaaaagtctaaaatacatcttcactcaacctgatttgaatctcagacagcgaagatggttggagctgatcaaggattatgatatgggaatacattatcatcccggcaaggctaatgtggttgcagatgccttgagcaggaagagctactgcaatgttgcatgggtagagcaactatgttgtgaggttcaacgcgatttggaacatctgaaccttggtatagttgagcacggattcgtggttgccctagaggcacagcccacactggtggagcaggttcgcatagctcaagcaagtgatcctgaagtagcagagctcaaaaagaacatgagagttggaaaagcccgaggttttgttgaggatgaacaaggaacaatctggatgggagaaagattgtgtgtacccgaaaacaaggaattaaaagacctgatactaaccgaggctcatcaaactcagtattccattctttccggtagtactaagatgtaccaagacctcaaagagaagttctggtgggttagcatgagaagggaaatagctgaattcgtagcactctgtgacgtctgtcaacgagtaaaggcagaacaccaaaggccagcaggtttgctacagccacttcagattccagaatggaagtgggaagaaatcggaatggatttcatcaccggtttgcccaggacgtcatcggggcatgattctatttgggtagtcgttgaccgactcaccaaagtggctcacttcattccagtgcacactacctactcagggaagaaattagcagaactctatctggcaagaattatgtgtttacatggtgtacctaagaagatcgtgtctgatcgaggaagccaattcacttcaaagttctggcagaaattacaagaagaattgggaacccggttgaatttcagtactgcttaccatccacaaacagatggccagaccgagcgagtcaatcaaatactagaggatatgttgagagcctgtgcgcttgactttggtggagcatgggacaaaagcttgccgtatgctgagttctcttacaacaacagttaccaagctagtctgcagatggcaccgtttgaagcactgtatggacgaaggtgtcgtactccgctcttctgggatcagacaggggaacgccaattgtttggtacagaagttttaaatgaggcagaagaaaaagtcagagctgttagggaaagattgagaattgcgcaatctcggcagaaaagctatgcagacaaccgccgaagggagctcgctttcgaaacaggggattatgtgtatctccgtgtcactccgctcaggggagtacatcgcttccaaaccaaaggaaagttggcaccacgctttgtgggaccatacaggatcttggaacgtagaggtgaagttgcttaccagcttgagcttccctccaacatgcttggcatccacaacgtgttccacgtctctcagttgaagaaatgtttgagagttcctgaggaacaggcaagtccggatcacatcgaaattcaggaagatctgacgtatgtggagaagccgactcgtatcctcgaaaccagtgagagaaggaccagaaacaaagtaatcagattctgcaaagttcagtggagtcatcactcagaagaagaggccacccacccgcacctcttcgccagctcttccgaatctcgaggtcgagattccgtttaa

SEQ ID NO: 14652 - DNA, 3717 bp, Oryza sativa
  Clone ID: TFbOSC401774j.C1.o5.fg
atgggacgtcacggtggaccttccaccatgattatccggcagcaccgtccctaccacccgggtagcttcaacaagaaccaccatagtggcagtcacaacaacagtgagcagcacagcctcaaccctactccgagttcactaaagattccagctcaatcagttcagccagctctgccagaacagcccaagaggttgggagaaaaacccgaactctgcttcaattgtaacaaacccggacacacggttggaaagtgcccgaagccaagatgtgctggacccaagttcgttcaggcccgtgtcaatcatgcatctgcagaggaggcgcagtcagcaccagaggttatattgggcacattccccgtcaactcgacaccggcagtaatattgtttgattctggtgcaacacattccttcatttccaagcgttttgctggtgcacatgggttatctttagtgaagcttaagataccaatgcgagttcatactcctggaggtggcatgaccacaactcactactgcccatctgtgacagttgaaattcaagggttgatttttccagccaacctcattcttctcgaatccaaggacctagatgtcatacttggaatggattggttgacaaggcacagaggagtgattgattgcgctagccgtaccatcaagttaaccaatgcaaaaggagaggtggtaaccttccagtctccagtgccgcagaagccagggatcagtttaaaccaggctgctggtgaagaacaagaggtagcagtggagaaaaccactaagaagctggaggatattcccatagtcagagagtatccaaaggtttttccagacgatctgacaacaatgccaccaaaaagggatatcgagttccggattgacttggtacctggaactgcaccgatccacaagaggccttacagaatgggagccaacgagttggcggaagtcaagaagcaagtcgatgaacagttacagaagggatacatccgcctgagcacgtcgccttggggtgctccggttatctttgtggagaagaaagacaaaaccaagaggatgtgcgttgactaccgcacactcaatgaggtcaccatcaagaacgagtatcctttaccaaggattgatgatctgtttgatcagttgaaaggagctactgtgttctctaagatagacctacaatcaggctatcaccagttgaggatccgcgaagaggatattccaaagacagcattcatcactcggtacgggttgtttgaatgcacagttatgtctttcggactcactaatgcacctgacttcttcatgaatttgatgaacaaggtgtttatggaatttctagacaagtttgtcgtggttttcatcgatgacatacttatctactccaagtccgaggaagaacatgagcagcatctccggttggtacttgaaaagttaaaagagcaccagctatatgccaagtttagcaagtgcgacttctggcttaaggaagttcagtttctcggtcacatcgtgaatgctcaaggagtagctgtggatccagcaaatgtggagtcagttaccaaatggaccccaccaaggacagtcactcaggttcggagtttcttaggacttgcgggctattaccgccggttcattcagaacttctctaaaattgctaagccaatgacacagctattgaagaaggaagaaaagtttatctggtctgctgaatgcaataggagttttgaagaactcaaacgatggttggtgtctgcaccagtcttaatcctgcctgatcagacaaaagatttccaggtctattgtgatgcatctcgccaggggctaggatgtgtgttgatgcaggatggcaaagtggtctcttatgcttcacggcagttgcgttctcatgaaggcaactacccgacgcatgatctggaattggccgcagttgttcatgctttaaagatttggcggcactatctcatcggtaaccgttgtgaggtatatacagatcacaaaagtctaaagtacatcttcactcaacctgatttgaatctcagacagcaaagatggttggagctgatcaaggattatgatatgggaatacattatcatcccggcaaggctaatgtggttgcagatgccttgagcaggaagagctactgcaatgttgcatgggtagagcaactatgttgtgaggttcaacgcgatttggaacatctgaaccttggtatagttgagcacggattcgtggttgccctagaggcacagcccacactggtggagcaggttcgcatagctcaagcaagtgatcctgaaatagcagagctcaaaaagaacatgagagttggaaaagcccgaggttttgttgaggatgaacaaggaacaatctggatgggagaaagattgtgtgtacccgaaaacaaggaattaaaagacctgatactaaccgaggctcatcaaactcagtattccattcatcccggtagtactaagatgtaccaagacctcaaagagaagttctggtgggtcagcatgagaagggaaatagctgaattcgtagcactctgtaacgtctatcaacgagtaaaggcagaacaccaaaggccagcaggtttgctacagccacttcagattccagaatggaagtgggaagaaatcggaatggatttcatcaccggtttgcccaggacgtcatcggggcatgattctatttgggtagtcgttgaccgactcaccaaagtggctcacttcattccggtgcacactacctactcagggaagaaattagcagaactctatctggcaagaattatgtgtttacatggtgtacctaagaagatcgtgtctgatcgaggaagccaatttacttcaaagttctggcagaaattacaagaagaattgggaacccggttgaatttcagcactacttaccatccacaaacagatggccagaccgagcgagtcaatcaaatactagaggatatgttgagagcctgtgcgcttgactttggtggagcatgggacaaaagcttgccgtatgctgagttctcttacaacaacagttaccaagctagtctgcagatggcaccgtttgaagcactgtatggacgaaggtgtcctactccactcttctgggatcagacaggggaacgccagttgtttggtacagaagttttaaatgaggcagaagagaaagtcagagctgttagggaaagattgagaatcgcgcaatctcggcagaaaagctatgcagacaaccgccgaagggagctcgctttcgaaacaggggattatgtgtatctccgtgtcactccactcaggggagtacatcgcttccaaaccaaaggaaagttggcaccacgctttgtgggaccatacaggatcttggaacgtagaggtgaagttgcttaccagcttgagcttccctccaacatgcttggcatccacaacgtgttccacgtctctcaattgaagaaatgtttgagaggacctgaggaacaggcaagtccggatcacatcaaaattcaggaagatctgacatatctggagaagccgactcgtatcctcgaaaccagcgagagaaggaccagaaacaaagtaatcagattctgcaaggttcagtggagtcatcactcagaagaagaggccacttgggaaagagaagatgagttgaaggccacccacccgcacctcttcgccagcacttccgaatctcgaggtcgagattccgtttaa

SEQ ID NO: 14653 - DNA, 2244 bp, Oryza sativa
  Clone ID: TFbOSC401854j.C1.o6.fg
atggagataaggaatggttcacgcgactcgaacaacgccagtggcagcgaagagccgatcaatggagcacgtgccaacggtgcatctgacaacagtccgtccccaccgcccgagaacccaacaattgctcaggtgttggacaatcagactcagataatgacaatgatgatgcaacagatgcagcaacagtaccatcaggtgatgcagcaggtgcagcagcaagcacagctgcagcagcagaacctgcagtttggtcctccacctcctcagtccaaactgttagaatttcttcgtgtcaagccgcccactttctcaagcaccaccaacccaatcgaggcccacgactggcttcatgccattgagaagaagctgaatcttttgcaatgcaacgagcaggagaaggttgcttttgctacacaccagctacaaggtcccgcttctatttggtgggacaactacatggtgacccgtccggctggggcagaggttacttggacagagtttcgtcatagtttcaataaagcacaggttcccgagggaattgtgggacaaaagaagagagagttccgttccctgcaacaaggaaccagaacagttatagagtatttgcatgagttcaaccgcctcgcgcgctacgcccctgaggacgtgcgtaccgatgccgagaagcaggagaagtttatgtctggtcttgatgatgaattgaccaaccagttgatctctagagactatgaggactttgagaagcttgtggacaaggctattcgtcaagaggagcagtgtaacaaaatgaaccgtaagaggaaggcagcccagttcaggactccccaggggaagtgtcagaagcctcgttacacgatgggacgtcacggtggaccttccaccatgattatccgacagcaccgtccctaccacccgggtagcttcaataagacccaccatagtgatagtcacaacaacagtgagcagcacagcctcaaccctactccgagttcactaaagattccagctcaatcagttcagccagctctgccagaacagcccaagaggttgggagaaaaacccgaactctgcttcaattgtaacaaacccggacacacggttggaaagtgcccgaagccaagacgtgctggacccaagttcgttcaggcccgtgttaatcatgcatctgcagaggaggcgcagtcagcaccagaggttatattgggcacattccccgtcaactcgacaccggcagtaatattgtttgattctggtgcaacccattccttcatttccaagcgttttgctggtgcacatgggttatctttagtgaagcttaagataccaatgcgagttcatactcctggaggtggcatgaccacaactcactactgcccatctgtgacagttgaaattcaagggttgatttttccagccaacctcattcttctcgaatccaaggacctagatgtcatacttggaatggattggttggcaaggcacagaggagtgattgattgcgccagccgcaccatcaagttgaccaatgcaaaaggagaggtggtaatcttccagtctccagtgccgcagaagccagggattagtttaaaccaggctgctggtgaagaacaagaggtagcagtggagaaaaccactaagaaactagaggatattcctatagtcagagagtatccagaggtttttccggacgatctgacaacaatgccaccaaaaagggatatcgagttccggatagacttggtaactggaactgcaccgatccacaagaggccttacagaatgggagccagcgagttggcggaagtcaagaagcaagtcgatgaacagttacagaagggatacatccgtccgagcacgtcgccttggggtgctccggttatctttgtggagaagaaagacaaaaccaagaggatgtgcgttgactaccgcgcactcaatgaggtcactattaagaacaagtaccctttgccaaggattgatgatctgttcgatcagctgaaaggagctactgtgttctctaagatagacctgcgatcaggttatcaccagttgaggatccgcgaagaggatattccaaagacagcattcacccaacctgatcacaaaagtctaaagtgcctaacatcaattgttgtctctttgggaaggacgaaaagcagtgcaaaccttggtgctgtcactggtggagaaatcatctttggtcggtcgaccaaattcgacaatagtccaggttccatttaa

SEQ ID NO: 14654 - DNA, 4689 bp, Oryza sativa
  Clone ID: TFbOSC401858j.C1.o23.fg
atggcagttaaggaccggttcacgggaaaccctgggagacttaccgtgctttccacaagcgggagtgggtttgatgcttgtgggctagtcggcggtcgatatcatgtgtcagtgatggagacaaggaatggttcacgcgactcgaacaacgctagtggcagcgaaaagccgatcaatggagcacgtgccaacagtgcatctgacaacagtccgtccccaccgcccgagaacccaacaattgctcaggtgttggacaatcagactcagatgatgacaatgatgatgcaacagatgcagcaacagtaccatcaggtgttgcaacaggtgcagcagcaagcacagctgcagcagcagaacctgcagtttggttctccacctcctcagtccaaactgctagaatttcttcgtgtcaagccgcccaccttctcaagcaccaccaacccaatcgaggcccacgactggcttcatgccattgagaagaagctgaatcttttgcaatgcaacgagcaagagaaggttgcttttgctacacaccagctgcaaggtcccgcttctatttggtgggacaactacatggtgacccgtccagctggggcagaggttacttggacagagtttcgtcatagtttcaataaagcacaggttcccgagggaattgtggcacaaaagaagagagagttccgttccctacaacaaggaaccagaacagttatagagtatttgcatgagttcaacctcctcgcgcgctacgcccctgaggacgtgcgtaccgatgccgagaggcaggagaagtttttgtctggtcttgatgatgaattgactaaccagttgatctctagagattatgaggactttgagaagctggtggataaggctatccgtcaggaggagcactgtaacaaaataaaccgtaagaggaaggcagctcagttcaggactccccaggggaagagtcagaagcctcgtttcacgatgggacgtcacggtggaccttccaccatgattatccgacagcaccgtccctaccacccgggtagcttcaacaagaaccaccataatggcagtcacaacaacagtgagcagcacagtctcaaccctactccgagttcactaaagattccagctcaatcagttcagccagctctgccagaacagcccaagaggttgggagaaaaacccgaactctgcttcaattgtaacaaacccggacacacggttggaaagtgcccgaagccaagacgtgctggacccaagttcgttcaggcccgtgttaatcatgcatctgcagaggaggcgcagtcagcaccagaggttatattgggcacattccccgtcaactcgacaccggcagtaatattgtttgattctggtgcaacccattccttcatttccaagcgttttgctggtgcacatgggttatccttagtgaagcttaagataccaatgcgagtgcatactcctggaggtggcatgaccacaactcactactgcccatctgtgacagttgaaattcaagggttgatttttccagccaacctcattcttctcgaatccaaggacctagatgtcatacttggaatggattggttaacaaggcacagaggagtgattgattgcgccagccgcaccatcaagttaaccaatgcaaaaggagaggtggtaaccttccagtctctagtgccgcggaagccagggatcagtttaaaccaggctgctggtgaagaacaagaggtagcagtggagaaaaccactaagaagctggaggatattcccatagtcagagagtatccagaggtttttccggacgatctgacaacaatgccaccaaaaagggatatcgagttccggattgacttggtacctggaactgcaccgatccacaagaggccttacagaatgggagccagcgagttggcggaagtcaagaagcaagtcgatgagcagttacagaagggatacatccgcccgagcacgtcgccttggggtgctccggttatctttgtggagaagaaagacaaaaccaagaggatgtgcgttgactaccgcgcactcaatgaggtcaccatcaagaacaagtatcctttgccaaggattgatgacctgtttgatcagttgaaaggagctactgtgttctctaagatagacctgcgatcaggctatcaccagttgaggatccgcgaagaggatattccaaagacagcattcatcactcggtacgggttgttcgaatgcacagttatgtctttcggactcactaatgcacctgccttcttcatgaatttgatgaacaaggtgtttatggaatttctagacaagtttgtcgtggttttcatcgatgacatacttatctactccaagtccgaggaagaacatgagcagcatcttcggctggtacttgaaaagttaaaagagcaccagctatatgccaagttcagcaagtgcgacttctggcttaaggaagttcagtttctcggtcacatcgtgaatgctcaaggagtagctgtggatccagcaaatgtggagtcagttaccaaatggaccccaccaaggacagtcactcaggttcggagtttcttaggacttgcgggctattaccgccggttcattgagaacttctctaaaattgctaagccaatgacacagctattgaagaaggaagaaaagtttatctggtctgctgaatgcaataggagttttgaagaactcaaacgacggttggtgtctgcaccagtcttaatcctgcctgatcagacgaaagatttccaggtctattgtgatgcatctcgccaggggctaggatgtgtgttgatgcaggatggcaaagtggtttcttatgcttcacggcagttgcgtcctcatgaaggcaactacccgacgcatgatctggaattagccgcagttgttcatgctttaaagatttggcggcactatctcatcggtaaccgttgtgaggtatatacagatcacaaaagtctaaagtacatcttcacccaacctgatctgaatctccgacagcgaagatggttggagctaattaaagattatgatatgggaatacattatcatcccggcaaggctaatgtggttgcggatgccttgagcaggaagagctactgcaatgttgcatgggtagagcaactatgtggtgaggttcaacgcgatttggaacatctgaaccttggtatagttgagcacggattcgtggctgccctagaggcacagcccacgctggtggagcaggttcgcatagctcaggcaagtgatcctgaaatagcagagctcaaaaagaacatgagggttggaaaagcccgaggttttgttgaggatgaacaaggaacaatctggatgggagaaagattgtgtgtacccgaaaacaaggaattaaaagacctgatactaaccgaggctcatcaaactcaatattccattcatcccggtagtactaagatgtaccaagacctcaaagaaaagttctggtgggtcagcatgagaagggaaatagctgagttcgtagcactctgtgacgtctgtcaacgagtaaaggcagaacaccaaaggccagcaggtttgctacagccacttcagattccagaatggaagtgggaagaaatcggaatggatttcatcaccggtttgcccaggacgtcatcggggcatgattctatttgggtagtcgttgaccgactcaccaaagtggctcacttcattccggtgcacactacctactcagggaagaaattagcagaactctatctatcaagaatcatgtgtttacatggtgtacctaagaagatcgtgtctgatcgaggaagccaattcacttcaaagttctggcagaaattacaagaagaattgggaacccggttgaatttcagcaccgcttaccatccacaaacagatggccagaccgagcgagtcaatcaaatactagaggatatgttgagagcttgtgcgcttgactttggtggggcatgggacaaaagcttgccgtatgctgagttctcgtacaacaacagttaccaagctagtctgcagatggcaccatttgaagcactgtatggacggaggtgtcgtactccgctcttctgggatcagacaggggaacgccagttgtttggtacagaagttttaaatgaggcagaagagaaagtcagagctgttagggaaagattgagaatcgcgcaatctcggcagaaaagctatgcagacaaccgccgaagggagctcgttttccaagtaggggattatgtgtatctccgtgtcactccgctcaggggagtacaccgcttccaaaccaaaggaaagttggcaccacgctttgtgggaccatatcggattttggaacgcaggggtgaagttgcttaccagcttgagcttccctccaacatgcttggcatccataatgtgttccacgtctctcagttgaagaaatgtttgagagttcctgaggaacaggcaagtccggatcaaatcgaaatccaggaagacttgacgtatgtggagaagccaactcgtatcctcgaaaccagcgagagaaagaccagaaacaaagtaataagattctgcaaggttcagtggagccaccactcagaggaagaggccacttgggaaagagaagatgagttgaaggccacccacccgcacctcttcgccagctcttccgaatctcggggtcgagattccgtttaa

SEQ ID NO: 14655 - DNA, 4242 bp, Oryza sativa
  Clone ID: TFbOSC403689j.C1.o1.fg
atggagataaggaatggttcacgcgactcgaacaacgccagtggcagcgaagagccgatcaatggagcacgtgccaacggtgcatctgacaacagtccgtccccaccgcccgagaacccaacaattgctcaggtgttggacaatcagactcagatgatgacaatgatgatgcaacagatgcagcaacagtaccatcaggtgatgcagcaggtgcagcagcaagcacagctgcagcagcagaacctgcaatttggtcctccgcctcctcagtccaaattgttagaatttcttcgtgtcaagccgcccaccttctcaagcaccaccaacccaatcgaggcccacgactggcttcatgccattgagaagaagctgaatcttttgcaatgcaacgagcaggagaaggttgcttttgctacacaccagctacaaggtcccgcttctatttggttcccgagggaattgtggcacaaaagaagagagttccgttccctgcaacaaggaaccagaacagttatagagtatttgcatgagttcaaccgcctcgcgcgctacgcccctgaggacgtgcgtaccgatgccgagaggcaggagaagtttttgtctggtcttgatgatgaattgactaaccagttgatctctagagattatgaggactttgagaagctggtggataaggctatccgtcaggaggagcacggtaacaaaataaaccgtaagaggaaggcagctcagttcaggactccccaggggaagagtcagaagcctcgtttcacgatgggacgtcacggtggaccttccaccatgattatccgacagcactgtccctaccacccgggtagcttcaacaagaaccaccatagtggcagtcacaacaacagtgagcagcacagtctcaaccctactccgagttcactaaagattccagctcaatcagttcagccagctctgccagaacagcccaagaggttgggagaaaaacccgaactctgcttcaattgtaacaaacccggacacacggttggaaagtgcccgaagccaagacgtgctggacccaagttcgttcaggcccgtgttaatcatgcatctgcagaggaggcgcagtcagcaccagaggttatattgggcacattccccgtcaactcgacaccggcagtaatattgtttgattctggtgcaacccattcctttatttccaagcgttttgctggtgcacatgggttatctttagtgaagcttaagataccaatgcgagttcatactcctggaggtggcatgaccacaactcactactgcccatctgtgacagttgaaattcaagggttgatttttccagccaacctcattcttctcgaatccaaggacctagatgtcatacttggaatggattggttggcaaggcacagaggagtgattgattgcgccagccgcaccatcaagttaaccaatgcaaaaggagaggtggtaacctcccagtctctagtgccgcggaagccagggattagtttaaaccaggctgctggtgaagaacaagaggtagcagtggagaaaatcactaagaagctggaggatattcccatagtcagagagtatccagaggtttttccggacgatctgacaacaatgccaccaaagagggatatcgagttccggattgacttggtacctggaactgcaccgatccacaagaggccttacagaatgggagccaacgagttggcggaagtcaagaagcaagtcgatgaacagttacagaagggatacatccgcccgagcacgtcgccttggggtgctccggttatctttgtggagaagaaagacaaaaccaagagaatgtgcattgactaccgcgcactcaatgaggtcaccatcaagaacaagtatcctttgccaaggattgatgatctgtttgatcagttgaaaggagctactgtgttctctaagatagacctgcgatcaggctatcaccagttgaggatccgcgaagaggatattccaaagacagcattcatcactcggtacgggttgttcgaatgcacagttatgtctttcggactcactaatgcacctgccttcttcatgaatttgatgaacaaggtgtttatggaatttctagacaagtttgtcgtggtttttatcgatgacatacttatctactccaagtccgaggaagaacatgagcagcatcttcggctggtacttgaaaagttaaaagagcaccaactatatgccaagttcagcaagtgcgacttctggcttaaggaagttcagtttctcggtcacatcgtgaatgctcaaggagtagctgtggatccagcaaatgtggagtcagttaccaaatggaccccaccaaggacagtcactcaggttcggagtttcttaggacttgcgggctattaccgccggttcattgagaacttctctaaaattgctaagccaatgacacagctattgaagaaggaagaaaagtttatctggtctgctgaatgcaataggagttttgaagaactcaaacgacggttggtgtctgcaccagtcttaatcctgcctgatcagacgaaagatttccagcgaagatggttggagctaattaaagattatgatatgggaatacactatcatcccggcaaggctaatgtggtagcagatgccttgagcaggaagagttactgcaacgtcgcatgggtagaggaactatgctgtgaggttcaacgtgatttggaacatttgaaccttggaatagttgagcgcggattcgtggctgccctagaggcacagcccacactgatggagcaggttcgcatagctcaagcaagtgatcctgaaatagcagagctcaaaaagaacatgagggttggaaaagcccgaggttttgttgaggacgaacaaggaacaatctggatgggagaaagattgtgtgtacccgaaaacaaggaattaaaagacctgatactaaccgaggctcatcaaactcaatattccattcatcccggcagtaccagaatgtaccaagacctcaaagaaaagttctggtgggtcagcatgagaagggaaatagctgagttcgtagcactctgtgacgtctgtcaacgagtaaaggcagaacaccaaaggccagcaggtttgctacagccacttcagattccagaatggaagtgggaagaaatcggaatggatttcatcaccggtttgcccaggacgtcatcggggcatgattctatttgggtagtcgttgaccgactcaccaaagtggcttacttcattccggtgcacactacctactcagggaagaaattagcagaactctatctggcaagaattatgtgtttacatggtgtacctaagaagattgtgtctgatcgaggaagccaattcacttcaaagttctggcagaaattacaagaagaattgggaacccggttgaatttcagcactgcttaccatccacaaacagatggccagactgagcgagtcaatcaaatactagaggatatgttgagagcatgtgcgcttgactttggtggagcatgggacaaaagcttaccgtatgctgagttctcgtacaacaacagttaccaagctagtctgcagatggcaccgtttgaagcactgtatggacgaaggtgtcgtactccgctcttctgggatcagacaggggaacgccaattgtttggtacagaagttttaaatgaggcagaagagaaagtcagagctgttagggaaagattgagaatcgcgcagtctcggcagaaaagctatgcagacaaccgccgaagggagctcgctttcgaaacaggggattatgtgtatctccgtgtcactccgcttaggggagtacatcgtttccaaaccaaaggaaagttggcaccacgctttgtgggaccatacaggatcttggaacgtagaggtgaagttgcttaccagcttgagcttccctccaacatgcttggcatccacaacgtgttccacgtctctcagttgaagaaatgtttgagagttcctgaggaacaggcaagtccggatcacatcgaaattcaggaagatctgacgtatgtggagaagccgactcgtatcctcgaaaccagcgagagaaggaccagaaacaaagtaataagattctgcaaggttcagtgtagccaccactcagaggaagaggccacttgggaaagagaagatgagttgaaggccacccacccgcacctcttcgccagctcttccgaatctcggggtcgagattccgtttaa

SEQ ID NO: 14656 - DNA, 4575 bp, Oryza sativa
  Clone ID: TFbOSC404799j.C1.o1.fg
atggagataaggaatggttcacgcgactcgaacaacgccagtggcagcgaagagccgaccaatggagcacgtgccaacggtgcatctgacaacagtccgtccccaccgcccgagaacccaacaattgctcaggtgttggacaatcagactcagatgatgacaatgatgatgcaacagatgcagcaacagtaccatcaggtgttgcagcaggtgcagcagcaagcacagctgcagcagcagaacctgcagtttggttctccacctcctcagtccaaactgctagaatttcttcgtgtcaagccgcccaccttctcaagcaccaccaacccaatcgaggcccacgactggcttcatgccattgagaagaagctgaatcttttgcaatgcaacgagcaggagaaggttgcttttgctacacaccagctacaaggtcccgcttctatttggtgggacaactacatggtgacccgtccagctggggcagagtttacttggacagagtttcgtcatagtttcaataaagcacaggttcccgagggaattgtggcacaaaagaagagagagttccgttccctgcaacaaggaaccagaacagttatagagtatttgcatgagttcaacctcctcgcgcgctacgcccctgaggacgtgcgtaccgatgccgagaagcaggagaagtttctgtctggtcttgatgatgaattgactaaccagttgatctctagagattatgaggactttgagaagctggtggataaggctatccgtcaggaggagcactgtaacaaaataaaccgtaagaggaaggcagctcagttccggactccccaggggaagagtcagaagcctcgtttcacgatgggacatcacggtggaccttccaccatgattatccggcagcaccgtccctaccacccgggtaacttcaacaagaaccaccatagtgacagtcacaacaatagtgagcagcacagcctcaaccctactccgagttcactaaagattccagctcaatcagttcagccagctctgccagaacagcccaagaggttgggagaaaaacccgaactctgcttcaattgtaacaaacccggacacacggttggaaagtgcccgaagccaagacgtgccggacccaagttcgttcaggcccgtgttaatcatgcatctgcagaggaggcgcagtcagcaccagaggttatattgggcacattccccgtcaactcgacaccggcagtaatattgtttgattctggtgcaacccattcctttatttccaagcgttttgctggtgcacatgggttatctttagtgaagcttaagataccaatgcgagttcatactcctggaggtggcatgaccacaactcactactgcccatctgtgacagttgaaattcaagggttgatttttccagccaacctcattcttctcgaatccaaggacctagatgtcatacttggaatggattggttggcaaggcacagaggagtgattgattgcgccagccgcaccatcaagttgaccaatgcaaaaggagaggtggtaatcttccagtctccagtgccgcagaagccagggattagtttaaaccaggctgctggtgaagaacaagaggtagcagtggagaaaaccactaagaagctggaggatattcccatagtcagagagtatccagaggtttttccggatgatctgacaacaatgccaccaaaaagggatatcgagttccggattgacttggtacctggaactgcaccgatccacaagaggccttacagaatgggagccaacgagttggcggaagtcaagaagcaagttgatgaacagttacagaagggatacatccgcccgagcacgtcgccttggggtgctccggttatctttgtggaaaagaaagacaaaaccaagaggatgtgcgtggactaccgcgcactcaatgaggtcactattaagaacaagtaccctttgccaaggattgatgatctgttcgatcagctgaaaggagctactgtgttctctaagatagacctttggtcaggctatcaccagttgaggatccgcgaagaggatattccaaagacagcattcatcactcggtacgggttgttcgaatgcacagttatgtctttcggactcactaacgcacctgccttcttcatgaatttgatgaacaaggtgtttatggaatttctagacaagtttgtcatggttttcatcgatgacatacttatctactccaagtccgaggaagaacatgagcagcatcttcggctggtacttgaaaagttaaaagagcaccagctatatgccaagttcagcaagtgcgacttctggcttaaggaagttcagtttcttggtcacatcgtgaatgctcaaggagtagctgtggatccagcaaatgtggagtcagttaccaaatggaccccaccaaggacagtcactcaggttcggagtttcttaggacttgcgggttattaccgccggttcattgagaacttctctaaaattgctaagccaatgacacagctattgaagaaggaagaaaagtttatctggtctgctgaatgcaataggagttttgaagaactcaaacgacggttggtgtctgcaccagtcttaatcctgcctgatcagacgaaagatttccaggtctattgtgatgcatctcgccaggggctaggatgtgtgttgatgcaggatggcaaagtggtttcttatgcttcacggcagttgcgtcctcatgaaggcaactacccgacgcacgacctggaattggccgcagtcgttcatgctttaaagatttggcggcactatctcatcagtaaccgttgtgaggtatatacagatcacaaaagtctaaagtacatctttactcaacctgatttgaatctcagacagcgaagatggttggagctgatcaaagattatgatatgggaatacattatcatcccggcaaggctaatgtggttgcggatgccttgagcaggaagagctactgcaatgttgcatgggtaaagcaactatgttgtgaggttcaacgcgatttggaacatctgaaccttggtatagttgagcacggattcgtggctgccctagaggcacagcccacactggtggagcaggttcgcatagctcaagcaagtgatcctgaaatagcagagctcaaaaagaacatgagagttggaaaagcccgaggttttgttgaggatgaacaaggaacaatctggatgggagaaagattgtgtgtacccgaaaacaaggaattaaaagacctgatactaaccgaggctcatcaaactcaatattccattcatcccggtagtactaagatgtaccaagacctcaaagaaaagttctggtgggtcagcatgagaagggaaatagctgagttcgtagcactctgtgacgtctgtcaacgagtaaaggcagaacaccaaaggccagcaggtttgctacagccacttcagattccagaatggaagtgggaagaaatcggaatggatttcatcaccggtttgcccaggacgtcatcggggcatgattctatttgggtagtcgttgaccgactcaccaaagtggctcacttcattccggtgcacactacctactcagggaagaaattagcagaactctacctggcaagaattatgtgtttacatggtgtacctaagaagatcgtgtctgatcgaggaagccaattcacttcaaagttctggcagaaattacaagaagaattgggaacccggttgaatttcagcaccgcttaccatccacaaacagatggccagaccgagcgagtcaatcaaatactagaggatatgttgagagcatgtgcgcttgactttggtggagcatgggacaaaagcttgccgtatgctgagttctcgtacaacaacagttaccaagctagtctgcagatggcaccgtttgaagcactgtatggacggaggtgtcgtactccgctcttctgggatcagacaggggaacgccagttgtttggtacagaagttttaaatgaggcagaagagaaagtcagagctgttagggaaagattgagaatcgcgcagtctcggcagaaaagctatgcagacaaccgccgaagggagctcgctttcgaaacaggggattatgtgtatctccgtgtcactccgctcaggggagtacatcgcttccaaaccaaaggaaagttggcaccacgctttgtgggaccatatcggattttggaacgtagaggtgaagttgcttaccagctcgagcttccctccaacatgcttggcatccataatgtgttccacgtctcccagttgaagaaatgtttgagagttcctgaggaacaggcaagtccggatcaaatcgaaatccaggaagacttgacgtatgtggagaagccaactcgtatcctcgaaaccagcgagagaaagaccagaaacaaagtaataagattctgcaaggttcagtggagccaccactcagaggaagaggccacttgggaaagagaagatgagttgaaggccacccacccgcacctcttcgccagctcttccgaatctcggggtcgagattccgtttaa

SEQ ID NO: 14657 - DNA, 4575 bp, Oryza sativa
  Clone ID: TFbOSC404802j.C1.o1.fg
atggagataaggaatggttcacgcgactcgaacaacgccagtggcagcgaagagccgatcaatggagcacgtgccaacggtgcatctgacaacagtccgtccccaccgcccgagaacccaacaattgctcaggtgttggacaatcagactcagatgatgacaatgatgatgcaacagatgcagcaacagtaccatcaggtgttgcagcaggtgcagcagcaagcacagctgcagcagcagaacctgcagtttggtcctccacctcctcagtccaaactgttagaatttcttcgtgtcaagccgcccaccttctcaagcaccaccaacccaatcgaggcccacgactggcttcatgccattgagaagaagctgaatcttttgcaatgcaacgagcaggagaaggttacttttgctacacaccagctacaaggtcccgcttctatttggtgggacaactacatggtgacccgtccagctggggcagaggttacttggacagagtttcgtcatagtttcaataaagcacaggttcccgagggaattgtggcacaaaagaagagagagttccgttccctgcaacaaggaaccagaacagttatagagtatttgcatgagttcaaccgcctcgcgcgctacgcccctgaggacgtgcgtaccgatgccgagaggcaggagaagtttttgtctggtcttgatgatgaattgactaaccagttgatctctagagattatgaggactttgagaagctggtggataaggctatccgtcaggaggagcactgtaacaaaataaaccgtaagaggaaggcagctcagttcaggactccccaggggaagagtcagaagcctcgtttcacgatgggacatcacggtggaccttccaccatgattatccggcagcaccgtccctaccacccgggtaacttcaacaagaaccaccatagtgacagtcacaacaatagtgagcagcacagcctcaaccctactccgagttcactaaagattccagctcaatcagttcagccagctctgccagaacagcccaagaggttgggagaaaaacccgaactctgcttcaattgtaacaaacccggacacacggttggaaagtgcccgaagccaagacgtgccggacccaagttcgttcaggcccgtgttaatcatgcatctgcagaggaggcgcagtcagcaccagaggttatattgggcacattccccgtcaactcgacaccggcagtaatattgtttgattctggtgcaacccattccttcatctccaagcgttttgctggtgcacatgggttatctttagtgaagcttaagataccaatgcgagttcatactcctggaggtggcatgaccacaactcactactgtccatctgtgacagttgaaattcaagggttgatttttccagccaacctcattcttctcgaatccaaggacctagatgtcatacttggaatggattggttggcaaggcacagaggagtgattgattgcgccagccgcaccatcaagttgaccaatgcaaaaggagaggtggtaatcttccagtctccagtgccgcagaagccagggattagtttaaaccaggctgctggtgaagaacaagaggtagcagtggagaaaaccactaagaagctggaggatattcccatagtcagagagtatccagaggtttttccggatgatctgacaacaatgccaccaaaaagggatatcgagttccggattgacttggtacctggaactgcaccgatccacaagaggccttacagaatgggagccaacgagttggcgaaagtcaagaagcaagttgatgaacagttacagaagggatacatccgcccgagcacgtcgccttggggtgctccggttatctttgtggaaaagaaagacaaaaccaagaggatgtgcgtggactaccgcgcactcaatgaggtcactattaagaacaagtatccgttgccaagaattgatgatctgtttgatcagttgaaaggagctacggtgttctctaagatagacctgcgatcaggttatcaccagttgaggatccgcgaagaggatattccaaagacagcattcatcactcggtacgggttgttcgaatgcacagttatgtctttcggactcactaacgcacctgccttcttcatgaatttgatgaacaaggtgtttatggaatttctagacaagtttgtcgtggttttcatcgatgacatacttatctactccaagtccgaggaagaacatgagcagcatcttcggctggtacttgaaaagttaaaagagcaccagctatatgccaagttcagcaagtgcgacttctggcttaaggaagttcagtttcttggtcacatcgtgaatgctcaaggagtagctgtggatccagcaaatgtggagtcagttaccaaatggaccccaccaaggacagtcactcaggttcggagtttcttaggacttgcgggttattaccgccggttcattgagaacttctctaaaattgctaagccaatgacacagctattgaagaaggaagaaaagtttatctggtctgctgaatgcaataggagttttgaagaactcaaacgacggttggtgtctgcaccagtcttaatcctgcctgatcagacgaaagatttccaggtctattgtgatgcatctcgccaggggctaggatgtgtgttgatgcaggatggcaaagtggtttcttatgcttcacggcagttgcgtcctcatgaaggcaactacccgacgcacgatctggaattggccgcagtcgttcatgctttaaagatttggcggcactatctcatcagtaaccgttgtgaggtatatacagatcacaaaagtctaaagtacatcttcacccaacctgatctgaatctccgacagcgaagatggttggagctaattaaagattatgatatgggaatacactatcatcccggcaaggctaatgtggttgcggatgccttgagcaggaagagctactgcaatgttgcatgggtaaagcaactatgttgtgaggttcaacgcgatttggaacatctgaaccttggtatagttgagcacggattcgtggctgccctagaggcacagcccacacttgtggagcaggttcgcatagctcaagcaagtgatcctgaaatagcagagctcaaaaagaacatgagagttggaaaagcccgaggttttgttgaggatgaacaaggaacaatctggatgggagaaagattgtgtgtacccgaaaacaaggaattaaaagacctgatactaaccgaggctcatcaaactcagtattccattcatcccggtagtactaagatgtaccaagacctcaaagagaagttctggtgggtcagcatgagaagggaaatagctgagttcgtagcactctgtgacgtctgtcaacgagtaaaggcagaacaccaaaggccagcaggtttgctacagccacttcagattccagaatggaagtgggaagaaatcggaatggatttcatcaccggtttgcccaggacgtcatcggggcatgattctatttgggtagtcgttgaccgactcaccaaagtggctcacttcattccggtgcacactacctactcagggaagaaattagcagaactctatctggcaagaattatgtgtttacatggtgtacctaagaagatcgtgtctgatcgaggaagccaattcacttcaaagttctggcagaaattacaagaagaattgggaacccggttgaatttcagcaccgcttaccatccacaaacagatggccagaccgagcgagtcaatcaaatactagaggatatgttgagagcctgtgcgcttgactttggtggagcatgggacaaaagcttgccgtatgctgagttctcttacaacaacagttaccaagctagtctgcagatggcaccatttgaagcactgtatggacgaaggtgtcgtactccgctcttctgggatcagacaggggaacgccaattgtttggtacagaagttttaaatgaggcagaagaaaaagtcagagctgtcagggaaagattgagaatcgcgcaatctcggcagaaaagctatgcagacaaccgccgaagggagctcgttttccaagtaggggattatgtgtatctccgtgtcactccgctcaggggagtacatcgcttccaaaccaaaggaaagttggcaccacgctttgtgggaccatatcgaattttggaacgtagaggtgaagttgcttaccagctcgagcttccctccaacatgcttggcatccataatgtgttccacgtctcccagttgaagaaatgtttgagagttcctgaggaacaggcaagtccggatcaaatcgaaatccaggaagacttgacgtatgtggagaagccaactcgtatcctcgaaaccagcgagagaaagaccagaaacaaagtaataagattctgcaaggttcagtggagccaccactcagaggaagaggccacttgggaaagagaagacgagttgaaggccacccacccgcacctcttcgccagctcttccgaatctcggggtcgagattccgtttaa

SEQ ID NO: 14658 - DNA, 4686 bp, Oryza sativa
  Clone ID: TFbOSC405598j.C1.o1.fg
atggcgggctgtgagtgcatggttttgctggtcgcacccatagcagttaaggaccggttcacgggaaaccctgggagacttaccgtgcttaccacaagcgggagtggcagttttactgctttcaactactgctttgaaatgcctgctttatgcaaaagaacccctagcttcctttggttatatcctgcatcatacctcctcttccgagttgaagttcttctcagttggagctgtctcagagaggttggtttcctcgctgccgtcaagatggagataaggaatggttcacgcgactcgaacaacgccagtggcagcgaagagctgatcaatggagcatgtgccaacagtgcatctgacaacagtccgtccccaccgcccgagaacccaacaattgctcaggtgttggacaatcagactcagatgatgacagtgatgatgcaacagatgcagcaacagtaccatcaggtgttgcaacaggtgcagcagcaagcacagcagcagcagcagaacctgcagtttggtcctccacctcctcagtccaaactgttagaatttcttcgtgtcaagccgcccactttctcaagcaccaccaacccaatcgaggcccacgactggcttcatgccattgagaagaagctgaatcttttgcaatgcaacgagcaagagaaggttgcttttgctacacaccagctgcaaggtcccgcttctgtttggtgggacaactacatggtgacccgtccaactggggcagaagttacttggacagagttttgtcatagtttcaataaagcacaggttcccgagggaattgtggcacaaaagaagagagagttccgttccctgcaacaaggaaccagaacagttatagagtatttgcatgagttcaaccgcctcgcacgctacgcccctgaggacgtgcgtaccgatgacgggaggcgtgagaagtttctgtctggtcttgatgatgaattgactaaccagttgatctctagagattatgaggactttgagaagctggtggataaggctatccgtcaggaggagcactgtaacaaaataaaccgtaagaggaagacagctcagttcaggactccccagggaagacaccgtccctaccacccgggtagcttcaacaagaaccaccatagtggcagtcacaacaacagtgagcagcacagcctcaaccctactccgagttcactaaagattccagcccaatcagttcagccagctctgccagaacagcccaagaggttgggagaaaaacccgaactctgcttcaattgtaacaaacccggacacacggttggaaagtgcccgaagccaagacgtgctggacccaagttcgttcaggcccgtgttactcatgcatctgcagaggaggcgcagtcagccccagaggttatattgggcacattccccgtcaactcgacaccggcagtaatattgtttgattctggtgcaacccattccttcatttccaagcgttttgctggtgcacatgggttatctttagtgaagcttaagataccaatgcgagttcatactcctggaggtggcatgaccacaactcactactgcccatctgtgacagttgaaattcaagggttgatttttccagccaacctcattcttctcgaatccaaggacctagatgtcatacttggaatggattggttgacaaggcacagaggagtgattgattgcgccagccgcaccatcaagttgaccaatgcaaaaggagaggtggtaaccttccagtctctagtgccgcagaagccagggatcagtttaaaccaggctgctggtgaagaacaagaggtagcagtggagaaaaccactaagaagctggaggatattcccatagttagagagtatccaaaggtttttccggacgatctgacaacaatgccaccaaaaagggatatcgagttccggattgacttggtacctggaactgcaccgatccacaagaggccttacagaatgggagccaacgagttggcggaagtcaagaagcaagtcgatgaacagttacagaagggatacatccacccgagcacgtcgccttggggtgctccggttatctttgtggagaagaaagacaaaaccaagaggatgtgcgttgactaccgcgcattcaatgaggtcaccatcaagaacaagtatcctttgccaaggattgatgatctgtttgatcagttgaaaggagctactgtgttctctaagatagacctgcgatcaggctatcaccagttgaggatccacgaagaggatattccaaagacagcattcatcactcggtacgggttgttcgaatgcacagttatgtctttcggactcactaatacacctgccttcttcatgaatttgatgaacaaggtgtttatgaaatttctagacaagtttgtcgtggttttcatcgatgacatacttatctactccaagtccgaggaagaacatgagcagcatcttcggctggtacttgaaaagttaaaagagcaccagctatatgccaagttcagcaagtgcgacttctggcttaaggaagttcagtttctcggtcacatcgtgaatgctcaaggagtagctatggatccagcaaatgtggagtcagttaccaaatggaccccaccaaggacagtcactcaggttcggagtttcttaggacttgcgggctattaccgccggttcattgagaacttctctaaaattgctaagccaatgacacagctattgaagaaggaagaaaagtttatctggtctgctaaatgcaataggagttttgaagaactcaaacgacggttggtgtctgcaccagtcttaatcctgcctgatcagacgaaagatttccaggtctattgtgatgcatctcgccaggggctaggatgtgtgttgatgcaggatggcaaagtggtttcttatgcttcacggcagttgcgtcctcatgaaggcaactacccgacgcatgatctggaattggccgcagttgttcatgctttaaagatttggcggcactatctcatcggttaccgttgtgagcgaagatggttggagctgatcaaggattatgatatgggaatacattatcatcccggcaaggctaatgtggttgcagatgccttgagcaggaagagctactgcaatgttgcatgggtagagcaactatgttgtgaggttcaacgcgatttggaacatctgaaccttggtatagttgagcacggattcgtggttgccctagaggcacagcccacactggtggagcaggttcgcatagctcaagcaagtgatcctgaagtagcagagctcaaaaagaacatgagagttggaaaagcccgaggttttgttgaggatgaacaaggaacaatctggatgggagaaagattgtgtgtacccgaaaacaaggaattaaaagacctgatactaaccgaggctcatcaaactcagtattccattctttccggtagtactaagatgtaccaagacctcaaagagaagttctggtgggttagcatgagaagggaaatagctgaattcgtagcactctgtgacgtctgtcaacgagtaaaggcagaacaccaaaggccagcaggtttgctacagccacttcagattccagaatggaagtgggaagaaatcggaatggatttcatcaccggtttgcccaggacgtcatcggggcatgattctatttgggtagtcgttgaccgactcaccaaagtggctcacttcattccagtgcacactacctactcagggaagaaattagcagaactctatctggcaagaattatgtgtttacatggtgtacctaagaagatcgtgtctgatcgaggaagccaattcacttcaaagttctggcagaaattacaagaagaattgggaacccggttgaatttcagtactgcttaccatccacaaacagatggccagaccgagcgagtcaatcaaatactagaggatatgttgagagcctgtgcgcttgactttggtggagcatgggacaaaagcttgccgtatgctgagttctcttacaacaacagttaccaagctagtctgcagatggcaccgtttgaagcactgtatggacgaaggtgtcgtactccgctcttctgggatcagacaggggaacgccaattgtttggtacagaagttttaaatgaggcagaagaaaaagtcagagctgttagggaaagattgagaattgcgcaatctcggcagaaaagctatgcagacaaccgccgaagggagctcgctttcgaaacaggggattatgtgtatctccgtgtcactccgctcaggggagtacatcgcttccaaaccaaaggaaagttggcaccacgctttgtgggaccatacaggatcttggaacgtagaggtgaagttgcttaccagcttgagcttccctccaacatgcttggcatccacaacgtgttccacgtctctcagttgaagaaatgtttgagagttcctgaggaacaggcaagtccggatcacatcgaaattcaggaagatctgacgtatgtggagaagccgactcgtatcctcgaaaccagtgagagaaggaccagaaacaaagtaatcagattctgcaaagttcagtggagtcatcactcagaagaagaggccacccacccgcacctcttcgccagctcttccgaatctcgaggtcgagattccgtttaa

SEQ ID NO: 14659 - DNA, 4377 bp, Oryza sativa
  Clone ID: TFbOSC406439j.C1.o14.fg
atggagacaaggaatggttcacgcgactccaacaacgccagtggcagcgaagagccgatcaatggagcacgtgccaacggtgcatctgacaacagtccgtccccaccgcccgagaacccaacaattgctcaggtgttggacaatcagactcggatgatgacaatgatgatgcaacagatgcagcaacagtaccatcaggtgttgcagcaggtgcagcagcaagcacagctgcagcagcagaacctgcagtttggtcctccacctcctcagtccaaactgttagaatttcttcgtgtcaagccgcccaccttctcaagcaccaccaacccaatcgaggcccacgactggcttcatgccattgagaagaagctgaatcttttgcaatacaacgagcaggagaaggttgcttttgctacacaccagctacaaggtcccgcttctatttggtgggacaactacatggtgacccgtccaactggggcagaagttacttggacagagttttgtcatagtttcaataaagcacaggttcccgagggaattgtggcacaaaagaagagagagttccgttccctgcaacaaggaaccagaacagttatagagtatttgcatgagttcaaccgcctcgcgcactacgcccctgaggacgtgcgtaccgatgccgagaggcaggagaagtttctgtctggtcttgatgatgaattgaccaaccagttggtctctagagattatgaggactttgagaagcttgtggacaaggctatccgtcaagaggagcagtgtaacaaaatgaaccgtaagaggaaggcagcccagttcaggactccccaggggaagtgtcagaagcctcgtttcacgatgggacatcacggtggaccttccaccatgattatccggcagcaccgtccctaccacccgggtaacttcaacaagaaccaccatagtgacagtcacaacaatagtaagcagcacagcctcaaccctactccgagttcactaaagattccagctcaatcagttcagccagctctgccagaacagcccaagaggttgggagaaaaacccgaactctgcttcaattgtaacaaacccggacacacggttggaaagtgcccgaagccaagacgtgccggacccaagttcgttcaggcccgtgttaatcatgcatctgcagaggaggcgcagtcagcaccagaggttatattgggcacattccccgttaactcgacaccggcagtaatattgtttgattctggtgcaacccattccttcatttccaagcgttttgctggtgcacatgggttatctttagtgaagcttaagataccaatgcgagttcatactcctggaggtggcatgaccacaactcactactgcccatctgtgacagttgaaattcaagggttgatttttccagccaacctcattcttctcgaatccaaggacctagatgtcatacttggaatggattggttggcaaggcacagaggagtgattgattgcgccagccgcaccatcaagttgaccaatgcaaaaggagaggtggtaatcttccagtctccagtgccgcagaagccagggattagtttaaaccaggctgctggtgaagaacaagaggtagcagtggagaaaaccactaagaagctggaggatattcccatagtcagagagtatccagaggtttttccggacgatctgacaacaatgccaccaaaaagggatatcgagttccggattgacttggtacctggaactgcaccgatccacaagaggccttacagaatgggagccaacgagttggcggaagtcaagaagcaagttgatgaacagttacagaagggatacatccgcccgagcacgtcgccttggggtgctccggttatctttgtggagaagaaagacaaaaccaagaggatgtgcgttgactaccgcgcactcaatgaggtcaccatcaagaacaagtatcctttgccaaggattgatgatctgtttgatcagttgaaaggagctactgtgttctctaagatagacctgcgatcaggctatcaccagttgaggatccgcgaagaggatattccaaagacagcattcatcactcggtacgggttgttcgaatgcacagttatgtctttcggactcactaatgcacctgccttcttcatgaatttgatgaacaaggtgtttatggaatttctagacaagtttgtcgtggttttcatcgatgacatacttatctactccaagtccgaggaagaacatgagcagcatcttcggctggtacttgaaaagttaaaagagcaccagctatatgccaagttcagcaagtgcgacttctggcttaaggaagttcagtttctcggtcacatcgtgaatgctcaaggagtagctgtggatccagcaaatgtggagtcagttaccaagtggaccccaccaaggacagtcactcaggttcggagtttcttaggacttgcgggctattaccgccggttcattgagaacttctctaaaattgctaagccaatgacacagctattgaagaaggaagaaaagtttatctggtctgctgaatgcaataggagttttgaagaactcaaacgacggttggtgtctgcaccagtcctaatcctgcctgatcagacgaaagattttcaggtctattgtgatgcatctcgccaggggctaggatgtgtgttgatgcaggatggcaaagtggtttcttatgcttcacggcagttgcgtcctcatgaaggcaactacccgacgcatgatctggaattagccgcagttgttcatgctttaaagatttggcggcactatctcatcggtaaccgttgtgaggttcaacgcgacttggaacatctgaaccttggtatagttgagcacggattcgtggctgccctagaggcacagcccacactggtggagcaggttcgcatagctcaagcaagtgatcctgaaatagcagagcttaaaaagaacatgagagttggaaaagcccgaggttttgttgaggatgaacaaggaacaatctggatgggagaaagattgtgtgtacccgaaaacaaggaattaaaagacctgatactaaccgaggctcatcaaactcaatattccattcatcccggtagtactaagatgtaccaagacctcaaagaaaagttctggtgggtcagcatgagaagggaaatagctgagttcgtagcactctgtgacgtctgtcaacgagtaaaggcagaacaccaaaggccagcaggtttgctacagccacttcagattccagaatggaagtgggaagaaatcggaatggatttcatcaccggtttgcccaggacgtcatcggggcatgattctatttgggtagtcgttgaccgactcaccaaagtggctcacttcattccggtgcacactacctactcagggaagaaattagcagaactctatctggcaagaattatgtgtttacatggtgtacctaagaagatcgtgtctgatcgaggaagccaatttacttcaaagttctggcaggaattacaagaagaattgggaacccggttgaatttcagcaccgcttaccatccacaaacagatggccagaccgagcgagtcaatcaaatactagaggatatgttgagagcatgtgcgcttgactttggtggagcatgggacaaaagcttaccgtatgctgagttctcgtacaacaacagttaccaagctagtttgcagatggcaccgtttgaagcactgtatggacggaggtgtcgtactccgctcttctgggatcagacaggggaacgccagttgtttggtacagaagttttaaatgaggcagaagagaaagtcagagctgttagggaaagattgagaatcgcgcagtctcggcagaaaagctatgcagacaaccgccgaagggagctcgttttccaagtaggggattatgtgtatctccgtgtcactccgctcaggggagtacatcgcttccaaaccaaaggaaagttggcaccacgctttgtgggaccatatcggattttggaacgtagaggtgaagttgcttaccagctcgagcttccctccaacatgcttggcatccataatgtgttccacgtctcccagttgaagaaatgtttgagagttcctgaggaacaggcaagtccggatcaaatcgaaatccaggaagacttgacgtatgtggagaagccaactcgtatcctcgaaaccagcgagagaaagaccagaaacaaagtaataagattctgcaaggttcagtggagccaccactcagaggaagaggccacttgggaaagagaagatgagttgaaggccacccacccgcacctcttcgccagctcttccgaatctcggggtcgagattccgtttaa

SEQ ID NO: 14660 - DNA, 4554 bp, Oryza sativa
  Clone ID: TFbOSC411372j.C1.o3.fg
atggcgggctgtgagtgcatggttttgctggtcgcacccatagcagttaaggaccggttcacgggaaaccctgggagacttaccgtgcttaccacaagcgggagtggctgttttactgctttcaactactgctttgaaatgcctgctttatgcaaaagaacccctagcttcctttggttatatcctgcatcatacctcctcttccgagttgaagttcttctcagttggagccgtctcagagaggttggtttcgttgctgccgtcaagatggagacaaggaatggttcacgcgactccaacaacgccagtggcagcgaagagccgatcaatggagcacgtgccaacggtgcatctgacaacagtccgtccccaccgcccaagaacccaacaattgctcaggtgttggacaatcagactcagatgatgacaatgatgatgcaacagatgcagcaacagtaccatcaggtgttgcaacaggtgcagcagcaagcacagcagcagcagcagaacctgcagtttggtcctccacctcctcagtccaaactgttagaatttcttcgtgtcaagccgcccactttctcaagcaccaccaacccaatcgaggcccacgactggcttcatgccattgagaagaagctgaatcttttgcaatgcaacgagcaggagaaggttgcttttgctacacaccagctacaaggtcccgcttctatttggtgggacaactacatggtgacctgtccaactggggcagaagttacttggacagagtttcgtcatagtttcaataaagcacagattcccgagggaattgtggcacaaaagaagagagagttccgttccctgcaacaaggaaccagaacagttatagagtatttgcatgagttcaaccgcctcgcacgctacgcccctgaggacgtgcgtaccgatgacgggaggcaggagaagtttctgtctggtcttgatgatgaattgactaaccagttgatctctagagattatgaggactttgagaagcttgtggacaaggctattcgtcaagaggagcagtgtaacaaaatgaaccgtaagaggaaggcagctcagttcaggactccccaggggaagagtcagaagcctcgtttcacgatgggacgtcacggtggaccttccaccatgattatccggcagcaccgtccctaccacccgggtagcttcaacaagaaccaccatagtgatagtcacaacaacagtgagcagcacagcctcaaccctactccgagttcactaaagattccagctcaatcagttcagccagctctgccagaacagcccaagaggttgggagaaaaacccgaactctgcttcaattgtaacaaacccggacacacggttggaaagtgcccgaagccaagacgtgctggacccaagttcgttcaggcccgtgttaatcatacatctgcagaggaggcgcaatcagcaccagaggttatattgggcacattccccgtcaactcgacaccggcagtaatattgtttgattctggtgcaacccattccttcgtttccaagcgttttgctggtgcacatgggttatctttagtgaagcttaagataccaatgcgagttcatactcctggaggtggcatgaccacaactcactactgcccatctgtgacagttgaaattcaagggttgatttttccagccaacctcattcttctcgaatccaaggacctagatgtcatacttggaatggattggttgacaaggcacagaggagtgattgattgcgccagccgcaccatcaagttgaccaatgcaaaaggagaggtggtaatcttccagtctccagtgccgcagaagccagggatcagtttaaaccaggctgctggtgaagaacaagaggtagcagtggagaaaaccactaagaagctggaggatattcccatagtcagagagtatccagaggtttttccggacgatctgacaacaatgccaccaaaaagggacatcgagttccggattgacttggtacctggaactgcaccgatccacaagaggccttacagaatgggagccaacgagttggtggaagtcaagaagcaagtcgatgaacagttacagaagggatacatccgcccgagcacgtcgccttggggtgctccggttatctttgtggagaagaaagacaaaaccaagaggatgtgcgttgactaccgcgcactcaatgaggtcaccatcaagaacaagtatcctttgccaaggattgatgatctgtttgatcagttgaaaggagctactgtgttctctaagatagacctgcgatcaggctatcaccagttgaggatccgcgaagaggatattccaaagacagcattcatcactcggtacgggttgttcgaatgcacagttatgtctttcggactcactaatgcacctgccttcttcatgaatttgatgaacaaggtgtttatggaatttctagacaagtttgtcgtggttttcatcgatgacatacttatctactccaagtccgaggaagaacatgagcagcatctccggctggtacatgaaaagttaaaagcgcaccaactatatgccaagttcagcaagtgcgtcttctggcttaaggaagttcagtttctcggtcacatcgtgaatgctcaaggagtagctgtggatccagcaaatgtggagtcagttaccaaatggaccccaccaaggacagtcactcaggttcggagtttcttaggacttgcgggctattaccgccggttcattgagaacttctctaaaattgctaagccaatgacacagctattgaagaaggaagaaaagtttatctggtctgccgaatgcaataggagttttgaagaactcaaacgacggttggtgtctgcaccagtcttaatcctgcctgatcagacgaaagatttccaggtctattgtgatgcatctcgccaggggctaggatgtgtgttgatgcaggatggcaaagtggtttcttatgcttcacggcagttgcgtcctcatgaaggcaactacccaacgcatgatctggaattggccgcaattgttcatgctttaaagatttggcggcactatctcatcggtaaccgttgtgaggtatatatagatcacaaaagtctaaagtacatcttcactcaacctgatttgaatctcagacagcgaagatggttggagctgatcaaggattatgatatgggaatacattatcatcccggcaaggctaatgtggttgcagatgccttgagcaggaagagctactgcaatgttgcatgggtagagcaactatgttgtgaggttcaacgcgatttggaacatctgaaccttggtatagttgagcacggattcgtggttgccctagaggcacagcccacactggtggagcaggttcgcatagctcaagcaagtgatcctgaaatagcagagctcaaaaagaacatgagagttggaaaagcccgaggttttgttgaggatgaacaaggaacaatctggaggggagaaagatttactaagatgtaccaagacctcaaagagaagttctggtgggtcagcatgagaagggaaatagctgaattcgtagcactctgtgacgtctgtcaacgagtaaaggcagaacaccaaaggccagcaggtttgctacagccacttcaaattccagaatggaagtgggaagaaatcggaatggatttcatcaccggtttgcccaggacgtcatcggggcatgattctatttgggtagtcgttgaccgactcaccaaagtggctcacttcattccggtgcacactacctactcagggaagaaattagcagaactctatctggcaagaattatgtgtttacatggtgtacctaagaagatcgtgtctgatcgaggaagccaattcacttcaaagttctggcagaaattacaagaagaattgggaacccggttgaatttcagcactgcttaccatccacaaacagatggccagaccgagcgagtcaatcaaatactagaggatatgttgagagcctgtgcgcttgactttggtggagcatgggacaaaagcttgccgtatgctgagttctcttacaacaacagttaccaagctagtctgcagatggcaccgtttgaagcactgtatggacgaaggtgtcgtactccgctcttttgggatcagacaggggaacgccaattgtttggtacagaagttttaaatgaggcagaagagaaagtcagagctgtcagggaaagattgagaatcgcgcaatctcggcagaaaagctatgcagacaaccgccgaagagagctcgctttcgaaacaggggattatgtgtatctccgtgtcactccgctcaggggagtacatcgcttccaaaccaaaggaaagttggcaccacgctttgtgggaccatacaggatcttggaacgtagaggtgaagttgcttaccagcttgagcttccctccaacatgcttggcatccacaacgtgttccacgtctctcagttgaagaaatgtttgagagttcctgaggaacaggcaagtccggatcacatcgaaatttag

SEQ ID NO: 14661 - DNA, 4575 bp, Oryza sativa
  Clone ID: TFbOSC412783j.C1.o1.fg
atggagataaggaatggttcacgcgactcgaacaacgccaatggcagcgaagagccgatcaatggagcacgtgccaacggtgcatctgacaacagtccgtccccaccgcccgagaacccaacaattgctcaggtgttggacaatcagactcagatgatgacaatgatgatgcaacagatgcagcaacagtaccatcaggtgttgcagcaggtgcagcagcaagcacagctgcagcagcagaacctgcagtttggtcctccacctcctcagtccaaactgttagaatttcttcgtgtcaagccgcccactttctcaagcaccaccaacccaatcgaggcccacgactggcttcatgccattgagaagaagctgaatcttttgcaatgcaacgagcaggagaaggttgcttttgctacacaccagctacaaggtcccgcttctatttggtgggacaactacatggtgacccgtccaactggggcagaagttacttggacagagttttgtcatagtttcaataaagcacaggttcccgagggaattgtggcacaaaagaagagagagttccgttccctgcaacaaggaaccagaacagttatagagtatttgcatgagttcaaccgcctcgcgcgctacgcccctgaggacgtgcgtaccgatgccgagaggcaggagaagtttctgtctggtcttgatgatgaattgactaaccagttgatctctagagattatgaggactttgagaagctggtggataaggctatccgtcaggaggagcactgtaacaaaataaaccgtaagaggaaggcagctcagttcaggactccccaggggaagagtcagaagcctcggttcacgatgggacatcacggtggaccttccaccatgattatccggcagcaccgtccctaccacccgggtagcttcaacaagaaccaccatagtggcagccacaacaacagtgagcagcacagtctcaaccctactccgagttcactaaagattccagctcaatcagttcagccagctctgccagaacagcccaagaggttggtagaaaaacccgaactctgcttcaattgtaacaaacccggacacacggttggaaagtgcccgaagccaagacgtgctggacccaagttcgttcaggcccgtgttaatcatgcatctgcagaggaggcgcagtcagcaccagaggttatattgggcacattccccgtcaactcgacaccggcagtaatattgtttgattctggtgcaacccattccttcatttccaagcgttttgctggtgcacatgggttatctttagtgaagcttaagataccaatgcgagttcatactcctggaggtggcatgaccacaactcactactgcccatctgtgacagttgaaattcaagggtcgatttttccagccaacctcattcttctcgaatccaaggacctagatgtcatacttggaatggattggttgacaaggcacagaggagtgattgattgcgccagccgcaccatcaagttgaccaatgcaaaaggagaggtggtaaccttccagtccccagtgccgcagaagccaaggatcagtttaaaccaggctgctggtgaagaacaagaggtagcagtggagaaaaccactaagaagctggaggatattcccatagtcagagagtatccagaggtttttccggacgatctgaccacaatgccaccaaaaagggatatcgagttccggattgacttggtacctggaactgcaccgatccacaagaggccttacagaatgggagccaacgagttggcggaagtcaagaagcaagttgatgaacagttacagaagggatacatccgcccgagcacgtcgccttggggtgctccggttatctttgtggagaagaaagacaaaaccaagaggatgtgtgttgactaccgcgcactcaatgaggtcaccatcaagaacaagtatcctttgccaaggattgatgatctgttcgatcagctgaaaggagctactgtgttctctaagatagaccttcggtcaggctatcaccagttgaggatccgcgaagaggatattccaaagacagcattcatcactcggtacgggttgttcgaatgcacagttatgtctttcggactcactaatgcacctgccttcttcatgaatttgatgaacaaggtgtttatggaatttctagacaagtttgtcgtggtttttatcgatgacatacttatctactccaagtccgaggaagaacatgagcagcatcttcggctggtacttgaaaagttaaaagagcaccaactatatgccaagttcagcaagtgcgacttctggcttaaggaagttcagtttctcggtcacatcgtgaatgctcaaggagtagctgtggatccagcaaatgtggagtcagttaccaaatggaccccaccaaggacagtcactcaggttcggagtttcttaggacttgcgggctattaccgccggttcattgagaacttctctaaaattgctaagccaatgacacagctattgaagaaggaagaaaagtttatctggtctgctgaatgcaataggagttttgaagaactcaaacgacggttggtgtctgcaccagtcttaatcctgcctgatcagacgaaagatttccaggtctattgtgatgcatctcgccaggggctaggatgtgtgttgatgcaggatggcaaagtggtttcttatgcttcacggcagttgcgtcctcatgaaggcaactacccgacgcatgatctggaattagccgcagttgttcatgctttaaagatttggcggcactatctcatcggtaaccgttgtgaggtatatacagatcacaaaagtctaaagtacatctttactcaacctgatttgaatcttagacagcgaagatggttggagctgatcaaggattatgatatgggaatacattatcatcccggcaaggctaatgtggttgcagatgccttgagcaggaagagtcactgcaacgtcgcatgggtagaggaactatgctgtgaggttcaacgtgatttgggacatttgaaccttggtatagttgagcacggattcgtggctgccctagaggcacagcccacactggtggagcaggttcgcatagctcaagcaagtgatcctgaaatagcagagctcaaaaagaacatgagggttggaaaagcccgaggttttgttgaggacgaacaaggaacaatctggatgggagaaagattgtgtgtacccgaaaacaaggaattaaaagacctaatactaaccgaggctcatcaaactcaatattccattcatcccggcagtaccaaaatgtaccaagacctcaaagaaaagttctggtgggtcagcatgagaagggaaatagctgaattcgtagcactctgcgacgtctgtcaacgagtaaaggcagaacaccaaaggccagcaggtttgctacagccacttcagattccagaatggaagtgggaagaaatcggaatggatttcatcaccggtttgcccaggacgtcatcggggcatgattctatttgggtagtcgttgaccgactcaccaaaatggctcacttcattccggtgcacactacctactcagggaagaaattagcagaactctatctggcaagaatcatgtgtttacatggtgtacctaagaagatcgtgtctgatcgaggaagtcaattcacttcaaagttctggcagaaattgcaagaagaattgggaacccgtctaaacttcagcactgcttaccatccacaaacagatggccagaccgagcgagtcaatcaaatactagaggatatgttgagagcctgtgcgcttgactttggtggagcatgggacaaaagcttaccgtatgctgagttctcgtacaacaacagttaccaagctagtctgcagatggcaccgtttgaagcactgtatggacgaaggtgtcgtactccgctcttctgggatcagacaggggaacgccagttgtttggtacagaagttttaaatgaggcagaagagaaagtcagagctgtcagggaaagattgagaatcgcgcaatctcggcagaaaagctatgcagacaaccgccgaagggagctcgctttcgaaacaggggattatgtgtatctccgtgtcactccgctcaggggagtacatcgcttccaaaccaaaggaaagttggcaccacgctttgtgggaccatacaggatcttggaacgtagaggtgaagttgcttaccagctcgaacttccctccaacatgcttggcatccacaatgtgttccacgtctctcagttgaaaaaatgtttgagagttcctgaggaacaggcaagtccggatcacatcgaaattcaggaagacttgacgtatgtggagaagccaactcgtatcctcgaaaccagcgagagaaagaccagaaacaaagtaataagattctgcaaggttcagtggagccaccactcagaggaagaggccacttgggaaagagaagatgagttgaaggccacccacccgcacctcttcgccagcccttccgaatctcggggtcgagattccgtttaa

SEQ ID NO: 14662 - DNA, 4581 bp, Oryza sativa
  Clone ID: TFbOSC416334j.C1.o3.fg
atggcagttaaggaccggttcacgggaaaccctgggagacttaccgtgctttccacaagcgggagtgggtttgatgcttgtgggctagtcggcggtcgatatcatgtgtcagtgatggagacaaggaatggttcacgcgactcgaacaacgccagtggcagcgaaaagccgatcaatggagcacgtgccaacagtgcatctgacaacagtccgtccccaccgcccgagaacccaacaattgctcaggtgttggacaatcagactcagatgatgacaatgatgatgcaacagatgcagcaacagtaccatcaggtgttgcaacaggtgcagcagcaagcacagctgcagcagcagaacctgcagtttggttctccacctcctcagtccaaactgctagaatttcttcgtgtcaagccgcccaccttctcaagcaccaccaacccaatcgaggcccacgactggcttcatgccattgagaagaagctgaatcttttgcaatgcaacgagcaagagaaggttgcttttgctacacaccagctgcaaggtcccgcttctatttggtgggacaactacatggtgacccgtccagctggggcagaggttacttggacagagtttcgtcatagtttcaataaagcacaggttcccgagggaattgtggcacaaaagaagagagagttccgttccctgcaacaaggaaccagaacagttatagagtatttgcatgagttcaacctcctcgcgcgctacgcccctgaggacgtgcgtaccgatgccgagaggcaggagaagtttttgtctggtcttgatgatgaattgactaaccagttgatctctagagattatgaggactttgagaagctggtggataaggctatccgtcaggaggagcactgtaacaaaataaaccgtaagaggaaggcagctcagttcaggactccccaggggaagagtcagaagcctcgtttcacgatgggacgtcacggtggaccttccaccatgattatccgacagcaccgtccctaccacccgggtagcttcaacaagaaccaccataatggcagtcacaacaacagtgagcagcacagtctcaaccctactccgagttcactaaagattccagctcaatcagttcagccagctctgccagaacagcccaagaggttgggagaaaaacccgaactctgcttcaattgtaacaaacccggacacacggttggaaagtgcccgaagccaagacgtgctggacccaagttcgttcaggcccgtgttaatcatgcatctgcagaggaggcgcagtcagcaccagaggttatattgggcacattccccgtcaactcgacaccggcagtaatattgtttgattctggtgcaacccattccttcatttccaagcgttttgctggtgcacatgggttatccttagtgaagcttaagataccaatgcgagtgcatactcctggaggtggcatgaccacaactcactactgcccatctgtgacagttgaaattcaagggttgatttttccagccaacctcattcttctcgaatccaaggacctagatgtcatacttggaatggattggttaacaaggcacagaggagtgattgattgcgccagccgcaccatcaagttaaccaatgcaaaaggagaggtggtaaccttccagtctctagtgccgcggaagccagggatcagtttaaaccaggctgctggtgaagaacaagaggtagcagtggagaaaaccactaagaagctggaggatattcccatagtcagagagtatccagaggtttttccggacgatctgacaacaatgccaccaaaaagggatatcgagttccggattgacttggtacctggaactgcaccgatccacaagaggccttacagaatgggagccagcgagttggcggaagtcaagaagcaagtcgatgagcagttacagaagggatacatccgcccgagcacgtcgccttggggtgctccggttatctttgtggagaagaaagacaaaaccaagaggatgtgcgttgactaccgcgcactcaatgaggtcaccatcaagaacaagtatcctttgccaaggattgatgacctgtttgatcagttgaaaggagttactgtgttctctaagatagacctgcgatcaggctatcaccagttgaggatccgcgaagaggatattccaaagacagcattcatcactcggtacgggttgttcgaatgcacagttatgtctttcggactcactaatgcacctgccttcttcatgaatttgatgaacaaggtgtttatggaatttctagacaagtttgtcgtggttttcatcgatgacatacttatctactccaagtccgaggaagaacatgagcagcatcttcggctggtacttgaaaagttaaaagagcaccagctatatgccaagttcagcaagtgcgacttctggcttaaggaagttcagtttctcggtcacatcgtgaatgctcaaggagtagctgtggatccagcaaatgtggagtcagttaccaaatggaccccaccaaggacagtcactcaggttcggagtttcttaggacttgcgggctattaccgccggttcattgagaacttctctaaaattgctaagccaatgacacagctattgaagaaggaagaaaagtttatctggtctgctgaatgcaataggagttttgaagaactcaaacgacggttggtgtctgcaccagtcttaatcctgcctgatcagacgaaagatttccaggtctattgtgatgcatctcgccaggggctaggatgtgtgttgatgcaggatggcaaagtggtttcttatgcttcacggcagttgcgtcctcatgaaggcaactacccgacgcatgatctggaattagccgcagttgttcatgctttaaagatttggcggcactatctcatcggtaaccgttgtgaggtatatacagatcacaaaagtctaaagtacatcttcacccaacctgatctgaatctccgacagcgaagatggttggagctaattaaagattatgatatgggaatacattatcatcccggcaaggctaatgtggttgcggatgccttgagcaggaagagctactgcaatgttgcatgggtagagcaactatgtggtgaggttcaacgcgatttggaacatctgaaccttggtatagttgagcacggattcgtggctgccctagaggcacagcccacgctggtggagcaggttcgcatagctcaggcaagtgatcctgaaatagcagagctcaaaaagaacatgagggttggaaaagcccgaggttttgttgaggatgaacaaggaacaatctggatgggagaaagattgtgtgtacccgaaaacaaggaattaaaagacctgatactaaccgaggctcatcaaactcaatattccattcatcccggtagtactaagatgtaccaagacctcaaagaaaagttctggtgggtcagcatgagaagggaaatagctgagttcgtagcactctgtgacgtctgtcaacgagtaaaggcagaacaccaaaggccagcagtcgttgaccgactcaccaaagtggctcacttcattccggtgcacactacctactcagggaagaaattagcagaactctatctatcaagaatcatgtgtttacatggtgtacctaagaagatcgtgtctgatcgaggaagccaattcacttcaaagttctggcagaaattacaagaagaattgggaacccggttgaatttcagcaccgcttaccatccacaaacagatggccagaccgagcgagtcaatcaaatactagaggatatgttgagagcctgtgcgcttgactttggtggggcatgggacaaaagcttgccgtatgctgagttctcgtacaacaacagttaccaagctagtctgcagatggcaccatttgaagcactgtatggacggaggtgtcgtactccgctcttctgggatcagacaggggaacgccagttgtttggtacagaagttttaaatgaggcagaagagaaagtcagagctgttagggaaagattgagaatcgcgcaatctcggcagaaaagctatgcagacaaccgccgaagggagctcgttttccaagtaggggattatgtgtatctccgtgtcactccgctcaggggagtacaccgcttccaaaccaaaggaaagttggcaccacgctttgtgggaccatatcggattttggaacgcaggggtgaagttgcttaccagcttgagcttccctccaacatgcttggcatccataatgtgttccacgtctctcagttgaagaaatgtttgagagttcctgaggaacaggcaagtccggatcaaatcgaaatccaggaagacttgacgtatgtggagaagccaactcgtatcctcgaaaccagcgagagaaagaccagaaacaaagtaataagattctgcaaggttcagtggagccaccactcagaggaagaggccacttgggaaagagaagatgagttgaaggccacccacccgcacctcttcgccagctcttccgaatctcggggtcgagattccgtttaa

SEQ ID NO: 14663 - DNA, 4578 bp, Oryza sativa
  Clone ID: TFbOSC416668j.C1.o19.fg
atggagataaggaatggttcacgcgactcgaacaacgccagtggcagcgaagagccgatcaatggagcacgtgccaacggtgcatctgacaacagtccgtccccaccacccgagaacccaacaattgctcaggtgttggacaatcagactcagatgatgacaatgatgatgcaacagatgcagcaacagtaccatcaggtgttgcagcaggtgcagcagcaagcacagctgcagcagcagaacctgcagtttggtcctccacctcctcagtccaaactgttagaatttcttcgtgtcaagccgcccactttctcaagcaccaccaacccaatcgaggcccacgactggcttcatgccattgagaagaagctgaatcttttgcaatgcaacgagcaggagaaggttgcttttgctacacaccagctacaaggtcccgcttctatttggtgggacaactacatggtgacccgtccagctggggcagaggttacttggacagagtttcgtcatagtttcaataaagcacaggttcccgagggaattgtggcacaaaagaagagagagttccgttccctgcaacaaggaaccagaacagttatagagtatttgcatgagttcaaccgcctcgcgcgctacgcccctgaggacgtgcgtaccgatgctgagaggcaggagaagtttctgtcgggtcttgatgatgaattgaccaaccagttgatctctagagattatgaggactttgagaagcttgtggacaaggctatccgtcaagaggagcagtgtaacaaaatgaaccgtaagaggaaggcagcccagttcaggactccccaggggaagtgtcagaagcctcgtttcacgatgggacatcagggtggaccttccaccatgattatccggcagcaccgtccctaccacccgggtaatttcaacaagaacaacaacagtggcagtcacagcagcctcaacccgactccaagtccattaatgattccagctcagtcagatcagtcagatcagctagctcagccagctctgccagaacagcccaagaggttgggagaaaaacccgaactctgcttcaattgtaacaaacccggacacacggttggaaagtgcccgaagccaagacatgctggacccaagttcgttcaggcccgtgttaatcatgcatctgcagaggaggcgcagtcagcaccagaggttatattgggcacattccccgtcaactcgacaccggcagtaatattgtttgattctggtgcaacccattccttaatttccaagcgttttgctggtgcacatgggttatccttagtgaagcttaagataccaatgcgagtgcatactcctggaggtggcatgaccacaactcactactgcccatctgtgacagttgaaattcaagggttgatttttccagccaacctcattcttctcgaatccaaggacctagatgtcatacttggaatggattggttaacaaggcacagaggagtgattgattgcgccagccgcaccatcaagttaaccaatgcaaaaggagaggtggtaaccttccagtctctagtgccgcggaagccagggatcagtttaaaccaggctgctggtgaagaacaagaggtagcagtggagaaaaccactaagaagctggaggatattcccatagtcagagagtatccagaggtttttccggatgatctgacaacaatgccaccaaaaagggatatcgagttccggattgacttggtacctggaactgcaccgatccacaagaggccttacagaatgggagccaacgagttggcggaagtcaagaagcaagttgatgaacagttacagaagggatacatccgcccgagcacgtcgccttggggtgctccggttatctttgtggaaaagaaagacaaaaccaagaggatgtgcgtggactaccgcgcactcaatgaggtcactattaagaacaagtaccctttgccaaggattgatgatctgttcgatcagctgaaaggagctactgtgttctctaagatagaccttcggtcaggctatcaccagttgaggatccgcgaagaggatattccaaagacagcattcatcactcggtacgggttgttcgaatgcacagttatgtctttcggactcactaacgcacctgccttcttcatgaatttgatgaacaaggtgtttatggaatttctagacaagtttgtcgtggttttcatcgatgacatacttatctactccaagtccgaggaagaacatgagcagcatcttcggctggtacttgaaaagttaaaagagcaccagctatatgccaagttcagcaagtgcgacttctggcttaaggaagttcagtttctcggtcacatcgtgaatgctcaaggagtagctgtggatccagcaaatgtggagtcagttaccaagtggaccccaccaaggacagtcactcaggttcggagtttcttaggacttgcgggttattaccgccggttcattgagaacttctctaaaattgctaagccaatgacacagctattgaagaaggaagaaaagtttatctggtctgctgaatgcaataggagttttgaagaactcaaacgacggttggtgtctgcaccagtcctaatcctgcctgatcagacgaaagattttcaggtctattgtgatgcatctcgccaggggctaggatgtgtgttgatgcaggatggcaaagtggtttcttatgcttcacggcagttgcgtcctcatgaaggcaactacccgacgcatgatctggaattagccgcagttgttcatgctttaaagatttggcggcactatctcatcggtaaccgttgtgaggtatatacagatcacaaaagtctaaagtacatcttcacccaacctgatctgaatctccgacaacgaagatggttggagctaatcaaagattatgatatgggaatacactatcatcccggcaaggctaatgtggtagcagatgccttgagcaggaagagttactgcaacgtcgcatgggtagaggaactatgctgtgaggttcaacgtgatttggaacatttgaaccttggtatagttgagcacggattcgtggctgccctagaggcacagcccacactggtggagcaggttcgcatagctcaggcaagtgatcctgaaatagccgagctcaaaaagaacatgagggtcggaaaagcccgaggttttgttgaggatgaacaaggaacaatctggatgggagaaagattgtgtgtacccgaaaacaaggaattaaaagacctgatactaaccgaggctcatcaaactcaatattccattcatcccggtagtactaagatgtaccaagacctcaaagaaaaattctggtgggtcagcatgagaagggaaatagctgagttcgtagcactctgtgacgtctgtcaacgagtaaaggcagaacaccaaaggccagcaggtctgctacagccacttcagattccagaatggaagtgggaagaaatcggaatggatttcatcaccggtttgcccaggacgtcatcggggcatgattctatttgggtagtcgttgaccgactcaccaaagtggctcacttcattccggtgcacactacctactcagggaagaaattagcagaactctatctggcaagaattatgtgtttacatggtgtacctaagaagatcgtgtctgatcgaggaagccaattcacttcaaagttctggcagaaattacaagaagaattgggaacccggttgaatttcagcaccgcttaccatccacaaacagatggccagaccgagcgagtcaatcaaatactagaggatatgttgagagcctgtgcgcttgactttggtggagcatgggacaaaagcttgccgtatgctgagttctcttacaacaacagttaccaagctagtctgcagatggcaccgtttgaagcactgtatggacgaaggtgtcgtactccgctcttctgggatcagacaggggaacgccagttgtttggtacagaagttttaaatgaggcagaagagaaagtcagagctgttagggaaagattgagaatcgcgcaatctcggcagaaaagctatgcagacaaccgccgaagggagctcgttttccaagtaggggattatgtgtatctccgtgtcactccgctcaggggagtacaccgcttccaaaccaaaggaaagttggcaccacgctttgtgggaccatatcggattttggaacgcaggggtgaagttgcttaccagcttgagcttccctccaacatgcttggcatccataatgtgttccacgtctcccagttgaagaaatgtttgagagttcctgaggaacaggcaagtccggatcaaatcgaaattcaggaagatctgacgtatgtggagaagccgactcgtatcctcgaaaccagcgagagaaggaccagaaacaaagtaataagattctgcaaggttcagtggagccaccactcagaggaagaggccacttgggaaagagaagatgagttgaaggccacccacccgcacctcttcaccagctcttccgaatctcggggtcgagattccgtttaa

SEQ ID NO: 14664 - DNA, 4689 bp, Oryza sativa
  Clone ID: TFbOSC418722j.C1.o18.fg
atggcggttaaggaccggttcacgggaaaccctgggagacttaccgtgcttaccacaagcgggagtgggtttgttgcttgtgggttagtcggcggtcgatattatgtgtcagtgatggagataaggaatggttcacgcgactcgaacaacgccagtggcagcgaagagccgatcaatggagcacgtgccaacggtgcatctgacaacagtctgtccccaccgcccgagaacccaacaattgctcaggtgttggacaatcagactcagatgatgacaatgatgatgcaacagatgcagcaacagtaccatcaggtgatgcagcaggtgcagcagcaagcacagctgcagcagcagaacctgcagtttggtcctccacctcctcagtccaaactgttagaatttcttcgtgtcaagccgcccactttctcaagcaccaccaacccaatcgaggcccacgactggcttcatgccattgagaagaagctgaaccttttgcaatgcaacgagcaagagaaggttgcttttgctacacaccagctgcaaggtcccgcttctgtttggtgggacaactacatggtgacccgtccagctggggcagaggttacttggacagagtttcgtcatagtttcaataaagcacaggttcccgagggaattgtggcacaaaagaagagagagttccattccctgcaacaaggaaccagaacagttatagagtatttgcatgagttcaaccgcctcgcgcgctacgcccctgaggacgtgcgtaccgatgccgagaggcaggagaagtttctgtctggtcttgatgatgaattgactaaccagttgatctctagagattatgaggactttgagaagctggtggataaggctatccgtcaggaggagcactgtaacaaaataaaccgtaagaggaaggcagctcagttcaggactccccaggggaagagtcagaagcctcgtttcacaatgggacatcacggtggaccttccaccatgattatccggcagcaccgtccctaccacccgggtaacttcaacaagaaccaccatagtgacagtcacaacaatagtgagcagcacagcctcaaccctactccgagttcactaaagattccagcccaatcagttcagccagctctgccagaacagcccaagaggttgggagaaaaacccgaactctgcttcaattgtaacaaacccggacacacggttggaaagtgcccgaagccaagacgtgccggacccaagttcgttcaggtccgtgttaatcatgcatctgcagaggaggcgcagtcagcaccagaggttatattgggcacattccccgtcaactcgacaccggcagtaatattgtttgattctggtgcaacccattccttcatttccaagcgttttgctggtgcacatgggttatctttagtgaagcttaagataccaatgcgagttcatactcctggaggtggcatgaccacaactcactactgcccatctgtgacagttgaaattcaagggttgatttttccagccaacctcattcttctcgaatccaaggacctagatgtcatacttggaatggattggttggcaaggcacagaggagtgattgattgcgccagccgcaccatcaagttgaccaatgcaaaaggagaggtggtaatcttccagtctccagtgccgcagaagccagggattagtttaaaccaggctgctggtgaagaacaagaggtagcagtggagaaaaccactaagaagctggaggatattcccatggtcagagagtatccagaggttttttcggatgatctgacaacaatgccaccaaaaagggatatcgagttccggattgacttggtacctggaactgcaccgatccacaagaggccttacagaatgggagccaacgagttggcggaagtcaagaagcaagttgatgaacagttacagaagggatacatccgcccgagcacgtcgccttggggtgctccggttatctttgtggaaaagaaagacaaaaccaagaggatgtgcgtggactaccgcacactcaatgaggtcactattaagaacaagtaccctttgccaaggattgatgatctgttcgatcagctgaaaggagctactgtgttctctaagatagaccttcggtcaggctatcaccagttgaggatccgcgaagaggatattccaaagacagcattcatcactcggtacgggttgttcgaatgcacagttatgtctttcggactcactaacgcacctgccttcttcatgaatttgatgaacaaggtgtttatggaatttctagacaagtttgtcgtggttttcatcgatgacatacttatctactccaagtccgaggaagaacatgagcagcatcttcggctggtacttgaaaagttaaaagagcaccagctatatgccaagttcagcaagtgcgacttctggcttaaggaagttcagtttctcggtcacatcgtgaatgctcaaggagtagctgtggatccagcaaatgtggagtcagttaccaaatggaccccaccaaggacagtcactcaggttcggagtttcttaggacttgcgggttattaccgccggttcattgagaacttctctaaaattgctaagccaatgacacagctattgaagaaggaagaaaagtttatctggtctgctgaatgcaataggagttttgaagaactcaaacgacggttggtgtctgcaccagtcttaatcctgcctgatcagacgaaagatttccaggtctattgtgatgcatctcgccaggggctaggatgtgtgttgatgcaggatggcaaagtggtttcttatgcttcacggcagttgcgtcctcatgaaggcaactacccgacgcatgatctggaattggccgcagtcgttcatgctttaaagatctggcggcactgtctcatcggtaaccgttgtgaggtatatacagatcacaaaagtctaaagtacatcttcacccaacctgatctgaatctccgacaacgaagatggtttgagctaatcaaagattatgatatgggaatacactatcatcccggcaaggctaatgtggtagcagatgccttgagcaggaagagttactgcaacgtcgcatgggtagaggaactatgctgtgaggttcaacatgatttggaacatttgaaccttggtatagttgagcacggattcgtggctgccctagaggcacagcccacactggtggagcaggttcgcatagctcaagcaagtgatcctgaaatagcagagctcaaaaagaacatgagggtcggaaaagcccgaggttttgttaaggatgaacaaggaacaatctggatgggagaaagattgtgtgtacccgaaaacaaggaattaaaagacctgatactaaccgaggctcatcaaactcaatattccattcatcccggtagtactaagatgtaccaagacctcaaagaaaagttctggtgggtcagcatgagaagggaaatagctgagttcgtagcactctgtgacgtctgtcaacgagtaaaggcagaacaccaaaggccagcaggtttgctacagccacttcagattccagaatggaagtgggaagaaatcggaatggatttcatcaccggtttgcccaggacgtcatcggggcatgattctatttgggtagtcgttgaccgactcaccaaagtggctcacttcattccggtgcacactacctactcagggaagaaattagcagaactctatctggcaagaattatgtgtttacatggtgtacctaagaagatcgtgtctgatcgaggaagccaattcacttcaaagttctggcagaaattacaagaagaattgggaacccggttgaatttcagcaccgcttaccatccacaaacagatggccagaccgagcgagtcaatcaaatactagaggatatgttgagagcctgtgcgcttgactttggtggagcatgggacaaaagcttgccgtatgctgagttttcttacaacaacagttaccaagctagtctacagatggcaccgtttgaagcactgtatggacggaggtgtcgtactccgctcttctgggatcagacaggggaacgccagttgtttggtacagaagttttaaatgaggcagaagagaaagtcagagctgttagggaaagattgagaatcgcgcaatctcggcagaaaagctatgcagacaaccgccgaagggagctcgttttccaagtaggggattatgtgtatctccgtgtcactccgctcaggggagtacaccgcttccaaaccaaaggaaagttggcaccacgctttgtgggaccatatcggattttggaacgcaggggtgaagttgcttaccagcttgagcttccctccaacatgcttggcatccataatgtgttccacgtctcccagttgaagaaatgtttgagagttcctgaggaacaggcaagtccggatcaaatcgaaatccaggaagacttgacgtatgtggagaagccaactcgtatcctcgaaaccagcgagagaaagaccagaaacaaagtaataagattctgcaaggttcagtggagccaccactcagaggaagaggccacttgggaaagagaagatgagttgaaggccacccacccgcacctcttcgccagctcttccgaatctcggggtcgagattccgtttaa

SEQ ID NO: 14665 - DNA, 4674 bp, Oryza sativa
  Clone ID: TFbOSC420229j.C1.o1.fg
atggcaattaaggaccggttcacgggaaaccctgggacacttaccgtgcttaccacaagcgcgagtggctgttttactgctttcaactactgctttgaaatgcctgctttatgcaaaagaacccctagcttcctttggttatatcctgcatcatacctcctcttccggtttgttgcttgtgggttagtcggcggtcgatatcatgtgtcagtgatggagataaggaatggttcacgcgactcgaacaacgccagtggcagcgaagagccgatcaatggagcacgtgccaacggtgcatctgacaacagtccgtccccaccgcccgagaacccaacaattgctcaggtgttggacaatcagactcagatgatgacaatgatgatgcaacagatgcagcaacagtaccatcaggtgttgcagcaggtgcagcagcaagcacagctgcagcagcagaacctgcagtttggttctccacctcatcagtccaaactgctagaatttcttcgtgtcaagccgcccaccttctcaagcaccaccaacccaatcgaggcccacgactggcttcatgccattgagaagaagctgaatcttttgcaatgcaacgagcaagagaaggttgcttttgctacacaccagctgcaaggtcccgcttctgtttggtgggacaactacatggtgacccgtccaactggggcagaggttacttggacagagtttcgtcatagtttcaataaagcacaggttcccgagggaattgtggcacaaaagaagagagagttccgttccctgcaacaaggaaccagaacagttatagagtatttgcatgagttcaaccgcctcgcgcgctacgcccctgaggacgtgcgtaccgatgccgagaggcaggagaagtttttgtctggtcttgatgatgaattgactaaccagttgatctctagagattatgaggactttgagaagctggtggataaggctatccgtcaggaggagcactgtaacaaaataaaccgtaagaggaaggcagctcagttcaggactccccaggggaagagtcagaagcctcgtttcacgatgggacatcacggtggaccttccaccatgattatccggcagcaccgtccctaccacccgggtaacttcaacaagaaccaccatagtgacagtcacaacaatagtgagcagcacagcctcaaccctactccgagttcactaaagattccagctcaatcagttcagccagctctgccagaacagcccaagaggttgggagaaaaacccgaactctgcttcaattgtaacaaacccggacacacggttggaaagtgcccgaagccaagacgtgccggacccaagttcgttcaggcccgtgttaatcatgcatctgcagaggaggcgcagtcagcaccagaggttatattgggcacattccccgtcaactcgacaccggcagtaatattgtttgattctggtgcaacccattccttcatttccaagcgttttgctggtgcacatgggttatctttagtgaagcttaagataccaatgcgagttcatactcctggaggtggcatgaccacaactcactactgcccatctgtgacagttgaaattcaagggttgatttttccagccaacctcattcttctcgaatccaaggacctagatgtcatacttggaatggattggttgacaaggcacagaggagtgattgattgcgccagccgcaccatcaagttaacccatgcaaaaggagaggtggctgttggtgaagaacaagaggtagcagtggagaaaaccactaagaagctggaggatattcccatagtcagagagtatccaggggtttttccggatgatctgacaacaatgccaccaaaaagggatatcgagttccggattgacttggtacctggaactgcaccgatccacaagaggccttacagaatgggagccaacgagttggcggaagtcaagaagcaagtcgatgaacagttacagaagggatacatccgcccgagcacgtcgccttggggtgctccggttatctttgtggagaagaaagacaaaaccaagagaatgtgcgttgactaccgcgcacacaatgaggtcaccatcaagaacaagtatcctttgccaaggattgatgatctgtttgatcagttgaaaggagctactgtgttctctaagatagacctgcgatcaggctatcaccagttgaggatccgtgaagaggatattccaaagacagcattcatcactcggtacgggttgttcgaatgcacagttatgtctttcggactcactaacgcacctgccttcttcatgaatttgatgaacaaggtgtttatggaatttctagacaagtttgtcgtggttttcatcgatgacatacttatctactccaagtccgaggaagaacatgagcagcatcttcggctggtacttgaaaagttaaaagagcaccagctatatgccaagttcagcaagtgcgacttctggcttaaggaagttcagtttctcggtcacatcgtgaatgctcaaggagtagctgtggatccagcaaatgtggagtcagttaccaaatggaccccaccaaggacagtcactcaggttcggagtttcttaggacttgcgggttattaccgccggttcattgagaacttctctaaaattgctaagccaatgacacagctattgaagaaggaagaaaagtttatctgctctgctgaatgcaataggagttttgaagaactcaaacgacggttggtgtctgcaccagtcttaatcctgcctgatcagacgaaagatttccaggtctattgtgatgcatctcgccaggggctaggatgtgtgttgatgcaggatggcaaagtggtttcttatgcttcacggcagttgcgtcctcatgaaggcaactacccgacgcatgatctggaattggccgcagttgttcatgctttaaagatttggcggcactatctcatcggtaaccgttgtgaggtatatacagatcacaaaagtctaaagtacatctttactcaacctgatttgaatctcagacagcgaagatggttggagctgatcaaggattatgatatgggaatacattatcatcccggcaaggctaatgtggttgcagatgccttgagcaggaagagctactgcaatgttgcatgggtagagcaactatgttgtgaggttcaacgcgatttggaacatctgaaccttggtatagttgagcacggattcgtggctgccctagaggcacagcccacactggtggagcaggttcgcatagctcaagcaagtgatcctgaaatagcagagctcaaaaagaacatgagggtcggaaaagcccgaggttttgttgaggatgaacaaggaacaatctggatgggagaaagattgtgtgtacccgaaaacaaggaattaaaagacctgatactaaccgaggctcatcaaactcaatattccattcatcctggtagtactaagatgtaccaagacctcaaagagaagttttggtgggcagaacaccaaaggccagcaggtttgctacagccacttcagattccagaatggaagtgggaagaaatcggaatggatttcatcaccggtttgcccaggacgtcatcggggcatgattctatttgggtagtcgttgaccgactcaccaaagtggctcacttcattccggtgcacactacctactcagggaagaaattagcagaactctatctagcaagaatcatgtgtttacatggtgtacctaagaagatcgtgtctgatcgaggaagccaattcacttcaaagttctggcagaaattacaagaagaattgggaacccgtctaaacttcagcactgcttaccatccacaaacagatggccagaccgagcgagtcaaccaaatactagaggatatgttgagagcctgtgcgcttgacttgggtggagcatgggacaaaagcttgccgtatgctgagttctcttacaacaacagttaccaagctagtctgcagatggcaccatttgaagcactgtatggacggaggtgtcgtactccgctcttctgggatcagacaggggaacgccagttgtttggtacagaagttttaaatgaggcagaagagaaagtcagagctgttagggaaagattgagaatcgcgcagtctcggcagaaaagctatgcagacaaccgccgaagggagctcgttttccaagtaggggattatgtgtatctccgtgtcactccgctcaggggagtacatcgcttccaaaccaaaggaaagttggcaccacgctttgtgggaccatatcggattttggaacgtagaggtgaagttgcttaccagctcgagcttccctccaacatgcttggcatccataatgtgttccacgtctcccagttgaagaaatgtttgagagttcctgaggaacaggcaagtccggatcaaatcgaaatccaggaagacttgacgtatgtggagaagccaactcgtatcctcgaaaccagcgagagaaagaccagaaacaaagtaataagattctgcaaggttcagtggagccaccactcagaggaagaggccacttgggaaagagaagatgagttgaaggccacccacccgcacctcttcgccagctcttccgaatctcggggtcgagattccgtttaa

SEQ ID NO: 14666 - DNA, 4221 bp, Oryza sativa
  Clone ID: TFbOSC420231j.C1.o1.fg
atggcagttaaggaccggttcacgggaaaccctgggagacttaccgtgcttaccacaagcgggagtggggatttaatgcacattcagcttagaaattctggttcgagaatttctgggcgtgacaagttggtatcagagccgactttgaccatggagataaggaatggttcacgcgactcgaacaacgccagtggcagcgaagagccgaacaatggagcacgtgccaacggtgcatctgacaacagtccgtccccaccgcccgagaacccaacaattgctcaggtgttggacaatcagactcagatgatgacaatgatgatgcaacagatgcagcaacagtaccatcaggtgttgcagcaggtgcagcagcaagcacagctgcagcagcagaacctgcagtttggtcctccacctcctcagtccaaactgttagaatttcttcgtgtcaagccgcccaccttctcaagcaccaccaacccaatcgaagcccacgactggcttcatgccattgagaagaagctgaatcttttgcaatgcaacgagcaggagaaggttgcttttgctacacaccagctacaaggtcccgcttctatttggtgggacaactacatggtgacccgtccagctggggcagaggttacttggacagagtttcgtcatagtttcaataaagcacaggttcccgagggaattgtggcacaaaagaagagagagttccgttccctgcaacaaggaaccagaacagttatagagtatttgcatgagttcaaccgcctcgcgcgctacgcccctgaggacgtgcgtaccgatgccgagaagcaggagaagtttctgtctggtcttgatgatgaattgactaaccagttgatctctagagattatgaggactttgagaagctggtggataaggctatccgtcaggaggagcacggtaacaaaataaaccgtaagaggaaggcagctcagttcaggactccccaggggaagagtcagaagcctcgtttcacgatgggacgtcacggtggaccttccaccatgattatccgacagcaccgtccctaccacccgggtagcttcaacaagaaccaccataatggcagtcacaacaacagtgagcagcacagtctcaaccctactccgagttcactaaagattccagctcaatcagttcagccagctctgccagaacagcccaagaggttgggagaaaaacccgaactctgcttcaattgtaacaaacccggacacacggttggaaagtgcccgaagccaagacgtgctggacccaagttcgttcaggcccgtgttaatcatgcatctgcagaggaggcgcagtcagcaccagaggttatattgggcacattccccgtcaactcgacaccggcagtaatattgtttgattctggtgcaacccattcctttatttccaagcgttttgctggtgcacatgggttatctttagtgaagcttaagataccaatgcgagttcatactcctggaggtggcatgaccacaactcactactgcccatctgtgacagttgaaattcaagggttgatttttccagccaacctcattcttctcgaatccaaggacctagatgtcatacttggaatggattggttgacaaggcacagaggagtgattgattgcgccagccgcaccatcaagttaacccatgcaaaaggagaggtggtaaccttccagtctctagtgccgcggaagccagggatcagtttaaaccaggctgctggtgaagaacaagaggtagcagtggagaaaaccactaagaagctggaggatattcctatagtcagagagtatccagaggtttttccggacgatctgacaacaatgccaccaaaaagggatatcgagttccggattgacttggtacctggaactgcaccgatccacaagaggccttacagaatgggagccaacgagttggcggaagtcaagaagcaagtcgatgaacagttacagaagggatacatccgtccgagcacgtcgccttggggtgctccggttatctttgtggagaagaaagacaaaaccaagagaatgtgcgttgactaccgcgcactcaatgaggtcaccatcaagaacaagtatcctttgccaaggattgatgatctgtttgatcagttgaaaggagctactgtgttctctaagatagacctgcgatcaggctatcaccagttgaggatccgcgaagaggatattccaaagacagcattcatcactcggtacgggttgttcgaatgcacagttatgtctttcggactcactaatgcacctgccttcttcatgaatttgatgaataaggtgtttatggaatttctagacaagtttgtcgtggttttcatcgatgacatacttatctattccaagtccgaggaagaacatgagcagcatcttcgactggtacttgaaaagttaaaggagcaccagctatatgccaagttcagcaagtgcgacttctggcttaaggaagttcagtttctcggtcacatcgtgaatgctcaaggagtagcggtggatccagcaaatgtggagtcggttaccaaatggaccccaccaaggacagtcactcaggttcggagtttcttaggacttgcgggttattaccgccggttcattgagaacttctctaaaattgctaagccaatgacacagctattgaagaaggaagaaaagtttatctggtctgctgaatgcaataggagttttgaagaactcaaacgacggttggtgtctgcaccagtcttaatcctgcctgatcagacgaaagatttccaggtctattgtgatgcatctcgccaggggctaggatgtgtgttgatgcaggatggcaaagtggtttcttatgcttcacggcagttgcgtcctcatgaaggcaactacccgacgcacgatctggaattggccgcagtcgttcatgctttaaagatttggcggcactatctcatcagtaaccgttgtgaggtatatacagatcacaaaagtctaaagtacatcttcactcaagctgatttgaatctcagacagcgaagatggttggagctgatcaaggattatgatatgggaatacattatcatcccggcaaggctaatgtggttgcagatgccttgagcaggaagagctactgcaatgttgcatgggtagagcaactatgttgtgaggttcaacgcgatttggaacatctgaaccttggtatagttgagcacggattcgtggctgccctagaggcacagcccacactggtggagcaggttcgcatagctcaagcaagtgatcctgaaatagcagagctcaaaaagaacatgagagttggaaaagcccgaggttttgttgaggatgaacaaggaacaatctggatgggagaaagattgtgtgtacccgaaaacaaggaattaaaagacctgatactaaccgaggctcatcaaactcagtattccattcatcccggtagtactaagatgtaccaagacctcaaagagaagttttggtgggtcagcatgagaagggaaatagctgaattcgtagcactctgtgacgtctgtcaacgagtaaaggcagaacaccaaaggccagcaggtttgctacagccacttcagattccagaatggaagtgggaagaaatcggaatggatttcatcaccggtttgcccaggacgtcatcggggcatgattctatttgggtagtcgttgaccgactcaccaaagtggctcacttcattccggtgcacactacctactcagggaagaaattagcagaactctatctagcaagaatcatgtgtttacatggtgtacctaagaagatcgtgtctgatcgaggaagccaattcacttcaaagttctggcagaaattacaagaagaattgggaacccgtctaaacttcagcactgcttaccatccacaaacagatggccagaccgagcgagtcaaccaaatactagaggatatgttgagagcatgtgcgcttgactttggtggagcatgggacaaaagcttgccgtatgctgagttctcttacaacaacagttaccaagctagtttgcagatggcaccgtttgaagcactatatggacgaaggtgtcgtactccgctcttctgggatcagacaggggaacgccaattgtttggtacagaagttttaaatgaggcagaagagaaagtcagagctgttagggaaagattgagaatcgcgtag

SEQ ID NO: 14667 - DNA, 6047 bp, Oryza sativa
  Clone ID: TFbOSC420276j.C1.o1.np
atggcggccggacctcccgcacctattccttccccgccggccgctctctcccccttccaaccctatataaaccctccctgcacctcctccgtccgtttccgcctctcgccgcccttcctcctcgccggaatcgagctcgcgccgtcgctctctctctccgccgtcgccgccgagctccggtccaccgtcgttgtcgccccggaccacctcccacctcggcaccgcctccttcggcttcgccgcatcctcgccgacctcgtccacccctccgtttcgctcgtcgaccgccggagcgccgccgtccccgtcgacccgaaccgcgccgccgccttcctccgctccggccgccttttcgtcgtcgccgtcgacctagggtgagccgtggaccgccgcctcatttccccctttccctcccttctctcggccgccgctccgccgtgcctatggccgccgccggcgaccataggggcgcgggcgcgccgcctcccgccggccgcgccgccgtggccgccttcgggcgcaccgagcggcttccgcgtggggcccggccgtcagccgctcgcgccctcgggtgtggctgacgcgtggggcccacggcgccggccggtgtgagcccgggtgcacccggtccaccgtggacccacctcggccatataaggaccggtcttcgggcctctgttgcaaagcgctaccgtacttccacatgtctagtgggacaaatgaaggctacacgagctacggcctggtagccaagatgtcatggcacagggccggtgtcctgctgctaggggctcagtcctgcctacctgtcccgggggttccggccgtaggtggggttgggtcgatgtacacctctgatcagagtataatctattcgaatagccgcgccctcggttatgggcaagccgagcaatgtacccaaatggccggcagcatcaaccgtcgtggtctggacctgactggattcgttttggaactgcggggcatgtgcgttgttctggggtatccgcatggagtggactaccagggcaagcagctcccggagcaggagggtgacgatgcagagccccacgctgcttgggaggttactgcagtgatcctcactggctcacccgagaggacttcgttggcggtcaccgcgggtggagattccttctccgctgcttgccagaacgccgcactcctcgccatcggcactcttcaccagcgctacccggacgagttgcagcacttgccctaccgctaccaccctcgtcgcggaggagcccgcgactacgccaccttccgggatgctagctcggaggatgacgctaccatcatgcacctggcgcacatggtggaggcatacgacgcggcccgtatcgacttccatcagatggtgcgtcgcgggttggtcaagaacaacatgaagatcctggagctgcgtcaggagaatctgcagttgaagaaggacttagacgcagtggaggcgcagctgcgtcagctcaagatcgcccagggagaggtctgtcgccccaagcgtcgccgcgtctgccgcagcctgaagatcaccgcccgcaagagtacctccaggcccgagcttgttcgtcagtccctggcgtggacctgcttcgtcgagacccctcgtgccgagcccgcgcccgtggttcctcaggaggatggagcctccggcgttggcagtacggaggatgcgctgttgctcaccttccatggtgacaaccaggagaagtgctgctaccggtgaaggcagtcaccccgaaggcagcaaccacaacaaccatgtcagcccacctccacctccttctccgcctccaccaccaccaccagacaccaacgccatcctcacccaaatcgtcgcccagtaggccaacatgatggctgctttcctccaccacatccaaaatccgccacaacataatgctccaccaccacccccacaacactctaaactcgccgagttcctccgcatctgtccgcctaccttctctagctctaataaccccgtggatgcattggattggttgcatgccgtggagaaaaagttagacaccgtgcagtgcagtgatgaggagaaagtcatcttcgccgcccaccaactgcaggggcccgcatctctatggtggaaccatttccaggctacgcagctagaggggcaacctattacttgggcccgcttcaccgccgctttccagagaacccatgtgcccgccggagtcatggcccttaagaaaagggaattccgagagttgaagcaaggcaaccgctccgtgatggagtatttgcatgagtttaacaacctggcctggtacgccccggaggatgttcgtgaagatgaggagaagtaagagaagttcttggcaggaatggatcctgagctgtccgtgcgtctggtctccggggactactcggatttccaacgtctggtggacaagagcatccgcttggaagccaagcacaaggaactggagtcgcacaagcgtcgcttggcgaatttccgcaatcaacagggggctaaccaaagggtccgctacaccaatccctatccagggggatcatcctcgcagcagcaacagcagcagcaacctcgctccgcgccccgacctcaattcgtggtgcgcatcccacagccgcagcaacagcagagtcagcaagggactcgtgcgccccgtccccctacgccagccgtgcagcctggtcaaggccgcagggacgttcaaggtcagcagcgtctgtgcttcaactgcttcgagcatgggcactttgcggataaatgcccaaagccgaggcgccagcaaggccaagcgcctccccgctccaacaacggtggtaaggatgtcattcggggacgtgtgaaccacgtgacggccgaggacgtgctgacaactccagacatcatcgttggtacgttcctcattcattccatccctgctaccattttgttcgactctggagcttcccactcgtttatatctgtgccattcgtggggagaaatcggttggggatagaaaggcttaggaaccctctgctcatcaccacccctggaggggttatgacagcaaagtattatagccctgccattcctatagaaatccagggaattccttttccctcggatctgattcttctagacaccaagaacttggatgtgatccttgggatgaattggttggctcaattccaaggagtagtggattgcgcaagacgcactgtcactctgtaccgagggccggaacaaccggttgttttctttgcacccccaacttctgtcggtagttcagaacttcatcagataggactgtcagaaatccccatcgtcagagagttcggagacgtgtttccagaaaaactacccggtatgctgccgaagcgagagattgagttccggatagatcttgctccaggaaccactcccctgtacaagcgaccctaccgtatggcagcaaatgaactggccgaagtcaagaaacagttggaagagttgaaagaaaaggggtatatacggccgagtacttccccctggggtgctcctgtgatttttgtggagaagaaagacaagacaaagaggatgtgcgttgactacagagctctcaatgaagttactatcaaaaacaagtaccctcttccccggatcgatgatctgttcgatcagcttaaaggtgccactgtattctccaagattgatcttcgttccggatatcaccaattacgtattcgtgaagaagatatcccgaagaccgcattcaccacgcgatacggactgtatgaattcacggtgatgtcgttcggtttaaccaatgctcctgccttcttcatgaacttagtgaacaaagtgttcatggaatacctggataagtttgttgtggttttcattaacgacattctggtgtactcacaatcagaggaagaccatcagcaccatctccgtctggtgttgggaaagttgcgggaacatcaattgtatgccaaacttagcaagtgtgagttttggttgtccgaagtcaaattcttagggcacgtgatatctgctaaaggagtcgctgtggaccccgaaacagtgaccgccgtcattgattggaagcaacccaagacagtcactcaaattcgcagcttcttgggtttggcaggatactaccggaggttcatcgagaacttctccaaaatcgctcgacccatgacacagttgttgaagaaagaagagaaatttgtgtggagcccgcaatgcgagaaggcattccaaactctcaaggaaaggttggtttcctcgccagttttagtctgaccggatactcgcaaggacttcatggtgtactgtgacgcttcgcgccaaggattggggtgcgtgctcatgcaggaaggtcatgtggtggcctatgcctcaaggcagctacggcctcatgaaggcaactaccctacccatgatttggagttagccgcggtagttcatgctctaaaaatctggcggcactatctcattgggaatcgctgtgaaatatatactgatcataagagtttgaaatacatcttcacccagtcggatctgaatcttcggtagaggagatggttagaactcatcaaggattatgatgtgggaattcactatcatcctggtaaggccaacgtggtcgccgacgctctaagtcgaaaaagccattgcaacactcttgacgtccgtggcattccacccgaacttaatcaacagatggaagccttgaacctaagcatagttggtcgtggattcttggctacgctggaagccaagcccaccttgctcgatcaaatccgcgaggctcagaagaatgatccggatatgcatggactcctcaagaatatgaaacagggtaaagccgctggtttcacagaggatgaacacggaaccctatggaacggaaatcggcgtgtcaaggcagagcaccaacgaccggccggacttctccaacctctccaagtaccagaatggaaatgggatgaaattgggatggatttcatcaccggacttccaaaaacccaaggcggatatgattctatatgggtagttgtggaccgactaaccaaggtagctcggtttattcctgtgaagaccacctatggagggaacaaactagccgagctctacttcgctagaatcgtgagtctccatggcgttcctaagaaaattgtatctgataggggaagccaattcacctctcacttttggaagaagctccaagaagagctgggtaccagattaaatttcagcaccgcgtatcacccgcagacagatggacagaccgagcgtctaaatcagatcctagaagatatgcttcgctcatgtgtcctagatttcgggaagacctgggataagagtctcccctatgccgagttctcctacaataacagctaccaagccagcttataaatggcaccctatgaagcgttgtatggacgcaaatgccggacaccgctattgtgggaccaagttggggaaagccaagtgttcgggactgatatcctgagagaggctgaagctaaagtcagaaccattcgggataatctaaaggtggcacagtcccggcagaagagttatgcagataaccgacgccgtaacctggaattcgcagtggacgattttgtgtaccttcgggtcacgccattgcgaggtgtacacatgtttcagacgaaagggaagctcgcacctcggtttgtgggtcctttccgtatcattgctcgacgcggggaagtcgcttaccagttggagctgcccgcctccttgggcaacgtgcatgatgtgttccatgtgtcgcaactcaagaaatgtcttcgagtgccatccgagcaggccgattcagagcaaattgaagttcgcgaagacttgacctacgtggagaggcccgtgaaaatcctggacaccatggagcgcaggaccaggaactgggtaatccgtttttgcaaggtccaatggagcaaccacgccgaggaagaagctacatgggagcgtgaagacgagctgaaggcagcccatcccaatctcttcggcagttcttccgaatctcggggtcgagattccgtt

SEQ ID NO: 14668 - DNA, 4422 bp, Oryza sativa
  Clone ID: TFbOSC421431j.C1.o24.fg
atggagacaaggaatggttcacgcgactcgaacaacgctagtggcagcgaagagccgatcaatggagcacgtgccaacggtgcatctgacaacagtccgtccccaccgcccgagaacccaacaattgctcaggtgttggacaatcagactcagatgatgacaatgatgatgcaacagatgcagcaacagtaccatcagtccaaactgttagaatttcttcgtgtcaagccgcccaccttctcaagcaccaccaacccaatcgaagcccacgactggcttcatgccattgagaagaagctgaatcttttgcaatgcaacgagcaggagaaggttgcttttgctacacaccagctgcaaggccccgcttctgtttggtgggacaactacatggtgacccgtccaactggggcagaggttacttggacagagtttcgtcatagtttcaataaagcacaggttcccgagggaattgtggcacaaaagaagagagagttccgttctctgcaacaaggaaccagaacagttatagagtatttgcatgagttcaaccgcctcgcgcgctacgcccctgaggacgtgcgtaccgatgccgagaagcaggagaagtttctgtctggtcttgatgatgaattgactaaccagttgatctctagagattatgaggactttgagaagctggggaagagtcagaagcctcgtttcacaatgggacatcacggtggaccttccaccatggttatccgaccgcaccgtccctaccacccgggtagcttcaacaagaaccaccatagtggcagtcacaacaacagtgagcagcacagtctcaaccctactccgagttcactaaagattccagctcaatcagttcggccagctctgccagaacagcccaagaggttgggagaaaaacccgaactctgcttcaattgtaacaaacccggacacacggttggaaagtgcccgaagccaagacgtactggacccaagttcgttcaggcccgtgttaatcatgcatctgcagaggaggcgcggtcagcaccagaggttatattgggcacatttcccgtcaactcgacaccggcagtaatattgtttgattctggtgcaacccattccttcatttccaagcgttttgctggtgcacatgggttatctttagtgaagcttaagataccaatgcgagttcatactcctggaggtggcatgaccacaactcactactgcccatctgtgacagttgaaatccaagggttgatttttccagccaacctcattcttctcgaatccaaggacctagatgtcatacttggaatggattggttgacaaggcacagaggagtgattgattgcgccagccgcaccatcaagttgaccaatgcaaaaggagaggtggtaaccttccagtctccagtgccgcggaagccagggatcagtttaaaccaggctgctggtgaagaacaagaggtagcagtggagaaaaccactaagaagctggaggatattcccatagtcagagagtatccagaggtttttccggatgatctgacaacaatgccaccaaaaagggatatcgagttccggattgacttggtacctggaactgcaccgatccacaagaggccttacagaatgggagccaacgagttggcggaagtcaagaagcaagttgatgaacagttacagaagggatacatccgcccgagcacgtcgccttggggtgctccggttatctttgtggagaagaaagacaaaaccaagaggatgtgcgttgactaccgcgcactcaatgaggtcaccatcaagaacaagtatcctttgccaaggattgatgacctgtttgatcagttgaaaggagctactgtgttctctaagatagacctgcgatcaggctatcaccagttgaggatccgcgaagaggatattccaaagacagcattcatcactcggtacgggttgttcgaatgcacagttatgtctttcggacttactaatgcacctgccttcttcatgaatttgatgaacaaggtgtttatggaatttctagacaagtttgtcgtggttttcatcgatgacatacttatctactccaagtccgaggaagaacatgagcagcatcttcggctggtacttgaaaagttaaaagagcaccagctatatgccaagttcagcaagtgcgacttctggcttaaggaagttcagtttctcggtcacatcgtgaatgctcaaggagtagctgtggatccagcaaatgtggagtcagttaccaagtggaccccaccaaggacagtcactcaggttcggagtttcttaggacttgcgggttattaccgccggttcattgagaacttctctaaaattgctaagccaatgacacagctattgaagaaggaagaaaagtttatctggtctgctgaatgcaatcggagttttgaagaactcaaacgacggttggtgtctgcaccagtcttaatcctgcctgatcagacgaaagattttcaggtctattgtgatgcatctcgccaggggctaggatgtgtgttgatgcaggatggcaaagtggtttcttatgcttcacggcagttgcgtcctcatgaaggcaactacccgacgcacgatctggaattggccgcagtcgttcatgctttaaagatttggcggcactatctcatcggtaaccgttgtgaggtatatacagatcacaaaagtctaaagtacatctttactcaacctgatttgaatctcagacagcgaagatggttggagctgatcaaggattatgatatgggaatacattatcatcccggcaaggctaatgtggttgcagatgccttgagcaggaagagctactgcaatgttgcatgggtagagcaactatgttgtgaggttcaacgcgatttggaacatctgaaccttggtatagttgagcacggattcgtggctgccctagaggcacagcccacactggtggagcaggttcgcatagctcaagcaagtgatcctgaaatagcagagctcaaaaagaacatgagagttggaaaagcccgaggttttgttgaggatgaacaaggaacaatctggatgggagaaagattgtgtgtacccgaaaacaaggaattaaaagacctgatactaaccgaggctcatcaaactcagtattccattcatcccggtagtactaagatgtaccaagacctcaaagagaagttttggtggatcagcatgagaagggaaatagctgaattcgtagcactctgtgacgtctgtcaacgagtaaaggcagaacaccaaaggccagcaggtttgctacagccacttcagattccagaatggaagtgggaagaaatcggaatggatttcatcaccggtttgcccaggacatcatcggggcatgattctatttgggtagtcgttgaccgactcaccaaagtggctcacttcattccggtgcacactacctactcagggaagaaattagcagaactctatctggcaagaattatgtgtttacatggtgtacctaagaagatcgtgtctgatcgaggaagccaatttacttcaaagttctggcagaaattacaagaagaattgggaacccggttgaatttcagcaccgcttaccatccacaaacagatggccagaccgagcgagtcaatcaaatactagaggatatgttgagagcctgtgcgcttgactttggtggggcatgggacaaaagcttgccgtatgctgagttctcgtacaacaacagctaccaagctagtctgcagatggcaccgtttgaagcactgtatggacggaggtgtcgtaccccgctcttctgggatcagacaggggaacgccagttgtttggtacagaagttttaaatgaggcagaagagaaagtcagagctgtcagggaaagattgagaatcgtgcaatctcggcagaaaagctatgcagacaaccgacgaagggagctcgctttcgaaacaggggattatgtgtatctccgtgtcactccgctcaggggagtacatcgcttccaaaccaaaggaaagttggcaccacgctttgtgggaccatacaggatcttggaacgtagaggtgaagttgcttaccagcttgagcttccctccaacatgcttggcatccataatgtgttccacgtctctcagttgaagaaatgtttgagagttcctgaggaacaggcaagtccggatcacatcgaaattcaggaagatctgacatatgtggagaagccgactcgtatcctcgaaaccagcgagagaaggaccagaaacaaagtaataagattctgcaaggttcagtggagccaccactcagaggaagaggccacttgggaaagagaagatgagttgaaggccacccacccgcacctcttcgccagctcttccgaatctcggggtcgagattccgtttaa

SEQ ID NO: 14669 - DNA, 4698 bp, Oryza sativa
  Clone ID: TFbOSC422389j.C1.o1.fg
atggcggttaaggaccggttcacgggaaaccctgggagacttaccgtgcttaccacaagcgggagtgggcaaaagaaccccgagcttcctttggttatatcctgcatcatacctcctcttccgatggagacaaggaatggttcacgcgactcgaacaacgccagtggcagcgaaaagccgatcaatggagcacgtgccaacagtgcatctgacaacagtccgtccccaccgcccgagaacccaacaattgctcaggtgttggacaatcagactcagatgatgacaatgatgatgcaacagatgcagcaacagtaccatcaggtgttgcaacaggtgcagcagcaagcacagcagcagcagcagaacctgcaatttggtcctccgcctcctcagtccaaattgttagaatttcttcgtgtcaagccgcccactttctcaagcaccaccaacccaatcgaggcccacgactggcttcatgccattgagaagaagctgaatcttttgcaatgcaacgagcaagagaaggttgcttttgctacacaccagctgcaaggtcccgcttctgtttggtgggacaactacatggtgacccgtccaactggggcagaggttacttggacagagttttgtcatagtttcaataaagcacaggttcccgagggaattgtggcacaaaagaagagagagttccgttccctgcaacaaggaaccagaacagttatagagtatttgcatgagttcaaccgcctcgcgcgctacgcccctgaggacgtgcgtaccgatgacgggaggcaggagaagtttctgtctggtcttgatgatgaattgactaaccagttgatctctagagattatgaggactttgagaagctggtggataaggctatccgtcaggaggagcactgtaacaaaataaaccgtaagaggaaggcagctcagttcaggactccccaggggaagagtcagaagcctcgtttcacgatgggacatcacggtggaccttccaccatgattatccggcagcaccgtccctaccacccgggtaacttcaacaagaaccaccatagtgacagtcacaacaacagtgagcagcacagcctcaaccctactctgagttcactaaagattccagctcaatcagttcagccagctctgccagaacagcccaagaggttgggagaaaaacccgaactctgcttcaattgtaacaaacccggacacacggttggaaagtgcccgaagccaagacgtgccggacccaagttcgttcaggcccgtgttaatcatgcatctgcagaggaggcgcagtcagcaccagaggttatattgggcacattccccgtcaactcgacaccggcagtaatattgtttgattctggtgcaactcattccttcatttccaagcgttttgctggtgcacatgggttatctttagtgaagcttaagataccaatgcgagttcatactcctggaggtggcatgaccacaactcactactgcccatctgtgacagttgaaattcaagggttgatttttccagccaacctcattcttctcgaatccaaggacctagatgtcatacttggaatggattggttgacaaggcacagaggagtgattgattgcgccagccgcaccatcaagttaaccaatgcaaaaggagaggtggtaactttccagtctccagtaccgcggaagccagggattagtttaaaccaggctgctggtgaagaacaagaggtagcagtggagaaaaccactaagaagctggaggatattcccatagtcagagagtatccagaggtttttccggatgatctgacaacaatgccaccaaaaagggatatcgagttccggattgacttggtacctggaactgcaccgatccacaagaggccttacagaatgggagccaacgagttggcggaagtcaagaagcaagttgatgaacagttacagaagggatacatccgcccgagcacgtcgccttggggtgctccggttatctttgtggagaagaaagacaaacccaagagaatgtgcgttgactaccgcgcactcaatgaggtcaccatcaagaacaagtatcctttgccaaggattgatgacctatttgatcagttgaaaggagctactgtgttctctaagatagacctgcgatcaggctatcaccagttgaggatccgcgaagaggatattccaaagacagcattcatcactcggtacgggttgttcgaatgcacagttatgtctttcggactcactaatgcacctgccttcttcatgaatttgatgaacaaggtgtttatggaatttctagacaagattgtcgtggtttttatcgatgacatacttatctactccaagtccgaggaagaacatgagcagcatctccggctggtacttgaaaagttaaaagagcaccagctatatgccaagttcagcaagtgcgacttctggcttaaggaagttcagtttctcggtcacatagtgaatgctcaaggagtagctgtggatccagcaaatgtggagtcagttaccaaatggaccccaccaaggacagtcactcaggttcggagtttcttaggacttgcgggttattaccgccggttcattgagaacttctctaaaattgctaagccaatgacacagctattgaagaaggaagaaaagtttatctggtctgctgaatgcaataggagttttgaagaactcaaacgacggttggtgtctgcaccagtcttaatcctgcctgatcagacgaaagatttccaggtctattgtgatgcatctcgccaggggctaggatgtgtgttgatgcaggatggcaaagtggtttcttatgcttcacggcagttgcgtcctcatgaaggcaactacccgacgcatgatctggaattggccgcagttgttcatgctttaaagatttggcggcactatctcatcagtaaccgttgtgaggtatatacagatcacaaaagtctaaagtacatctttactcaacctgatttgaatctcagacagcgaagatggttggagctgatcaaggattatgatatgggaatacattatcatcccggcaaggctaatgtggttgcagatgccttgagcaggaagagctactgcaatgttgcatgggtagagcaactatgttgtgaggttcaacgcgatttggaacatctgaaccttggtatagttgagcacggattcgtggctgccctagaggcacagcccacactggtggagcaggttcgcatagctcaagcaagtgatcctgaaatagcagagctcaaaaagaacatgagagttggaaaagcccgaggttttgttgaggatgaacaaggaacaatctggatgggagaaagattgtgtgtacccgaaaacaaggaattaaaagacctgatactaaccgaggctcatcaaactcagtattccattcatcccggtagtactaaaatgtaccaagacctcaaagaaaagttctggtgggtcagcatgagaagggaaatagctgaattcgtagcactatgtgacgtctgtcaacgagtaaaggcagaacaccaaaggccagcaggtttgctacagccacttcagattccagaatggaagtgggaagaaatcggaatggatttcatcaccggtttgcccaggacatcatcggggcatgattctatttgggtagtcgttgaccgactcaccaaagtggctcacttcattccggtgcacactacctactcagggaagaaattagcagaactctatctagcaagaatcatgtgtttacatggtgtacctaagaagatcgtgtctgatcgaggaagccaattcacttcaaagttctggcagaaattacaagaagaattgggaacccgtctaaacttcagcactgcttaccatccacaaacagatggccagaccgagcgagtcaaccaaatactagaggatatgttgagagcctgtgcgcttaactttggtggagcatgggacaaaagcttgccgtatgctgagttctcttacaacaacagttaccaagctagtctgcagatggcaccgtttgaagcactgtatggacggaggtgtcgtactccgctcttctgggatcagacagaggaacgccagttgtttggtacagaagttttaaatgaggcagaagagaaagtcagagctgttagggaaagattgagaatcgcgcaatctcggcagaaaagctatgcagacaaccgccgaagggagctcgttttccaagtaggggattatgtgtatctccgtgtcactccgctcaggggagtacaccgcttccaaaccaaaggaaagttggcaccacgctttgtgggaccatatcggattttggaacgcaggggtgaagttgcttaccagcttgagctttcctccaacatgcttggcatccataatgtgttccacgtctcccagttgaagaaatgtttgagagttccggaggaacaggcaagtccggatcaaatcgaaatccaggaagacttgacgtatgtggagaagccaactcgtatcctcgaaaccagcgagagaaagaccagaaacaaagtaataagattctgcaaggttcagtggagccaccactcagaggaagaggccacttgggaaagagaagatgagttgaaggccacccacccgcacctcttcgccagctcttccgaatctcggggtcgagattccgtttaa

SEQ ID NO: 14670 - DNA, 3510 bp, Oryza sativa
  Clone ID: TFbOSC5662j.C1.o1.fg
atggcagttaaggaccggttcacgggaaaccctgggagacttactgtgcttaccacaagcgggagtggctgttttactgctttcaactactgctttgaaatgcctgctttatgcaaaagaatccctagcttcctttggttatatcctgcatcatacctcctcttccggtatgacttgttgagtacagtgggtagtactcagtcttgctctcttttcccccacaccagagttgaagttcttctcagtggagccgtctcagagaggttggcttcgttgctgccgtcaagatggagacaaggaatggttcacgcgactccaacaacgccagtggcagcgaagagccgatcaatggagcacgtgccaacagtgcatctgacaacagtccgtccccaccgcccaggtgttggacaatcagactcagatgatgacaatgatgatgtaacagatgcagcaacagtaccatcaggtgttgcagcaggtgcagcagcaagcacagcagcagcagcagaacctgcagtttggtcctccacctcctcagtccaaactcttcatgccattgagaagaagctgaatcttttgcaatgcaacgagcaagagaaggttgcttttgctacacaccagctgcaaggtcctgcttctgtttggtgggacaactacatggtgacccgtccaactggggcagaggttacttggacagagttttgtcatagtttcaataaagcacaggttcccgagggaattgtggcacaaaagaagagagagttccgttccctgcaacaaggaaccagaacagttatagagtatttgcatgagttcaaccgcctcgcacgctacgcccctgaggacgtgcgtaccgatgacgggaggcaggagaagtttctgtctggtcttgatgatgaattgactaaccagttgatctctagagattatgaggactttgagaagctggtggataaggctatccgtcaggaggagcactgtaacaaaataaaccgtaagaggaaggcagctcagttcaggactccccaggggaagagtcagaagcctcgtttcacgatgggacgtcacggtggaccttccaccatgattatccggcagcaccgtccctaccacccgggaagcttcaacaagaaccaccatagtggcagtcacaacaacagtgagcagcacagcctcaaccctactccgagttcactaaagattccagctcaatcagttcagccagctctgccagaacagcccaagaggttgggagaaaaacccgaactctgcttcaattgtaacaaacccggacacacggttggaaagtgcccgaagccaagacgtgctggacccaagttcgttcaggcccgtgtcaatcatgcatctgcagaggaggcgcagtcagcaacagaggttatattgggcacattccccgtcaactcgacaccggcagtaatattgtttgattctggtgcaacccattccttcatttccaagcgttttgctggtgcacatgggttatctttagtgaagcttaagataccaatgcgagttcatactcctggaggtggcatgaccacaactcactactgcccatctgtgacagttgaaattcaagggttgatttttccagccaacctcattcttctcgaatccaaggacctagatgtcatacttggaatggattggttgacaaggcacagaggagtgattgattgcgccagccgcaccatcaagttgaccaatgcaaaagaagaggtggtaaccttccagtctccagtgccgcagaagccagggattagtttaaaccaggctgctggtgaagaacaagaggtagcagtggagaaaaccactaagaagctggaggatattcccatagtcagagagtatccagaggtttttccggacgatctgacaacaatgccaccaaaaagggatatcgagttccggattgacttggtacctggaactgctccaatccacaagaggccttacagaatgggagccaacgagttggcggaagtcaagaagcaagtcgatgaacagttacagaagggatacatccgcccgagcacgtcgccttggggtgctccggttatctttgtggagaagaaagacaaaaccaagaggatgtgcgttgactaccgcgcactcaatgaggtgtttatggaatttctagacaagtttgtcatggttttcatcgatgacatacttatctactccaagtccgaggaagaacatgagcagcatctccggctggtacttgaaaagttaaaaaagcaccagctatatgccaagttcagcaagtgcgacttctggcttaaggaagttcagtttctcggtcacatcgtgaatgctcaaggagtagctgtggatccagcaaatgtggagtcagttaccaaatggaccccaccaaggacagtcactcaggatggcaaagtggtttcttatgcttcacggcagttgcgtcctcatgaaggcaactacccgacgcatgatctggaattggccgcagttgttcatgctttaaagatttggcggcactatctgatcggtaaccgttgtgagcgaagatggttggagctgatcaaggattatgatatgggaatacattatcatcccggcaaggctaatgtggttgcagatgccttgagcaggaagagctactgcaatgttgtatgggtagagcaactatgttgtgaggttcaacgcgatttggaacatctgaaccttggtatagttgagcacggattcgtggttgccctagaggcacagcccacactggtggagcagtattccattcatcccggtagtactaagatgtaccaagacctcaaagaaaagttctggtgggtcaacatgagaagggagatagctgaattcgtagcactctgtgacgtctgtcaacgagtaagggcagaacaccaaaggccagcaggggaacgccagttgtttggtacagaagttttaaatgaggcagaagagaaagtcagagctgtcagggaaagattgagaatcgcgcaatctcggcagaaaagctatgcagacaaccgccgaagggagctcgctttcgaaacaggggattatgtgtatctccgtgtcactccgctcaggggagtacatcacttccaaaccaaaggaaagttggcaccacgctttgtgggaccatacaggatcttggaacgtagaggtgaagctgcttaccagcttgagcttccctccaacatgcttggcatccacaacgtgttccacgtctctaagttgaagaaatgtttgagagttcctgaggaacaggcaagtccagatcacatcgaaattcaggaagatctgacgtatgtggagaagccgactcgtatcctcgaaaccagcgagagaaggaccagaaacaaagtaatcagattctgcaaggttcagtggagtcatcactcagaagaagtggccacttgggaaagagaagatgagttgaaggccacccacccgcacctcttcgccagccattccgaatctcgaggtcgagattccgtttaa

SEQ ID NO: 14671 - DNA, 417 bp, Oryza sativa
  Clone ID: TFbOSC5662j.C1.o5.gm
atgggtcagcggctcaaaggggagaggaagggggcgccggcatgtgggccccacgggcagtggctcaaggtggccggtctaccgtggaccgagaccacgcgggtggtccaccgccggtccacaggaccgacggtccggatcggctgggaggccgatcggacggcacggcggcggctaggcatggctcggctcagcttcaaaaccggccgaccggccatggcaaccggcggtgacgcgcacggtcgccggcgacggcaattggcggcgcgggaaacgatggcggacggggtacaggacggcggcgtcgaccgaaggcaacggcgagcgcatggagagaggcggcgcaaacgagagataggggaagagggagaaggggggatcctcaccggcgagtatggcggccagagcggaggatga

SEQ ID NO: 14672 - DNA, 3408 bp, Oryza sativa
  Clone ID: TFbOSC6239j.C1.o4.gm
atggagataaggaatggttcacgcgactcgaacaacgcctgtggcagcgaagagccgatcgatggagcacgtgccaacagtgcatctggcaacagtccgtccccaccgcccgagaacccaacaattgctcaggtgttggacaatcagactcagatgatgacaatgatgatgcaacagatgcagcaacagtaccatcagtccaaactgttagaatttcttcgtgtcaagccgcccactttctcaagcaccaccaacccaatcgaggcccacgactggcttcatgccattgagaagaagctgaatcttttgcaatgcaacgagcaggagaaggttgcttttgctacacaccagctacaaggtcccgcttctatttggtgggacaactacatggtgacccgtccagctggggcagaggttacttggacagagtttcgtcatagtttcaataaagcacaggttcccgagggaattgtggcacaaaagaagagagagttccgttccctgcaacaaggaaccagaacagttatagagtatttgcatgagttcaaccgcctcgcgcgctacgcccctgaggacgtgcgtaccaatgccgagaggcaggagaagtttttgtctggtcttgatgatgaattgactaaccagttgatctctagagattatgaggactttgagaagctggtggataaggctatccgtcaggaggagcacggtaacaaaataaaccgtaagaggaaggcagctcagttcaggactccccaggggaagagtcagaagcctcgtttcacgatgggacgtcacggtggaccttccaccatgattatccgacagcaccgtccctaccacccgggtagcttcaacaagaaccaccataatggcagtcacaacaacagtgagcagcacagtctcaaccctactccgagttcactaaagattccagctcaatcagttcagccagctctgccagaacagcccaagaggttgggagaaaaacccgaactctgcttcaattgtaacaaacccggacacacggttggaaagtgcccgaagccaagacgtgctggacccaagttcgttcaggcccgtgttaatcatgcatctgcagaggaggcgcagtcagcaccagagcgttttgctggtgcacatgggttatctttagtgaagcttaagataccaatgcgagttaatactcctggaggtggcatgaccacaactcactactgcccatctgtgacagttgaaattcaagggttgatttttccagccaacctcattcttctcgaatccaaggacctagatgtcatacttggaatggattggttgacaaggcacagaggagtgattgattgcgccagccgcaccatcaagttaacccatgcaaaaggagaggtggtaaccttccagtctctagtgccgcggaagccagggatcagtttaaaccaggctgctggtgaagaacaagaggtagcagtggagaaaaccactaagaagctggaggatattcccatagtcagagagtatccagaggtttttccggacgatctgacaacaatgccaccaaagagggatatcgagttccggattgacttggtacctggaactgcaccgatccacaagaggccttacagtatgggagccaacgagttggcggaagtcaagaagcaagtcgatgaacagttacagaagggatacatccgcccgagcacgtcgccttggggtgctccggttatctttgtggagaagaaagacaaaaccaagagaatgtgcgttgactaccgcgcactcaatgaggtcaccatcaagaacaagtatcctttgccaaggattgatgatctgtttgatcagttgaaaggagctactgtgttctctaagatagacctgcgatcaggctatcaccagttgaggatccgcgaagaggatattccaaagacagcattcatcactcggtacgggttgttcgaatgcacagttatgtctttcggactcactaatgcacctgccttcttcatgaatttgatgaataaggtgtttatggaatttctagacaagtttgtcgtggttttcatcgatgacatacttatctattccaagtccgaggaagaacatgagcagcatcttcagctggtacttgaaaagttaaaagagcaccaactatatgccaagttcagcaagtgcgacttctggcttaaggaagttcagtttcttggtcacatcgtgaatgctcaaggagtagctgtggatccagcaaatgtggagtcagttaccaaatggaccccaccaaggacagtcactcaggttcggagtttcttaggacttgcgggttattaccgccggttcattgagaacatctctaaaattgctaagccaatgacacagctattgaagaaggaagaaaagtttatctggtctgctgaatgcaataggagttttgaagaactcaaacgacggttggtgtctgcaccagtcttaatcctgcctgatcagacgaaagatttccaggtctattgtgatgcatctcgccaggggctaggatgtgtgttgatgcaggatggcaaagtggtttcttatgcttcacggcagttgcgtcctcatgaaggcaactacccgacgcacgatctggaattggccgcagtcgttcatgctttaaagatttggcagcactatctcatcagtaaccgttgtgaggtatatacagatcacaaaagtctaaagtacatcttcactcaagctgatttgaatctcagacagcgaagatggttggagctgatcaaggattatgatatgggaatacattatcatcccggcaaggctaatgtggttgcagatgctttgagcaggaagagctactgcaatgttgcatgggtagagcaactatgttgtgaggttcaacgcgatttggaacatctgaaccttggtatagttgagcacggattcgtggctgccctagaggcacagcccacactggtggagcaggttcgcatagctcaagcaagtgatcctgaaatagcagagctcaaaaagaacatgagagttggaaaagcccgaggttttgttgaggatgaacaaggaacaatctggatgggagaaagattcactgtatggacgaaggtgtcgtactccgctcttctgggatcagacagggtgacggagctcgtggctcctcaccgggagaccgcgcaggcccccctttgccagtccggccgggggcttagggaggagggcggacacctcaccctcgggcccgacgtccccgaaggtgccaggccacgtgggcgattgcgtctgcctcaagcctctggtcacgatactcccggtcccatatcaccgacagtagcccccggcgttatgccagagcaatttcccttcccaagggaagcggtcaggtgtgacgccacccctaaagcctggtga

SEQ ID NO: 14673 - DNA, 4689 bp, Oryza sativa
  Clone ID: TFbOSC7720j.C1.o1.fg
atggcagttaaggaccggttcacgggaaaccctgggagacttaccgtgcttaccacaagcgggagtgggtttgttgcttgtgggctagtcggcggccgatatcatgtgtcagtgatggagataaggaatggttcacgcgactcgaacaacgccagtggcagcgaagagccgatcaatggagcacgtgccaacggtgcatctgacaacagtccgtccccaccgcccgagaacccaacaattgctcaggtgttggacaatcagactcagatgatgacaatgatgatgcaacagatgcagcaacagtaccatcaggtgttgcaacaggtgcaacagcaagcacagctgcagcagcagaacctgcagtttggtcctccacctcctcagtccaaattgttagaatttcttcgtgtcaagccgcccactttctcaagcacccccaacccaatcgaggcccacgactggcttcatgccattgagaagaagctgaatcttttgcaatgcaacgagcaggagaaggttgcttttgctacacaccagctacaaggtcccgcttctatttggtgggacaactacatggtgacccgtccagctggggcagaggttacttggacagagttttgtcatagtttcaataaagcccaggttcccgagggaatcgtggcacaaaagaagagagagttccgttccctgcaacaaggaaccagaacagttatagagtatttgcatgagttcaaccgcctcgcgcgctacgcccctgaggacgtgcgtaccgatgccgagaggcaggagaagtttatgtctggtcttgatgatgaattgaccaaccagttgatctctagagactatgaggactttgagaagcttgtggacaaggccatccgtcaagaggagcagtgtaacaaaatgaaccgtaagaggaaggcagcccagttcaggactccccaggggaagtgtcagaagcctcgtttcacgatgggacgtcacggtggaccttccaccatgattatccgacagcaccgtccctaccacccgggtagcttcaacaagaaccaccatagtggcagtcacaacaacagtgagcagcacagcctcaaccctactccgagttcactaaagattccagctcaatcagttcagccagctctgccagaacagcccaagaggttgggagaaaaacccgaactctgcttcaattgtaacaaacccggacacacggttggaaagtgcccgaagccaagacgtgccggacccaagttcgttcaggcccgtgttaatcatgcatctgcagaggaggcgcagtcagcaccagaggttatattgggcacattccccgtcaactcgacaccggcagtaatattgtttgattctggtgcaacccattccttcatttccaagcgttttgctggtgcacatgggttatctttagtgaagcttaagataccaatgcgagttcatactcctggaggtggcatgaccacaactcactactgcccatctgtgacagttgaaattcaagggttgatttttccagccaacctcattcttctcgaatccaaggacctagatgtcatgcttggaatggattggttggcaaggcacagaggagtgattgattgcgccagccgcaccatcaagttgaccaatgcaaaaggagaggtggtaatcttccagtctccagtgccgcagaagccagggattagtttaaaccaggctgctggtgaagaacaagaggtagcagtggagaaaaccactaagaagctggaggatattcccatagtcagagagtatccagaggtttttccggatgatctgacaacaatgccaccaaaaagggatatcgagttccggattgacttggtacctggaactgcaccgatccacaagaggccttacagaatgggagccaacgagttggcggaagtcaagaagcaagttgatgaacagttacagaagggatacatccgcccgagcacgtcgccttggggtgctccggttatctttgtggagaagaaagacaaaaccaagaggatgtgcgttgactaccgcgcactcaatgaggtcaccatcaagaacaagtatcctttgccaaggattgatgatctgtttgatcagttgaaaggagctactgtgttttctaagatagacctgcaatcaggctatcaccagttgaggatccgcgaagaggatattccaaagacagcattcatcactcggtacgggttgttcgaatgcacagttatgtctttcggactcactaatgcacctgccttcttcatgaatttgatgaacaaggtgtttatggaatttctagacaagtttgtcgtggttttcatcgatgacatactaatctactccaagtccgaggaagaacatgagcagcatcttcgactggtacttgaaaagttaaaagagcaccagctatatgccaagttcagcaagtgcgacttctggcttaaggaagttcagtttctcggtcacatcgtgaatgctcaaggagtagctgtggatccagcaaatgtggagtcagttaccaagtggaccccaccaaggacagtcactcaggttcggagtttcttaggacttgcgggctattaccgccggttcattgagaacttctctaaaattgctaagccaatgacacagctattgaagaaggaagaaaagtttatctggtctgctgaatgcaataggagttttgaagaactcaaacgacggttggtgtctgcaccagtcttaatcctgcctgatcagacgaaagattttcaggtctattgtgatgcatctcgccaggggctaggatgtgtgttgatgcaggatggcaaagtggtttcttatgcttcacggcagttgcgtcctcatgaaggcaactacccgacgcatgatctggaattagccgcagttgttcatgctttaaagatttggcggcactatctcatcggtaaccgttgtgaggtatatacagatcacaaaagtctaaagtacatctttactcaacctgatttgaatctcagacagcgaagatggttggagctgatcaaggattatgatatgggaatacattatcatcccggcaaggctaatgtggttgcagatgccttgagcaggaagagctactgcaatgttgcatgggtagagcaactatgttgtgaggttcaacgcgatttggaacatctgaaccttggtatagttgagcacggattcgtggctgccctagaggcacagcccacactggtggagcaggttcgcatagctcaagcaagtgatcctgaaatagcagagctcaaaaagaacatgagagttggaaaagcccgaggttttgttgaggatgaacaaggaacaatctggatgggagaaagattgtgtgtacccgaaaacaaggaattaaaagacctgatactaaccgaggctcatcaaactcaatattccattcatcccggtagtactaagatgtaccaagacctcaaagaaaagttctggtgggtcagcatgagaagggaaatagctgagttcgtagcactctgtgacgtctgtcaacgagtaaaggcagaacaccaaaggccagcaggtttgctacagccacttcagattccagaatggaagtgggaagaaatcggaatggatttcatcaccggtttgcccaggacgtcatcggggcatgattctatttgggtagtcgttgaccgactcaccaaagtggctcacttcattccggtgcacactacctactcagggaagaaattagcagaactctatctggcaagaattatgtgtttacatggtgtacctaagaagatcgtgtctgatcgaggaagccaattcacttcaaagttctggcagaaattacaagaagaattgggaacccggttgaatttcagcaccgcttaccatccacaaacagatggccagaccgagcgagtcaatcaaatactagaggatatgttgagagcatgtgcgcttgactttggtggagcatgggacaaaagcttaccgtatgctgagttctcgtacaacaacagttaccaagctagtctgcagatggcaccatttgaagcactgtatggacgaaggtgtcgtactccgctcttctgggatcagacaggggaacgccagttgtttggtacagaagttttaaatgaggcagaagagaaagtcagagctgttagggaaagattgagaatcgcgcagtctcggcagaaaagctatgcagacaaccgccgaagggagctcgttttccaagtaggggattatgtgtatctccgtgtcactccgctcaggggagtacatcgcttccaaaccaaaggaaagttggcaccacgctttgtgggaccatatcggattttggaacgtagaggtgaagttgcttaccagctcgagcttccctccaacatgcttggcatccataatgtgttccacgtctcccagttgaagaaatgtttgagagttcctgaggaacaggcaagtccggatcaaatcgaaatccaggaagacttgacgtatgtggagaagccaactcgtatcctcgaaaccagcgagagaaagaccagaaacaaagtaataagattctgcaaggttcagtggagccaccactcagaggaagaggccacttgggaaagagaagatgagttgaaggccacccacccgcacctcttcgccagctcttccgaatctcggggtcgagattccgtttaa

SEQ ID NO: 14674 - DNA, 1821 bp, Oryza sativa
  Clone ID: TFbOSC900109j.C1.o5.fg
atggctgacaagacccttagcgagtttgctgctccctctactgacaatgtggccattgggccacaaatcaacatgggagacatggatttcgacctgaagtccagcctcatgacgatggcgcaggctagcctattctgcggaaagcctaatgaggatgccaatgctcacctgcaacaattcctggagatctgtagcacgtataccatcaagggcgtcagtccagacgccatcaggctaaggctgtttccgttctccctcctcggaagagtgaagcagtggttctacgccaatcgtgctactatcaacacctgggacaaatgctctacggcattcctctcgaaattcttcccgatgggaaacttttacaatggactcaccccggtgtcccgcaatcacctggacgcggcagctggaggaacattcttctctaaaacggttcgaggagccgttgatttaatagagaagatggtctccaatatgggttggagcgaggaacgactccagactcgtcagcgaggcatgcacaccgttaaggagacggagctacttgctgccaagccggacctcctcatgaaacgcttggacgaccacgagaaacggccacaaggcactatcaaggccttggactctcacgtcacgtgtgaagtctgcggtaacacaggtcatactaggaataactgcccggaaacccgtgaggaggcgatgtacatgggcaacaacagcagcgggtaccgtccacaaggaggtcaagggtggaatcagccacacccatattatcagggagggaggattctgaggcaacccgactcctctgttgaaaatgtcaaggcgatcatgatgaggggaggaattaacaggactgcaaaagaagcaccatctagtgactcggctgacaaagaggttcagccagaaaagaccgtgccgccggaatattacgacacacggttgctgccatttcctcaacggagcaggaaaccgtcagtggacgagcaatttgctcattttgttgaagtaatccagaagatccacatcaacgtgcctttgttggatgctatgcaagtggttaagctgacggagcaatgcagcaacatcatactccacaagctcccggaaaagaaaaaggatccggggtatcccacgatcacctgctcgatcggggcacagcagttcgaccaggccttgtgcgatcttggagccagtgtcagcgtcatgccaaaagacgtctttaacaagctcaacttcacggtgttggcaccaacaccgatgcgcctacaactggctgactcgtcagtccgttacccggcagggatagcggaggatgtgctagtcaagatacgggatttcttcatcccggttgacttcatagtgctggacatggacacgggaaaagagacgccgctcatcctggggcgcccgttccttagcaccgtgggagccaacattgacatgggaacggggagtatccgtttccacatcaatgggaaggaagagaagtttgagtttcaaccgaggacggaacaaagctccatggtcagaataaagtacgagccgaacacacagaatattcaagtggtcgaagtggagccaaccaagatggatagcctgttgaagtttatgcaaaatttcctggagaaggaaacaactatgcccaggaaccgttattggaagacgccggtaaaaacaaatacaccggacaagaagctagagcagccggctcagaggaagccattttccgcacctaaacctaagaaggtgtggaaggaaaagccaaagacgcccgctccatcacctcgggagatgggtggaaaatccacgaactga

SEQ ID NO: 14675 - DNA, 4575 bp, Oryza sativa
  Clone ID: TFbOSC900229j.C1.o20.fg
atggagacaaggaatggttcacgcgactccaacaacgccagtggcagcgaagagccgatcaatggagcacgtgccaacggtgcatctgacaacagtccgtccccaccgcccgagaacccaacgatcgctcaggtgttggacaatcagactcagatgatgacaatgatgatgcaacagatgcagcaacagtaccatcaggtgttgcagcaggtgcagcagcaagcacagctgcagcagcagaacctgcagtttggtcctccacctcctcagtccaaattgttagaatttcttcgtgtcaagccgcccactttctcaagcaccaccaacccaatcgaggcccacgactggcttcatgccgttgagaagaagctgaatcttttgcaatgcaacgagcaggagaaggttgcttttgctacacaccagctacaaggtcccgcttctatttggtgggacaactacatggtgacccgtccagctggggcagaggttacttggacagagttttgtcatagtttcaataaagcccaggttcccgagggaatcgtggcacaaaagaagagagagttccgttccctgcaacaaggaaccagaacagttatagagtatttgcatgagttcaaccgcctcgcgcgctatgcccctgaggacgtgcgtaccgatgccgagaggcaggagaagtttttgtctggtcttgatgatgaattgactaaccagttgatctctagagattatgaggactttgagaagctggtggataaggctatccgtcaggaggagcactgtaacaaaataaaccgtaagaggaaggcagctcagttcaggactccccaggggaagagtcagaagcctcgtttcacgatgggacatcacggtggaccttccaccatgattatccggcagcaccgtccctaccacccgggtaacttcaacaagaaccaccatagtgacagtcacaacaatagtgagcagcacagcctcaaccctactccgagttcactaaagattccagctcaatcagttcagccagctctgacagaacagcccaagaggttgggagaaaaacccgaactctgcttcaattgtaacaaacccggacacacggttggaaagtgcccgaagccaagacgtgccggacccaagttcgttcaggcccgtgttaatcatgcatctgcagaggaggcgcagtcagcaccagaggttatattgggcacattccccgtcaactcgacaccggcagtaatattgtttgattctggtgcaacccattcctttatttccaagcgttttgctggtgcacatgggttatctttagtgaagcttaagataccaatgcgagttcatactcctggaggtggcatgaccacaactcactactgcccatctgtgacagttgaaattcaagggttgatttttccagccaacctcattcttctcgaatccaaggacctagatgtcatacttggaatggattggttggcaaggcacagaggagtgattgattgcgccagccgcaccatcaagttgaccaatgcaaaaggagaggtggtaatcttccagtctccagtgccgcagaagccagggattagtttaaaccaggctgctggtgaagaacaagaggtagcagtggagaaaaccactaagaagctggaggatattcccatagtcagagagtatccagaggtttttccggatgatctgacaacaatgccaccaaaaagggatatcgagttccggattgacttggtacctggaactgcaccgatccacaagaggccttacagaatgggagccaacgagttggcggaagtcaagaagcaagttgatgaacagttacagaagggatacatccgcccgagcacgtcgccttggggtgctccggttatctttgtggagaagaaagacaaaaccaagaggatgtgcgttgactaccgcgcactcaatgaggtcaccatcaagaacaagtatcctttgccaaggattgatgacctgtttgatcagttgaaaggagctactgtgttctctaagatagacctgcgatcaggctatcaccagttgaggatccgcgaagaggatattccaaagacagcattcatcactcggtacgggttgttcgaatgcacagttatgtctttcggactcactaacgcacctgccttcttcatgaatttgatgaacaaggtgtttatggaatttctagacaagtttgtcgtggttttcatcgatgacatacttatctactccaagtccgaggaagaacatgagcagcatcttcggctggtacttgaaaagttaaaagagcaccagctatatgccaagttcagcaagtgcgacttctggcttaaggaagttcagtttctcggtcacatcgtgaatgctcaaggagtagctgtggatccagcaaatgtggagtcagttaccaaatggaccccaccaaggacagtcactcaggttcggagtttcttaggacttgcgggttattaccgccggttcattgagaacttctctaaaattgctaagccaatgacacagctattgaagaaggaagaaaagtttatctggtctgctgaatgcaataggagttttgaagaactcaaacgacggttggtgtctgcaccagtcttaatcctgcctgatcagacgaaagatttccaggtctattgtgatgcatctcgccaggggctaggatgtgtgttgatgcaggatggcaaagtggtttcttatgcttcacggcagttgcgtcctcatgaaggcaactacccgacgcatgatctggaattagccgcagttgttcatgctttaaagatttggcggcactatctcatcggtaaccgttgtgaggtatatacagatcacaaaagtctaaagtacatcttcacccaacctgatctgaatctccgacaacgaagatggttggagctaatcaaagattatgatatgggaatacactatcatcccggcaaggccaatgtggtagcagatgccttgagcaggaagagttactgcaacgtcgcatgggtagaggaactatgctgtgaggttcaacatgatttggaacatttgaaccttggtatagttgagcacggattcgtggctgccctagaggcacagcccacactggtggagcaggttcgcatagctcaagcaagtgatcctgaaatagcagagctcaaaaagaacatgagggtcggaaaagcccgaggttttgttgaggatgaacaaggaacaatctggatgggagaaagattgtgtgtacccgaaaacaaggaattaaaagacctgatactaaccgaggctcatcaaactcaatattccattcatcccggtagtactaagatgtaccaagacctcaaagagaagttttggtgggtcagcatgagaagggaaatagctgaattcgtagcactctgtgacgtctgtcaacgagtaaaggcagaacaccaaaggccagcaggtttgctacagccacttcagattccagaatggaagtgggaagaaatcggaatggatttcatcaccggtttgcccaggacgtcatcggggcatgattctatttgggtagtcattgaccgactcaccaaagtggcccacttcattccggtgcacactacctactcagggaagaaattagcagaactctatctggcaagaattatgtgtttacatggtgtacctaagaagatcgtgtctgatcgaggaagccaattcacttcaaagttctggcagaaattacaagaagaattgggaacccggttgaatttcagcaccgcttaccatccacaaacagatggccagaccgagcgagtcaatcaaatactagaggatatgttgagagcctgtgcgcttgattttggtggggcatgggacaaaagcttgccgtatgctgagttctcgtacaacaacagttaccaagctagtctgcagatggcaccatttgaagcactgtatggacggaggtgtcgtactccgctcttctggtatcagacaggggaacgccagttgtttggtacagaagttttaaatgaggcagaagagaaagtcagagctgttagggaaagattgagaatcgcgcagtctcggcagaaaagctatgcagacaaccgccgaagggagctcgctttcgaaacaggggattatgtgtatctccgtgtcactccgctcaggggagtacatcgcttccaaaccaaaggaaagttggcaccacgctttgtgggaccatatcgggttttggaacgtagaggtgaagttgcttaccagctcgagcttccctccaacatgcttggcatccataatgtgttccacgtctcccagttgaagaaatgtttgagagttcctgaggaacaggcaagtccggatcaaatcgaaatccaggaagacttgacgtatgtggagaagccaactcgtatcctcgaaaccagcgagagaaagaccagaaacaaagtaataagattctgcaaggttcagtggagccaccactcagaggaagaggccacttgggaaagagaagatgagttgaaggccacccacccgcacctcttcgccagctcttccgaatctcggggtcgagattccgtttaa

SEQ ID NO: 14676 - DNA, 4689 bp, Oryza sativa
  Clone ID: TFbOSC900288j.C1.o23.fg
atggcagttaaggaccggttcacgggaaaccctgggagacttaccgtgctttccacaagcgggagtgggtttgatgcttgtgggctagtcggcggtcgatatcatgtgtcagtgatggagacaaggaatggttcacgcgactcgaacaacgccagtggcagcgaaaagccgatcaatggagcacgtgccaacagtgcatctgacaacagtccgtccccaccgcccgagaacccaacaattgctcaggtgttggacaatcagactcagatgatgacaatgatgatgcaacagatgcagcaacagtaccatcaggtgttgcaacaggtgcagcagcaagcacagctgcagcagcagaacctgcagtttggttctccacctcctcagtccaaactgctagaatttcttcgtgtcaagccgcccaccttctcaagcaccaccaacccaatcgaggcccacgactggcttcatgccattgagaagaagctgaatcttttgcaatgcaacgagcaagagaaggttgcttttgctacacaccagctgcaaggtcccgcttctatttggtgggacaactacatggtgacccgtccagctggggcagaggttacttggacagagtttcgtcatagtttcaataaagcacaggttcccgagggaattgtggcacaaaagaagagagagttccgttccctgcaacaaggaaccagaacagttatagagtatttgcatgagttcaacctcctcgcgcgctacgcccctgaggacgtgcgtaccgatgccgagaggcaggagaagtttttgtctggtcttgatgatgaattgactaaccagttgatctctagagattatgaggactttgagaagctggtggataaggctatccgtcaggaggagcactgtaacaaaataaaccgtaagaggaaggcagctcagttcaggactccccaggggaagagtcagaagcctcgtttcacgatgggacgtcacggtggaccttccaccatgattatccgacagcaccgtccctaccacccgggtagcttcaacaagaaccaccataatggcagtcacaacaacagtgagcagcacagtctcaaccctactccgagttcactaaagattccagctcaatcagttcagccagctctgccagaacagcccaagaggttgggagaaaaacccgaactctgcttcaattgtaacaaacccggacacacggttggaaagtgcccgaagccaagacgtgctggacccaagttcgttcaggcccgtgttaatcatgcatctgcagaggaggcgcagtcagcaccagaggttatattgggcacattccccgtcaactcgacaccggcagtaatattgtttgattctggtgcaacccattccttcatttccaagcgttttgctggtgcacatgggttatccttagtgaagcttaagataccaatgcgagtgcatactcctggaggtggcatgaccacaactcactactgcccatctgtgacagttgaaattcaagggttgatttttccagccaacctcattcttctcgaatccaaggacctagatgtcatacttggaatggattggttaacaaggcacagaggagtgattgattgcgccagccgcaccatcaagttaaccaatgcaaaaggagaggtggtaaccttccagtctctagtgccgcggaagccagggatcagtttaaaccaggctgctggtgaagaacaagaggtagcagtggagaaaaccactaagaagctggaggatattcccatagtcagagagtatccagaggtttttccggacgatctgacaacaatgccaccaaaaagggatatcgagttccggattgacttggtacctggaactgcaccgatccacaagaggccttacagaatgggagccagcgagttggcggaagtcaagaagcaagtcgatgagcagttacagaagggatacatccgcccgagcacgtcgccttggggtgctccggttatctttgtggagaagaaagacaaaaccaagaggatgtgcgttgactaccgcgcactcaatgaggtcaccatcaagaacaagtatcctttgccaaggattgatgacctgtttgatcagttgaaaggagttactgtgttctctaagatagacctgcgatcaggctatcaccagttgaggatccgcgaagaggatattccaaagacagcattcatcactcggtacgggttgttcgaatgcacagttatgtctttcggactcactaatgcacctgccttcttcatgaatttgatgaacaaggtgtttatggaatttctagacaagtttgtcgtggttttcatcgatgacatacttatctactccaagtccgaggaagaacatgagcagcatcttcggctggtacttgaaaagttaaaagagcaccagctatatgccaagttcagcaagtgcgacttctggcttaaggaagttcagtttctcggtcacatcgtgaatgctcaaggagtagctgtggatccagcaaatgtggagtcagttaccaaatggaccccaccaaggacagtcactcaggttcggagtttcttaggacttgcgggctattaccgccggttcattgagaacttctctaaaattgctaagccaatgacacagctattgaagaaggaagaaaagtttatctggtctgctgaatgcaataggagttttgaagaactcaaacgacggttggtgtctgcaccagtcttaatcctgcctgatcagacgaaagatttccaggtctattgtgatgcatctcgccaggggctaggatgtgtgttgatgcaggatggcaaagtggtttcttatgcttcacggcagttgcgtcctcatgaaggcaactacccgacgcatgatctggaattagccgcagttgttcatgctttaaagatttggcggcactatctcatcggtaaccgttgtgaggtatatacagatcacaaaagtctaaagtacatcttcacccaacctgatctgaatctccgacagcgaagatggttggagctaattaaagattatgatatgggaatacattatcatcccggcaaggctaatgtggttgcggatgccttgagcaggaagagctactgcaatgttgcatgggtagagcaactatgtggtgaggttcaacgcgatttggaacatctgaaccttggtatagttgagcacggattcgtggctgccctagaggcacagcccacgctggtggagcaggttcgcatagctcaggcaagtgatcctgaaatagcagagctcaaaaagaacatgagggttggaaaagcccgaggttttgttgaggatgaacaaggaacaatctggatgggagaaagattgtgtgtacccgaaaacaaggaattaaaagacctgatactaaccgaggctcatcaaactcaatattccattcatcccggtagtactaagatgtaccaagacctcaaagaaaagttctggtgggtcagcatgagaagggaaatagctgagttcgtagcactctgtgacgtctgtcaacgagtaaaggcagaacaccaaaggccagcaggtttgctacagccacttcagattccagaatggaagtgggaagaaatcggaatggatttcatcaccggtttgcccaggacgtcatcggggcatgattctatttgggtagtcgttgaccgactcaccaaagtggctcacttcattccggtgcacactacctactcagggaagaaattagcagaactctatctatcaagaatcatgtgtttacatggtgtacctaagaagatcgtgtctgatcgaggaagccaattcacttcaaagttctggcagaaattacaagaagaattgggaacccggttgaatttcagcaccgcttaccatccacaaacagatggccagaccgagcgagtcaatcaaatactagaggatatgttgagagcctgtgcgcttgactttggtggggcatgggacaaaagcttgccgtatgctgagttctcgtacaacaacagttaccaagctagtctgcagatggcaccatttgaagcactgtatggacggaggtgtcgtactccgctcttctgggatcagacaggggaacgccagttgtttggtacagaagttttaaatgaggcagaagagaaagtcagagctgttagggaaagattgagaatcgcgcaatctcggcagaaaagctatgcagacaaccgccgaagggagctcgttttccaagtaggggattatgtgtatctccgtgtcactccgctcaggggagtacaccgcttccaaaccaaaggaaagttggcaccacgctttgtgggaccatatcggattttggaacgcaggggtgaagttgcttaccagcttgagcttccctccaacatgcttggcatccataatgtgttccacgtctctcagttgaagaaatgtttgagagttcctgaggaacaggcaagtccggatcaaatcgaaatccaggaagacttgacgtatgtggagaagccaactcgtatcctcgaaaccagcgagagaaagaccagaaacaaagtaataagattctgcaaggttcagtggagccaccactcagaggaagaggccacttgggaaagagaagatgagttgaaggccacccacccgcacctcttcgccagctcttccgaatctcggggtcgagattccgtttaa

SEQ ID NO: 14677 - DNA, 4377 bp, Oryza sativa
  Clone ID: TFbOSC900332j.C1.o23.fg
atggtgaagacaaggaatggttcctgtgactccaacaacgccagtggcagcaaagagcagatcagtggagcatgtgccagcgatgcacctaacagcagttcatccccactgcccgagaacctaacgattgctcaggtgttggacaatcaaactcagatgatgacgatgatgatgcaacagatgcaacaacagtaccatcaggtgttgcagcaggtgcagcagcaagcacagcagcagcagcagaacttgcagtttggtcttcaaccaccccagtccaaactgttagaatttctccgtatcaagccacccactttctcaagcaccaccaacccaatcgaggccaacgactggctttatgccattgagaagaagctaaaccttttgcaatgcaacgaacaagagaaggttgcttttgctacacaccagctgcaaggtcccgcttctgtttggtgggacaactacatggtgacccgtccagctgggacagaagtcacttgggaatcatggcacagaagaagagagttccgttctctgcaacaaggaaccagaacagttatagagtatttgcatgagttcaaccgcctcgcgcgctacgcccctgaggacgtgcgtaccgatgacgagaggcaggagaagtttctgtctggtcttgatgatgaattgactaatcagttaatctctagagattatgaggactttgagaagctggtggataaggctatccgtcaggaggagcactgtaacaaaataaaccgtaagaggaaggcagctcagttcaggactccccaggggaagagtcagaagcctcgtttcacgatgggacgtcagggtggaccttccaccatgattatccggcagcaccgtccctaccacccgggtagcttcaacaagaaccaccatagtggcagtcacaacaacagtgagcagcacagcctcaaccctagtccgagttcactaaagattccggctcaatcagttcagccagctctgccaaaacagcccaagaggttgggagaaaaacccgaactctgcttcaattgtaacaaacccggacacacggttggaaagtgcccgaagccaagacgtgctggacccaagtttgttcaggcccgtgtcaatcatgcgtctgcagaggaggcgcagtcagcaccagagcgttttgctggtgcacatgggttatctttagtgaagcttaagatacctatgcgagttcatactcctggaggtggcatgaccacaactcactattgcccatcagtaatagttgaaattcaagggttgatttttccagccaacctcattcttctcgaatccaaggatctagatgttattctgggaatggattggctgacaaggcacagaggagtgatcgattgcgctagccgcaccatcaagttgaccaatgcgaagggagaagtggttaccttccagtctccagtgccacagaagccagggatcagtctgaaccaggctgctggtgaagaacaagaggtagcagtggaggaaaccactaagaagttggaagatattcccatagtcagagagtatccagagctttttccgaacgatctgacaacaatgccaccaaaaagggatatcgagttccggattgacttggtacctggaactgcaccgatccacaagaggccttacagaatgggagccaacgagttggcggaagtcaagaagcaagttgatgaacagttacagaagggatacattcgcccgagcacgtcgccttggggtgctccagttatctttgtggaaaagaaagataaaaccaaaaggatgtgcgtcgactaccgtgcactcaatgaggtcactattaagaacaagtatccgttgccaagaattgatgatctgtttgatcagttgaaaggagctactgtgttctctaagatagacctacgatcaggctatcaccagttgaggatccgcgaagaggatattccaaagacagcattcatcactcggtacgggttgttcgaatgcacagttatgtcttttggactcactaatgcacctgctttcttcatgaatttgatgaacaaggtgtttatggaatttctagacaagtttgccgtggttttcatcgatgacatacttatctactccaagtccgaggaagaacatgagcagcatctccagctagtacttgaaaagttaaaagagcaccagctatatgccaagttcagcaagtgtgacttctggcttaaggaagttcagtttctcggtcacatcgtgaatgctcaaggagtagctgtggatccagcaaatatggagtcagttaccaaatggaccccaccaaggacagtcactcaggttcagagtttcttaggacttgcgggctattaccgctggttcattgagaacttctctaaaattgctaagccaatgacacagctattgaagaaggaagaaaagtttatctggtctgctgaatgtaataggagttttgaagaactcaaacgacggttggtgtctgcaccagtcttaatcctgcctgatcagacgaaaaatttccaggtctattatgatgcatctcgccaggggctaggatgtgtgttgatgcaggatggcaaagtggtttcttatgcttcacggcagttgcgtcctcatgaaggcaactacccgacgcatgatctggaattggccgcagttgttcatgctttaaagatttggcggcactatctcatcggtaaccgttgtgaggtatatacagatcacaaaagtctaaagtacatcttcactcaacctgatttgaatctcagacagcgaagatggttagagctgatcaaggattatgatatgggaatacattatcatcccagcaaggctaatgtggttgcagatgccttgagcaggaagagctactgcaatgttgcatgggcacagcccacactggtggagcaggttcgcatagctcaagcaagtgatcctgaaatagcagagctcaaaaagaacatgagagttggaaaagcccgaggttttgttgaggatgaacaaggaacaatctggatgggagaaagattgtgtgtacccaaaaacaaggaattaaaagacttgatactgatagaagctcatcaaactcagtattctattcatcctggcagtaccaagatgtaccaagacctcaaagaaaaattctggtgggtcagcatgagaagggaaatagctgaattcgtcgcactctgtgacgtttgccagcgagtaaaggcagaacaccaaaggccagcaggtttgctacagccacttcagattccagaatggaagtgggaagaaatcggaatggatttcattacgggtttgcccaggacgtcatcggggcatgattctatttgggtagtcgttgatcgactcactaaagtggctcacttcattccggtgcatactacctactcagggaagaagttagcagagctttatttggcaagaatcatgtgtctacatggtgtacctaagaagatcgtgtctgatcgaagaagccaattcacctcaaagttctggcagaaattgcaagaagaattgggaacccgtctgaacttcagcacagcctaccatccacaaactgatggccaaactgagcgggtcaatcaaatactagaggatatgttaagagcttgtgcgcttgactttggtggagcatgggacaaaagcttgccgtatgctgagttctcctacaacaacagttaccaggctagtctgcagatggcaccatttgaagcactgtatggacggaagtgtcgtactccgctcttttgggatcagacaggggaacgccagttgtttggtacagaagttttaaatgaggcagaagagaaagtcagagctgtcagggaaagattgagaatcgcgcaatctcgacagaaaagctatgcagacaaccgccgaagggagctcgttttccaagcaggggattatgtgtatctctgtgtcactccgctcaggggagtacaccgcttccaaaccaaaggaaagttggcaccacgctttgtgggaccatatcggattttggaacgcaggggtgaagttgcttaccagcttgagcttccctccaacatgcttggcatccataatgtgttccacgtctcccagttgaagaaatgtttgagagttcctgaggaacaggcaagtccggatcaaatcgaaatccaagaagacttgacgtatgtggagaagccgactcgtatcctcgaaaccagcgagagaaggaccagaaacaaagtaatcagattctgcaaggttcagtggagccaccactcagaggaagaggccacttgggaaagagaagatgagttgaaggccacccatccgcacctcttcgccagctctttcgaatctcgaggtcgagattccgtttgtcacaccctgaagtag

SEQ ID NO: 14678 - DNA, 4803 bp, Oryza sativa
  Clone ID: TFbOSC900357j.C1.o5.fg
atggcagttaaggaccggttcacgggaaaccctgggagacttaccgtgcttaccacaagcgggagtggttgttttactgctttcaactactgctttgaaatgcctgctttatgcaaaagaacccctagcttcctttggttatatcctgcatcatacctcctcttccgagctgaagatcttcctagttggagctgttttatcgaagttggtttcgtcgctgccgtcaagatggagataaggaatggttcacgcgactccaacaacgccagtggcagcgaagagccgatcaatggagcacgtgccaacggtgcatctgacaacagtccgtccccaccgcccgagaacccaacaattgctcaggtgttgaacaatcagactcagatgatgacaatgatgatgcaacagatgcagcaacagtaccatcaggtgttgcagcaggtgcagcagcaagcacagccgcagcagcagaacctgcaatttggtcctccgcctcctcagtccaaattgttagaatttcttcgtgtcaagccgcccaccttctcaagcaccaccaacccaatcgaggcccacgactggcttcatgccattgagaagaagctgaatcttttgcaatgcaacgagcaagagaaggttgcttttgctacacaccagctgcaaggtcccgcttctgtttggtgggacaactacatggtgacccgtccaactggggcagaggttacttggacagagtttcgtcatagtttcaataaagcacaggttcccgagggaattgtggcacaaaagaagagagagttccgttccctgcaacaaggaaccagaacagttatagagtatttgcatgagttcaaccgcctcgcgcgctacgcccctgaggacgtgcgtaccgatgccgagaggcaggagaagtttttgtctggtcttgatgatgaattgactaaccagttgatctctagagattatgaggactttgagaagctggtggataaggctatccgtcaggaggagcactgtaacaaaataaaccgtaagaggaaggcagctcagttcaggactccccaggggaagagtcagaagcctcgtttcacgatgggacatcacggtggaccttccaccatgattatccggcagcaccgtccctaccacccgggtaacttcaacaagaaccaccatagtgacagtcacaacaatagtgagcagcacagcctcaaccctactccgagttcactaaagattccagcccaatcagttcagccagctctgccagaacagcccaagaggttgggagaaaaacccgaactctgcttcaattgtaacaaacccggacacacggttggaaagtgcccgaagccaagacgtgccggacccaagttcgttcaggcccgtgttaatcatgcatctgcagaggaggcgcagtcagcaccagaggttatattgggcacattccccgtcaactcgacaccggcagtaatattgtttgattctggtgcaacccattccttcatttccaagcgttttgctggtgcacatgggttatctttagtgaagcttaagataccaatgcgggttcatactcctggaggtggcatgaccacaactcactactgcccatctgtgacagttgaaattcaagggttgatttttccagccaacctcattcttctcgaatccaaggacctagatgtcatacttggaatggattggttggcaaggcacagaggagtgattgattgcgccagccgcaccatcaagttgaccaatgcaaaaggagaggtggtaatcttccagtctccagtgccgcagaagccagggattagtttgaaccaggctgctggtgaagaacaagaggtagcagtggagaaaaccactaagaagctggaggatattcccatagtcagagagtatccagaggtttttccggatgatctgacaacaatgccaccaaaaagggatatcgagttccggattgacttggtacctggaactgcaccaatccacaagaggccttacagaatgggagccaacgagttggcggaagtcaagaagcaagttgatgaacagttacagaagggatacatccgcccgagcacgtcgccttggggtgctccggttatctttgtggagaagaaagacaaaaccaagaggatgtgcgttgactaccgcgcactcaatgaggtcaccatcaagaacaagtatcctttgccaaggattgatgatctgtttgatcagttgaaaggagctacggtgttctctaagatagacctgcgatcaggttatcaccagttgaggatccgcgaagaggatattccaaagacagcattcatcactcggtacgggttgttcgaatgcacagttatgtctttcggactcactaatgcacctgccttcttcatgaatttgatgaacaaggtgtttatggaatttctagacaagtttgtcgtggttttcatcgatgacatactaatctactccaagtccgaggaagaacatgagcagcatcttcggctggtacttgaaaagttaaaagagcaccagctatatgccaagatcagcaagtgcgacttctggcttaaggaagttcagtttctcggtcacatcgtgaatgctcaaggagtagctgtggatccagcaaatgtggagtcagttaccaaatggaccccaccaaggacagtcactcaggttcggagtttcttaggacttgcgggttattaccgccggttcattgagaacttctctaaaattgctaagccaatgacacagctattgaagaaggaagaaaagtttatctggtctgctgaatgcaataggagttttgaagaactcaaacgacggttggtgtctgcaccggtcttaatcctgcctgatcagacgaaagatttccaggtctattgtgatgcatctcgccaggggctaggatgtgtgttgatgcaggatggcaaagtggtttcttatgcttcacggcagttgcgtcctcatgaaggcaactacccgacgcatgatctggaattggccgcagttgttcatgctttaaagatttggcggcactatctcatcggtaaccgttgtgaggtatatacagatcacaaaagtctaaagtacatctttacccaacctgatctgaatctccgacagcgaagatggttggagctaattaaagattatgatatgggaatacactatcatcccggcaaggctaatgtggtagcagatgccttgagcaggaagagttactgcaacgtcgcatgggtagaggaactatgcggtgaggttcaacgtgatttggaacatttgaaccttggtatagttgagcacggattcgtggctgccctagaggcacagcccacactggtggagcaggttcgcatagctcaagcaagtgatcctgaaatagcagagctcaaaaagaacatgagggttggaaaagcccgaggttttgttgaggacgaacaaggaacaatctggatgggagaaagattgtgtgtacccgaaaacaaggaattaaaagacctgatactaaccgaggctcatcaaactcagtattccattcatcccggtagtactaagatgtaccaagacctcaaagagaagttttggtgggtcagcatgagaagggaaatagctgaattcgtagcactctgtgacgtctgtcaacgagtaaaggcagaacaccaaaggccagcaggtttgctacagccacttcagattccagaatggaagtgggaagaaatcggaatggatttcgtcaccggtttgcccaggacgtcatcggggcatgattctatttgggtagtcgttgaccgactcaccaaagtggctcacttcattccggtgcacactacctactcaggaaagaaattagcagaactctatctagcaagaatcatgtgtttacatggtgtacctaagaagatcgtgtctgatcgaggaagccaattcacttcaaagttctggcagaaattacaagaagaattgggaacccggttgaatttcagcactgcttaccatccacaaacagacggccagaccgagcgggtcaaccaaatactagaggatatgttgagagcctgtgcgcttgactttggtggagcatgggacaaaagcttgccgtatgctgagttctcgtacaacaacagttaccaagctagtctgcagatggcaccattcgaagcactgtatggacggaggtgtcgtactccgctcttctgggatcagacaggggaacgccagttgtttggtacagaagttttaaatgaggcagaagagaaagtcagagctgttagggaaagattgagaatcgcgcagtctcggcagaaaagctatgcagacaaccgccgaagggagctcgctttcgaaacaggggattatgtgtatctccgtgtcactccgctcaggggagtacatcgcttccaaaccaaaggaaagttggcaccacgctttgtgggaccatatcgggttttggaacgtagaggtgaagttgcttaccagctcgagcttccctccaacatgcttggcatccataatgtgttccacgtctctcagttgaagaaatgtttgagagttcctgaggaacaggcaagtccggatcacatcgaaattcaggaagatctgacgtatgtggagaagccgactcgtatcctcgaaaccagcgagagaaggaccagaaacaaagtaataagattctgcaaggttcagtggagccaccactcagaggaagaggccacttgggaaagagaagatgagttgaaggccacccacccgcacctcttcgccagctcttccgaatctcggggtcgagattccgtttaa

SEQ ID NO: 14679 - DNA, 2679 bp, Oryza sativa
  Clone ID: TFbOSC14567j.C1.o1.fg
atggcttcagggaacgacatgtgggatgcacttgaggccaagttcggagtttctgacgccagcagcgagctatatgtcatggagaagttctatgactacaagatggtcgatgaccgttctgtagtggaacaagctcatgagattcagatgctggctaaggagcttgagaacaacaattgtgagttgccggacaagtttgtggcgggtggcattattgccaaattgccacctttttggtcggactttgtcacttctctaaagcacaagagacaagagttcagtgtttctgatcttattggctctttgggtgttgaggagaatgcgagggcaaaggacaacttgggcaaaaaggtcgagagaggttctagtgccaatatggtacaaaagaagaaccctcaagcatcccacaacaacaagaaagttaagcctgatgtcaaacccaaggctacaaccaattttaagaagaaaggcaagggaaaggcaaagggagactgctttgtgtctcgcaagtctgggcattgggccaaggactgtcctgaacgcaaagacaggaagtctgctaacatggtcattagcaagggcggaggaacatcggggtacggtaaaattttacctacagttctctctttttttcattcacctaattggtgggttgatattggtgctaatattcatgtcgggagaggtttctccttgttgatgagaaaagggtcacttgcggctgttcatggtgttggttccaagtgccatacttgtgttcaatcgaaacaacctcgcaagcctcacaaggcatctgaggcgagggatttggcacctctagaacttgttcattccgatctgcgtgaaatgaacggcgtgttgactaaagggggaaagaaatattttatgacactgatagatgattgcactagattttgttatgtgtatctattgaaaacaaaggatgaagcattgcattactttaagacctataaagctgaggtagaaacccaagttgaaaggaaaatcaaacggttgagttctgataggagtggcgagtatttttccaatgagtttacatccttttgtgaagagtttggaattattcatgagaggacgcctccctattcaccccaatcaaatggggtagctgaaagaaagaatcatactctaactaagctgcataaggaagtaacaccattcgaggaatgggaaatgaagaaattaaatctctcatacctacgaacctgggactgtttggccaagtccagagatgccacattctttgagaatgaatttcccatgaaaaatacgcctagcacttctagtcaagaaattgtcataccccatcagcactttgcaccgataaaacacaatgatcaaacgcctgagggaaatcctgaggaggataagattgtagatactcgtaagagatgcaaatgggtttttaagaaaaagcttaggcctgatggtacaattgaaaagtacaaggcaaggcttgtggccaagggttatacccaaaaagaaggcgaggaattttttgacacctactcaccagttgcccgtttgaccacgattcgagtactacttgcattggcagcctctcatggtcttctcgtccatcagatggacgttaagacagctttcctaaacagagagctggaggaggagatctatatggatcaactagacgaatatgtactagaaggtcaggagggaatagtgtgtaaactgttgaaatccttgtgtggccttaagcaagcatctaagcaatggcatgagaagtttgacaccacacttatatctgctggttttgtcgtgaatgaagctgacaaatgtgtgtactatcgctatggtgggggagaagaagtgatcttgtgtttatatgtcgatgacatattgatctttgggaccagcctcaatgtgattgaggaggtcaaggactttttatccaagagctttgaaatgaaggatttgggagaggctgatgttattcttaacattaagctactaagaggagatgagggtatgattacacttgtgaaatcctactatatggacaagattttaagtcgctttggctacagtgactgcaagccagctgctactccttatgatcctagcgctctggaaagagtaatgcgctatctaaatgacactataagctatggaattcacactaccgggtacccaaaagtactggaagggtatagtgactcaaactggatatatgatgctgatgagataaaggccacaagtggatatgtgttcacacttggaggtggtgctgtttcttggaagtcttgcaagcagatcatcttaacgaggtcaacaatggaagcagaacttacagcactagatactgcgacagttgaggccgagtggcttcgtgaactcctgatggatttgccggtggttgaaaaaccagtgccagctatcctaatgaactgtgataatcaaacagtgattattaaagtgatcagttcaaaggacaacatgaagtcatctaggcatatcaaaagaagactgaaatatgtcagaaagcagaaaaactccggagtgatagcattggactatgtccagacggctaaaaatctggatggcttatgccttaatgtggttcaagtggcttttctaagcagagatattgacctgcaaaacatctcagaaggaacacacctatatgagttcgactgctag

SEQ ID NO: 14680 - DNA, 699 bp, Oryza sativa
  Clone ID: TFbOSC17650j.C1.o1.fg
atgtcagttacagagtacctgcacgagttcaaccgccttgcgcgctacgctcctgacgacgtgcgcaccgatgctgagaagcaggagaagtttttgtttgggctcgacgatgaattgaccaaccagctaatctccggagtctatgaggactttgagaagcttgtggacaaggctatccgccaggaagagcaacgcaacaaaatagaccgaaaaagaaagacagctcagatcagctttcctcaggggaacaatcagaagcctcgtttcatgacgggacagctaggtgggccttccaccctgatcgtctgtcagcaccatccctatcacccgagtaacttcgacaacgactacaacggtggcagtcacaacaacagtaagcagcacaaccacaactcgactccacccccactaatggcaccagctcagtcagatccgccagctgtgtcagctcagtcagaacaacccaagaagggggctgtaggaaagccaggacactgcttcaactgtggcaagcacggccactttgctggcaagtgtccgaagctgaatcgcactggacccaggctcatccaggcccgcgccaatcatgtgtctgcagaggaagcacaggcagcaccagaggtcgtgttgggcacgtttccagtgaactcatatccagcaacagttctctttgattcaggttcatacccctggaaatga

SEQ ID NO: 14681 - DNA, 625 bp, Oryza sativa
  Clone ID: TFbOSC400321j.C1.o36.np
atgtctcctctcgcccttcggcatttccttgtgaaatggtttttaaaattctcctccctgtccctctaattcttttagctgtcaaacctgaaggacaagccatcagctttgtgcatgtttggaagtcaagtcaagctaagcctcaagcttcgtgcaaagagcgagacagatggtcagcatgagggacaatttcatcgaatcaggaccctgtcagtttcatggggcaactcagtgcaattctaatagtattccacatcagcctcttgaagatcagcctcaaccccaagtcatggctaatcaaactcaaacagtggaagagttgttacaacagatgcgacgtcggtaccaaatataccagatgcaacggcaatgtcaggagtcgcgtcaatgtcaccaaccgcaggtgcaagtccagatgccagcccagaacccgaatcagagtcagagtcaggagttcccaatattggcaccgaagacccctgtcaaaatgctgtccagatccccgaagataacgacagccaagtcatcgtcagaccaaaggaaagtaagtgctacctgttatgactgtggtgagcaaggtcattatgtaaggaactgtccatggaaggtgttcgccaggtcgcct

SEQ ID NO: 14682 - DNA, 3912 bp, Oryza sativa
  Clone ID: TFbOSC401128j.C1.o12.fg
atggcgcagtctatggttcctgtatttgcaggagaaaattatgatatatggagcatcaagatgcggacgctgctgctatctcaaggattgtgggatattgttgagaatggctatcaagagtattccgctggagaaactcttacggcggaacagaaaaagtctttggcagaggatcggatgtcggacgccaaggccttgttcttgatccaacaaggagttgcggaaagtctatttccgcgtattattggcgccaagaaatccaaggaagcatgggacaagttgaaggaggagtttcaaggatctcagaaggtacttgcggtgaagcttcaaaccttgagaagacaatttcagaatttgctaatgaaggagtcagagaaggtaaaagactatttctcaagagttattgagatcgttaatcagatgcgcctctatggtgaagatataaacgaccagaaggttgtggagaaaattttaatcagtctgcctgaaaaatacgagtacattgttgctgctattgaggagtcgaaagacttgtcgactctcacaattcagcaactaatgagctcgttggaatctcacgaagaaagaaagcttcagcgcgaagggagctctattgaaaatgcatttcagtcaaagttgagcttcaggcctcaaaactcaaggtttcgcggaaattttcaaaaaaatggatttccaatgcgagaccgtggttattttcagaaaaatggcttttccaggcagaaggaagatggtcaagagagaagagaaaaaggtacgtccagttcaaatttgtggtgtgacatttgccaaaaatctagtcatactacagatatgtgttggaagaaaatgacctgcaacaagtgcaaaagaaagggccatattgcaaaatattgcagaactcgagaaattaatcgggctaatttttcacaagaaaaggaaaaatctgaagaaatggttttctcttgccatactgctcaagaagaaaaagatgatgtttgggttattgacagtggttgtacaaaccatatggccgctgatccaaatttatttcgagaaatggattcatcgtatcatgcaaagatccacatgggaaatggctctatagcccaaagtgaaggcaaaggtacggttgctgttcaaacagcagacggtccaaaatttataaaagatgttttgttggtacccgatttaaagcaaaatttgctaagtattgggcagcttctagaacacgggtacgcggtttattttgaagatttttcttgcaaaatattggaccgtaaaaataatcgtctggtcgctaaaataaatatggagaagaatagaaattttctattaaggatgaatcatacaactcaaatggctctcagaagtgaagttgatatttccgatttatggcacaaaagaatgggtcatcttaattacagagcattgaagctactcaggacaaaaggtatggttcaaggccttccatttattactctcaagtctgacccatgtgaaggttgtgtatttggaaaacaaatccgggcttctttcccacacagtggagcttggagagcaagtgcaccattcgaactagtgcacactgatatagttggtaaagtgccaacaatgtcagaaggaggaaattggtactttatcacatttattgatgattatacaagaatgatctgggtatattttctaaaagaaaaatctgcagccctggagacattcaaaaaattcaaggtcatggtggaaaatcagagtaatcgaaaaattaaagtattgcgcagtgatcaaggaggagaatatatctcaaaagaatttgagaaatattgtgaaaatgctggcatccgaagacagctgacgacaggctatagtgcgcaacaaaatggagttgcagaacggaaaaatcggacgatcaatgatatggccaattctatgctccaagacaaaggtatgcctaaatctttctgggctgaagcagttaatactgcagtttatattttaaatagaagtcctaccaaggcagtaccaaaccgtacaccttttgaagcttggtatggtaaaaagcctgtcattggtcatatgagagtatttggttgcatttgctatgctcaagtgccagcacaaaagagagtaaaatttgataataaaagtgatcggtgcatatttgttggctatgctgatggtatcaaaggctatagactttataatttggagaaaaagaaaattatcattagcagagatgtgatttttgatgagagtgctacatggaactggaagtctccagaagcctctagtactccattattgccaaccactaccatcacactaggccaaccacatatgcatggcactcatgaagtggaagatcatactccaagtccacagccatcaagtccaatgtcaagctcaagtgctagttcagattcaagcccgagcagtgaagagcaaatttctacaccggaatcagctccaagacgggtaagaagtatggttgaattattagaatctacttctcaacaaagagggtcagaacaacatgaattttgcaattattcagttgttgagccacaaagtttccaagaagcagaaaaacatgataattggataaaggccatggaagatgagattcatatgattgagaaaaataatacatgggagttggttgatcgtcctagggacagagaagttattggagttaagtgggtttataagacaaaattaaatccagatggctcagttcagaaatacaaggcaagacttgtggcaaaaggctttaagcaaaagcctgggattgattattatgagacatatgctcctgttgccaggctagagacaattcgtaccataattgctctagcagctcaaaagaggtggaagatatatcaacttgatgttaaatcggctttcttaaatggttatcttgatgaagaaatctatgttgaacaacctgaagggttttcagtccaagggggagaaaataaggtattcagactcaagaaggctttatatggattaaagcaagcgcctagagcgtggtatagtcaaattgacaagtactttattcagaaaggatttgccaagagcataagtgagcctactctatatgtcaacaaaacaggtacggatatcctaatcgtctcactctatgttgacgatttgatatatactggcaatagtgagaagatgatgcaagactttaaaaaagatatgatgcatacatatgaaatgagtgatctgggcttgctccactattttctcggtatggaagtgcatcaaagtgatgaaggaatatttatatcacaaaggaaatatgctgaaaatattctgaagaaatttaagatggataactgcaagtcagttacaacccccttgttgtcaaatgaaaagcaaaaggctagagatggagctgataaggcagatccaacaatttacagaagcttagttggaagtttattatatttgaccgcaacacgaccggatattatgtttgcggcaagtttattatcaagatatatgtctagcccaagtcaattaaattttaccgctgcaaagagagttttgcggtatatcaaagggaccgcagattatggtatatggtataagccagttaaagaatcaaaattaattggctacacggacagtgactgggctggatgtcttgacgatatgaagagcacatcaggctacgctttctcacttggttcagccgaagcagaatatgtagcagcatcaaaagctgtttcacaagttgtttggttgaggagaattatggaagatctgggcgagaagcaatatcaacctactacaatttattgcgacagtaagtctgcaattgcgatcagcgaaaatccagtcagtcatgacaggacaaaacatattgctatcaagtatcattatatccgggaagcagttgatcgctag

SEQ ID NO: 14683 - DNA, 3168 bp, Oryza sativa
  Clone ID: TFbOSC412754j.C1.o1.fg
atggcgcagtctatggttcctgtatttgcaagagaaaattatgatatatggagcatcaagatgcggacgctgctgctatctcaaggattgtgggatattgttgagaatggctatcaagagtattccgctggagaaactcttacggcggaacagaagaagtctttggtagaggatcggatgtcggacgccaaggccttgttcttgatccaacaaggagttgcggaaagtctatttccacgtattattggcgccaagaaatccaaggaagcatgggacaagttgaaggaggagtttcaagcatctcagaaggtacttgcggtgaagcttcaaactttgagaaggcaatttcagaatttgcaaatgaaggagtcagagaaggtaaaagactatttctcaagagttattgagatcgttaatcagatgcgcctctatggtgaagatataaatgaccagaaggtcgtgaagaaaattttaatcagtctgcctgaaaaatacgagtatattgttgctgcaattgaggagtccaaggatctgtcaactctcacaattcagcaacttatgagctcgttggaatctcacgaagaaagaaagcttcaacgtgaagggagctctgttgagaatgcatttcagtcaaagttgagcttcaggcctcaaaactcaaggtttcgtgggaattttcagaaaaatggatttccaatgcgagaccgtggttttcagaaaaatggtttttccaggcagaacgaatatggtcaagagagaagagaaaaaggtacgtccagttcaaatttgtggtgtgacatttgccaaaaatctagtcatactacatatatgtgctggaagaaaatgacctgcaacaagtgcaaaagaaagggtcatattgcaaaatattgcagaactcgggaaattaaccgggctaatttttcacaagagaaggaaaaatctgaagaaatggttttctcttgccatactgctcaagaagaaaaagatgatgtttgggttattgacagtggttgtacaaaccatatggccgctgatccaaatttatttcgagaaatggattcatcgtatcatgcaaagatccacatgggaaatggctctatagcccaaagtaaaggcaaagccttggagatattcaaaaaattcaaggccatggtggaaaatcagagtaatcgaaaaattaaagtattgcgcagcgatcaaggaggagaatatatctcaaaagaatttgagaaatattgtgaaaatgctggcatccgaagacagctgacggcaggctatagtgcgcaacaaaatggagttgcagaacggaaaaatcggacgatcaatgatatggccaattctatgctccaagacaaagaagtcctaccaaggcagtaccaaaccgtacaccttttgaagcttggtatggccaaccacatatgcaaggtactcatgaagtggaatatcatcctccaagtccacagtcatcaagtccaaggtcaagctcaagtgctagttcagattcaagcccaagcagtgaagagcaaatttcttacaccggaatcagctccaagacgggtaagaagtatggttgaattattagaatctacttctcaacaaagagggtcagaacaacatgaattttgcaattattctgttgttgagccacaaagtttccaagaagcagaaaaacatgataattggataaaggccatggaagatgagattcatatgattgagaaaaataatacatgggagttggttgatcgtcctagagacagagaagttattggagttaagtgggtttataagacaaaattaaatccagatggctcagttcagaaatacaaggcaagacttgtggcaaaaggctttaagcaaaagcctgggattgattattatgagacatatgctcatgttgccaggctagagacaattcataccataattgctctagcagctcaaaagaggtggaagatatatcaacttgatgttaaatcggctttcttgaatggttatcttgatgaagaaatctatgttgaacaacctgaaaggttttcagtccaagggggagaaaataaggtattcagactcaagaaggctttatatggattaaagcaagcgcctagagcgtggtatagtcaaattgacaagtactttattcagaaaggatttgccaagagcataagtgagcctattctatatgtcaagaaaacaggtacggatatcctaatcgtctcactctatgttgatgatttgatatatactggcaatagtgagaagttgatgcaagactttaaaaaagatatgatgcatacatatgaaatgagtgatctgggcttgctccactattttctcggtatggaagtgcatcaaagtgatgaaggaatatttatatcacaaaggaaatatgctgaaaatattctgaagaaatttaagatggataactgcaagtcagttacaacccccttgttgccaaatgaaaagcaaaaggctagagatggagctgataaggcagatccaacaatttacagaagcttagttggaagtttattatatttgaccgcaacacgaccggatattatgtttgcggcaagtttattatcaagatatatgtctagcccaagtcaattaaattttaccgctgcaaagagagttttgcggtatatcaaagggaccgcatattatggtatatggtataagccagttaaagaatcaaaattaattggctacacggacagcgactgggctggatgtcttgacgatatgaagagcacatcaggctacgctttctcacttggttcaggtatgtggtcctggtctacaaagaaacaaaatattgtcgctttatcttcagccgaagcagaatatgtagcagcatcaaaagctgtttcacaagttgtttggttgaggagaattatggaagatctgggtgagaagcaatatcagcctactacaatttattgcgacagtaagtctgcaattgcgatcaacgaaaatccagtcagtcatgacaggacgaaacatattgctatcaagtatcattatatccgggaagcagttgatcgccaggaagttaaattggaattttgccgaactgatgagcagttggcagatatatttacgaaggctttatccaaagaaaaattcatctgtgacagagagctcatcggagtttgcaagaaataa

SEQ ID NO: 14684 - DNA, 4245 bp, Oryza sativa
  Clone ID: TFbOSC416742j.C1.o2.np
tcctccgccacgtcctcctgcaccatctcctccggctcctccgccacctactcctgcaccatccggagccggaactggcgcaccgggagctggtgcaccgatcgacaacaccaacggaggcagttctgcctcacaatccagcggagggactttcacagggtataactctctactgttacttcggtttttgttatttcggttagtcacaatgctattgcgttctatgtatgatgatggtgcttattatatctgaagcatgctcctgtttatgtttgattttatcactagatcaactcatattgttcatgccatgattattgtcttaatattttggattaaaatatgctgatatatgactatatctccaacaatccaaaaacctgataggtcattttcggtagttggctttgccgctgcactgaaaccacatgcttttgatggttctaattataagagatggaaagcacggatactactgtggttgacagcgatgcaatgtttctatgtttcacggggtaaacgaagtgaaccacctctctctcctaaggaagaggttatgttcgaggcttcggattgcctgttccgtggagcattgatcaatgtactcgctgacaatatagtggacatgtatatgcacatgcctttagggaaggacatgtgggatgcacttgaggccaagttcggagtttccgacgccagcagtgagctgtatgtcatggagcagttctttgactacaagatggtcgatgaccgttctgtagtggaacaagctcatgagattcagatgctggctaaggaacttgagaacaataactgtgagttgccggacaagtttgtggcgagaggcattattgccaaattgccaccttcttggtcggactttgccacttctctaaagcgcaagagacaagagtttagtgtttctgatctcattggctctttgggtgttgaagagaaggcgagggcaaaggacaaccggggcaaaaaggttgagggaggttctagtgccaatatggtacagaagaagaatcctcatgcatcccacaacaacaagaaagtcaagcctgatgtcaaacctaaggctacaaccaattttaagaagaaaggcaagggaaaggcaaagggagactgctttatgtgtggcaagtctgggtattgggctaaggactgtcctgagcgcaaagataggaagtctgccaacatggtcattagcgagggcggaggaacatgggggtacgataaaattttacctacagttctctctgtttttcattcacctgattggtggattgatattggtgctaatattcatgtatgtgttgatatttccctgttttcttcttatcaggtcgggagaggttccttcctgttgatgggaaacgggtcacttgcggctgttcatggtgttggtacggtcgatctgaagtttacttcgggaaagaccgtgcagctgaagaacgtgcaacatatcccttcaataaagaagaatctagttagcggctctctactgtgtagagaagattttagacttgtgtttgaatccaataaatgtgttgtatctaaatatggaacttttattggaaaaggttatgacagcggaggcttgttccgcttttctttggatgacatgtgtaataataacaacgttgtgaaccatattagcgagaatgatgagtccaatgtgtggcattcgctactctgtcatgtgaatttcggttgtatgacgcgcttggctaaccatgagtttaattccaaaattcactttggtcaaatgtttcaagtgccatacttgtgttcaatcgaaacaacctcgcaagcctcacaaggcatctgaggcgagggatttggcacctctagaacttgttcattccgatttgtgcgaaatgaacggcgtgttgactaaagggggaaagaaatacttcatgacactgatagacaattgcactagattttgttatgtgtctctattgaaaacaaaggatgaagcattgcattactttaagacctataaagctaaggtagaaaaccaacttgaaaggaaaatcaaacggttgaggtctgataggggtggagagtatttttccaatgagtttacatccttttacgaagagtttggaattattcatgagaggacgtctccctattcaccccaatcaaatgggatagccgaaagaaagaaccgtactctaactgagatggtgaatgccatgttagacactgcgggactttccaaggaatggtggggtgaggcagttttgattgcgtgtcatgtcctgaataaaattccaatgaagcataaggaagtaacaccattcgaggaataggaaaggaagaaattaaatctctcatacctacgaacatggggctgtttggccaaggtaaatgtacctatagccaaaaagcgtaaacttggaccgaatactgttgattgtgtgttccttggttatgctattcacagcgtgggttatatattcttaatagtaaactctggagtacccgatatgcgtgttggtacgattattgagtctagagatgctacattctttgagaatgaatttcccatgaaaaatacacctagcacttctagccaagaaactgtcataccccatgagcactttgcaccgatagaacacaatgatcaaacgcctgagggaaatcctgaggaggataacattgtagatactcgtaagagtaagagacaaagggttgcaaaatcctttggagatgactacatcttatacctcgtggatgacactccaagaaccatagaagaggcatattcatctcctgacgctgactaatggaaggaagcagtacgcagtgagatagactcaattatgtctaatggtacttgagaagtcgttgagcatccatatgggtgcaagcctgtaggatgcaaatgggttttcaagaaaaagcttaggcctgatggtacaattgaaatgtacaaggcaaggctcgtggccaagggttatacccaaaaagaaggcaaggatttttcgacacctactcaccagttgctcgtttgaccacgattcaagtactacttgctctggcagcctctcatggtcttctcgtccatcagatggacgttaagacagctttcctaaacggaaagctggaggaggagatctatatggatcaaccagactggtatgtactagaaggtcaggagggaatggtgtgtaaactgttgaaatctttgtatggccttaagcaagcaccaaagcaatggcatgagaagtttgacaccacacttacatctgctggctttgttgtgaacaaagctgacgaatgtgtgtactatcgctatggtgggggagaaggagtgatcttgtgtttatatgtcgatgacatattgatctttgggaccagcctcaatgtgattgaggagatcaaggactttctatccaagagttttgaaatgaaggatttgagagagtctgatattattcttaccatgaagctactgagaggagatgagggtgggattacacttgtgcaatcccactatgtggacaaggttttaactcttactccttatgatcccagcgtgctattaaggaaaaaccgaagaatagcaagggatcaattgaggtactcccaaatcattggttcattgatgtacttagctagtgcaatgaggcctgacatctcatttgctgcaagtaagctgagccggtttgtctcaaatccgggagatgatcattggcaggctctggaaagagtaatgcgctatcttaagggcactatgagctatggaattcactatacctagtacccaaaagtactagaagggtatagtgactcaaactggatatctgatgctgatgagataaaagccacaagtggatatgtgttcacacttggaggtggcgttgtttcctggaagacttgcaagcagaccattttaacgaggtcaacaatggaagcataacttacagcactagatactacgacagttgaagccgactagcttcgtgaactcctgatggatttgctggtggttgaaaaaccagtgccagctatcctaatgaactgtgataatcaaacagttcaaaggacaacatgaagtcatctaggcatatcaaaagaagactgaaatctgttagaaagcagaaaaactctgcagtgatagcattggactatgtccaaacggctaggaatccaagatggagatcgttgcggaaacagagtaagaatcggctagagtccagatcggctgagtccgagttagatgaggat

SEQ ID NO: 14685 - DNA, 3183 bp, Oryza sativa
  Clone ID: TFbOSC8881j.C1.o1.fg
atgacctgcaacaagtgcaaaagaaagggccatattgcaaaatattgcagaactcgagaaattaatcgggctaatttttcacaagaaaaggaaaaatctgaagaaatggttttctcttgccatactgctcaagaagaaaaagatgatgtttgggttattgacagtggttgtacaaaccatatggccgctgatccaaatttatttcgagaaatggattcatcatatcatgcaaagatccacatgggaaatggctctatagcccaaagtgaaggcaaaggtacggttgctgttcaaacagcagacggtccaaaatttataaaagatgttttgttggtacccgatttaaagcaaaatttgctaagtattgggcagcttctagaacatgggtacgcggtttattttgaagatttttcttgcaaaatattggaccgtaaaaataatcgtctggttgccaaaataaatatggagaagaacagaaattttctattaaggatgaatcatccaactcaaatggctctcaggagtgaaattgatatttccgatttatggcacaaaagaatgggtcatcttaattacagagcattgaagctactcaggacaaaaggtatggttcaaggccttccatttattactctcaagtctgacccatgtgaaggatgtgtatttggaaaacaaattcgggcttcttttccccacagtggagcttggagagcaagtgcaccattggaactagtgcacactgatatagttggtaaagtgccaacaatttcagaaggaggaaattggtactttatcacatttatcgatgattatacaagaatgatctgggtatattttctaaaagaaaaatctgcagccttggagatattcaaaaaattcaaggccatggtggaaaatcagagtaatcgaaaaattaaagtattgcgcagcgatcaaggaggagaatatatctcaaaagaatttgagaaatattgtgaaaatgctggcatccgaagacagctaacggcaggctatagtactcaacaaaatggagttgcagaacggaaaaatcggacgatcaatgatatggccaattctatgctccaagacaaaggtatgcctaaatctttctgggctgaagcagttaatactgcaatttatattttaaatagaagtcctaccaaggcagtaccaaaccgtacaccttttgaagcttggtatggtaaaaagcctgtcattggtcatatgagagtatttggttgcatttgctatgctcaagtgccagcacaaaagagagtaaaatttgataataaaagtgatcggtgcatatttgttggctatgctgatggtatcaaaggctatagactttataatttggagaaaaagaaaattatcattatcagagatgtgatttttgatgagagtgctacatggaactggaagtctccagaagcctctagtactccattattgccaaccactaccatcacactaggccaaccacatatgcatggcactcatgaagtggaagatcatactccaagtccacagccatcaagtccaatgtcaagctcaagtgctagttcagattcaagcccgagcagtgaagagcaaatttctacaccggaatcagctccaagacgggtaagaagtatggttgaattattagaatctacttctcaacaaagagggtcagaacaacatgaattttgcaattattcagttgttgagccacaaagtttccaagaagcagaaaaacatgataattggataaaggccatggaagatgagattcatatgattgagaaaaataatacatgggagttggttgatcgtcctagggacagagaagttattggagttaagtgggtttataagacaaaattaaatctagatggctcagttcagaaatacaaggcaagacttgtggcaaaaggctttaagcaaaagcctgggattgattattatgagacatatgctcctgttgccaggctagagacaattcgtaccataattgctctagcagctcaaaagaggtggaagatttatcaacttgatgttaaatcggctttcttaaatggctatcttgatgaagaaatctatgttgaacaacctgaagggttttcagtccaagggggagaaaataaggtattcagactcaagaaggctttatatggattaaagcaagcgcctagagtgtggtatagtcaaattgacaagtactttattcagaaaggatttgccaagagcataagtgagcctactctatatgtcaacaaaacaggtacggatatcctaatcgtctcactctatgttgacgatttgatatatactggcaatagtgagaagatgatgcaagactttaaaaaagatatgatgcatacatatgaaatgagtgatctgggcttgctctactattttctcggtatggaagtgcatcaaagtgatgaaggaatatttatatcacaaaggaaatatgctgaaaatattctaaagaaatttaagatggataactgcaagtcagttacaacccccttgttgccaaatgaaaagcaaaaggctagagatggagctgataaggtagatccaacaatttacagaagcttagttggaagtttattatatttgaccgcaacacgaccggatattatgtttgcggcaagtttattatcaagatatatgtctagcccaagtcaattaaattttaccgctgcaaagagagttttgcggtatatcaaagggaccgcagattatggtatatggtataagccagttaaagaatcaaaattaattggctatacggacagtgactgggctggatgtcttgacgatatgaagggcacatcaggctacgctttctcacttggttcagccgaagcagaatatgtagcagcatcaaaagctgtttcacaagttgtttggttgaggagaattatggaagatctgggcgagaagcaatatcagcctactacaatttattgcgacagtaagtctgcaattgcgatcagcgaaaatccagtcagtcatgacaggacgaaacatattgctatcaagtatcattatatccgggaagcagttgatcgccaggaagttaaattggaattttgccgaactgatgagcagttggcagatatatttaccaaggctttatccaaagaaaaatttgtccgcgacagagagctcatcggagtttgcaagaaataa

SEQ ID NO: 14686 - DNA, 3597 bp, Oryza sativa
  Clone ID: TFbOSC900080j.C1.o8.fg
atggcgcagtctatggttcctgtatttgcaggagaaaattatgatatatggagcatcaagatgcggacgctgctgctatctcaaggattgtgggatattgttgagaatggctatcaagagtattccgctggagaaactcttacggcggaacagaaaaagtctttggcagaggatcggatgtcggacgccaaggccttgttcttgatccaacaaggagttgcggaaagtctatttccgcgtattattggcgccaagaaatccaaggaagcatgggacaagttgaaggaggagtttcaaggatctcagaagatgcgcctctatggtgaagatataaacgaccagaaggttgtggagaaaattttaatcagtctgcctgaaaaatacgagtacattgttgctgctattgaggagtcgaaagacatgttgactctcacaattcagcaactaatgagctcgttggaatctcacgaagaaagaaagcttcagcgcgaagggagctctattgaaaatgcatttcagtcaaagttgagcttcaggcctcaaaactcaaggtttcgcggaaattttcaaaaaaatgaatttccaatgcgagaccgtggttattttcagaaaaatggcttttcaaggcagaaggaagatggtcaagagagaagagaaaaagatatgtgctggaagaaaatgacctgcaacaagtgcaaaagaaagggccatattgcaaaatattgcagaactcgagaaattaatcgggctaatttttcacaagaaaaggaaaaatctgaagaaatggttttctcttgccatactgctcaagaagaaaaagatgatgtttgggttattgacagtggttgtacaaaccatatggccgctgatccaaatttatttcgagaaatggattcatcgtatcatgcaaagatccacatgggaaatggctctatagcccaaagtgaaggcaaaggtacggttgctgttcaaacagcagacggtccaaaatttataaaagatgttttgttggtacccgatttaaagcaaaatttgctaagtattgggcagcttctagaacacgggtacgcggtttattttgaagatttttcttgcaaaatattggaccgtaaaaataatcgtctggttgccaaaataaatatggagaagaacataaattttctattaaggatgaatcatccaactcaaatggctctcaggagtgaaattgatatttccgatttatggcacaaaagaatgggtcatcttaattacagagcattgaagctactcaggacaaaaggtatggttcaaggccttccatttattactctcaagtctgacccatgtgaaggatgtgtatttggaaaacaaattcgggcttcttttccccacagtggagcttggagagcaagtgcaccattggaactagtgcacactgatatagttggtaaagtgccaacaatttcagaaggaggaaattggtactttatcacatttatcgatgattatacaagaatgatctgggtatattttctaaaagaaaaatctgcagccttggagatattcaaaaaattcaaggccatggtggaaaatcagagtaatcgaaaaattaaagtattgcgcagcgatcaaggaggagaatatatctcaaaagaatttgagaaatattgtgaaaatgctggcatccgaagacagctaacggcaggctatagtgctcaacaaaatggagttgcagaacggaaaaatcggacgatcaatgatatggccaattctatgctccaagacaaaggtatgcctaaatctttctgggctgaagcagttaatactgcaatttatattttaaatagaagtcctaccaaggcagtaccaaaccgtacaccttttgaagcttggtatggtaaaaagcctgtcattggtcatatgagagtatttggttgcatttgctatgctcaagtgccagcacaaaagagagtaaaatttgataataaaagtgatcggtgcatatttgttggctatgctgatggtatcaaaggctatagactttataatttggagaaaaagaaaattatcattagcagagatgtgatttttgatgagagtgctacatggaattggaagtctccagaagcctctattgttgagccacaaagtttccaagaagcagaaaaacatgataattggataaaggccatggaagatgagattcatatgattgagaaaaataatacatgggagttggttgatcgtcctagagacagagaagttattggagttaagtgggtttataagacaaaattaaatccagatggctcagttcagaaatacaaggcaagacttgtggcaaaaggctttaagcaaaagcctgggattgattattatgagacatatgctcctgttgccaggctagagacaattcgtaccataattgctctagcagctcaaaagaggtggaagatttatcaacttgatgttaaatcagctttcttaaatggctatcttgatgaagaaatctatgttgaacaacctgaagggttttcagtccaagggggagaaaataaggtattcagactcaagaaggctttatatggattaaagcaagcgcctagagcgtggtatagtcaaattgacaagtactttattcagaaaggatttgccaagagcataagtgagcctactctatatgtcaacaaaacaggtacggatatcctaatcgtctcactctatgttgacgatttgatatatactggcaatagtgagaagatgatgcaagactttaaaaaagatatgatgcatacatatgaaatgagtgatctgggcttgctccactattttctcggtatggaagtgcatcaaagtgatgaaggaatatttatatcacaaaggaaatatgctaaaaatattctaaagaaatttaagatggataactgcaagtcagttacaacccccttgttgccaaatgaaaagcaaaaggctagatatggagctgataaggcagatccaacaatttacagaagcttagttggaagtttattatatttgaccgcaacacgaccggatattatgtttgcggcaagtttattatcaagatatatgtctagcccaagtcaattaaattttaccgctgcaaagagagttttgcggtatatcaaagggaccgcagattatggtatatggtataagccagttaaagaatcaaaattaattggctatacggacagtgactgggctggatgtcttgacgatatgaagagcacatcaagctacgctttctcacttggttcagccgaagcagaatatgtagcagcatcaaaagctgtttcacaagttgtttggttgaggagaattatggaagatctgggtgagaagcaatatcagcctactacaatttattgcgacagtaagtctgcaattgcgatcagcgaaaatccagtcagtcatgacaggacgaaacatattgctatcaagtatcattatatccgggaagcagttgatcgccaggaagttaaattgaaattttgccgaactgatgagcagttggcagatatatttaccaaggctttatccaaagaaaaatttgtccgcgacagagagctcatcggagtttgcaagaaataa

SEQ ID NO: 14687 - DNA, 4008 bp, Oryza sativa
  Clone ID: TFbOSC900089j.C1.o25.fg
atggcgcagtctatggttcctgtatttgcaggagaaaattatgatatatggagcatcaagatgcggacgctgctgctatctcaaggattgtgggatattgttgagaatggctatcaagagtattccgctggagaaactcttacggcggaacagaaaaagtctttggcagaggatcggatgtcggacgccaaggccttgttcttgatccaacaaggagttgcggaaagtctatttccacgtattattggcgccaagaaatccaaggaagcatgggacaagttgaaggaggagtttcaaggatctcagaaggtacttgcggtgaagcttcaaaccttgagaagacaatttcagaatttgctaatgaaggagtcagagaaggtaaaagactatttctcaagagttattgagatcgttaatcagatgcgcctctatggtgaagatataaacgaccagaaggttgtggagaaaattttaatcagtctgcctgaaaaatacgagtacattgttgctgctactgaggagtcgaaagacttgtcgaaagactcgttggaatctcatgaagaaagaaagcttcagcgcgaagggagctctattgaaaatgcatttcagtcaaagttgagcttcaggcctcaaaactcaaggtttcgcggaaattttcaaaaaaatggatttccaatgcgagaccgtggttattttcagaaaaatggcttttccaggcagaaggaagatggtcaagagagaagagaaaaaggtacgtccagttcaaatttgtggtgtgacatttgccaaaaatctagtcatactacagatatgtgctggaagaaaatgacctgcaacaagtgcaaaagaaagggccatattgcaaaatattgcagaactcgagaaattaatcgggctaatttttcacaagaaaaggaaaaatctgaagaaatggttttctcttgccatactgctcaagaagaaaaagatgatgtttgggttattgacagtggttgtacaaaccatatggccgctgatccaaatttatttcgagaaatggattcatcgtatcatgcaaagatccacatgggaaatggctctatagcccaaagtgaaggcaaaggtacggttgctgttcaaacagcagacggtccaaaatttataaaagatgttttgttggtacccgatttaaagcaaaatttgctaagtattgggcagcttctagaacacgggtacgcggtttattttgaagatttttcttgcaaaatattggaccgtaaaaataatcgtctggtcgctaaaataaatatggagaagaatagaaattttctattaaggatgaatcatacaactcaaatggctctcagaagtgaagttgatatttccgatttatggcacaaaagaatgggtcatcttaattacagagcattgaagctactcaggacaaaaggtatggttcaaggccttccatttattactctcaagtctgacccatgtgaaggttgtgtatttggaaaacaaatccgggcttcttttccccacagtggagcttggagagcaagtgcaccattggaactagtgcacgctgatatagttggtaaagtgccaacaatttcagaaggaggaaattggtactttatcacatttatcgatgattatacaagaatgatctgggtatattttctaaaagaaaaatctgcagccttggagatattcaaaaaattcaaggccatggtggaaaatcagagtaatcgaaaaattaaagtattgcgcagcgatcaaggaagagaatatatctcaaaagaatttgagaaatattgtgaaaatgctggcatccgaagacagctaacggcaggctatagtgctcaacaaaatggagttgcagaacggaaaaatcggacgatcaatgatatggccaattctatgctccaagacaaaggtatgcctaaatctttctgggctgaagcagttaatactgcagtttatattttaaatagaagtcctaccaaggcagtaacaaaccgtacaccttttgaagcttggtatggtaaaaagcctgtcattggtcatatgagagtatttggttgcatttgctatgctcaagtgccagcacaaaagagagtaaaatttgataataaaagtgatcggtgcatatttgttggctatgctgatggtatcaaaggctatagactttataatttggagaaaaagaaaattatcattagcagagatgcgatttttgatgagagtgctacatggaactggaagtctccagaagcctctagtactccattattgccaaccactaccatcacactaggccaaccacatatgcatggcactcatgaagtggaagatcatactccaagtccacagccatcaagtccaatgtcaagctcaagtgctagttcagattcaagcccgagcagtgaagagcaaatttctacaccggaatcagctccaagacgggtaagaagtatggttgaattattagaatctacttctcaacaaagagggtcagaacaacatgaattttgcaattattcagttgttgagccacaaagtttccaagaagcagaaaaacatgataattggataaaggccatggaagatgagattcatatgattgagaaaaataatacatgggagttggttgatcgtcctagggacagagaagttattggagttaagtgggtttataagacaaaattaaatccagatggctcagttcagaaatacaaggcaagacttgtggcaaaaggctttaagcaaaagcctgggattgattattatgagacatatgctcctgttgccaggctagagacaattcgtaccataattgctctagcagctcaaaagaggtggaagatatatcaacttgatgttaaatcggctttcttaaatggttatcttgatgaagaaatctatgttgaacaacctgaagggttttcagtccaagggggagaaaataaggtattcagactcaagaaggctttatatggattaaagcaagcgcctagagcgtggtatagtcaaattgacaagtactttattcagaaaggatttgccaagagcataagtgagcctactctatatgtcaacaaaacaggtacggatatcctaatcgtctcactctatgttgacgatttgatatatactggcaatagtgagaagatgatgcaagactttaaaaaagatatgatgcatacatatgaaatgagtgatctgggcttgctccactattttctcggtatggaagtgcatcaaagtgatgaaggaatatttatatcacaaaggaaatatgctgaaaatattctgaagaaatttaagatggataactgcaagtcagttacaacccccttgttgccaaatgaaaagcaaaaggctagagatggagctgataaggcagatccaacaatttacagaagcttagttggaagtttattatatttgaccgcaacacgaccggatattatgtttgcggcaagtttattatcaagatatatgtctagcccaagtcaattaaattttaccgctgcaaagagagttttgcggtatatcaaagggaccgcagattatggtatatggtataagccagttaaagaatcaaaattaattggctacacggacagtgactgggctggatgtcttgacgatatgaagagcacatcaggctacgctttctcacttggttcagccgaagcagaatatgtagcagcatcaaaagctgtttcacaagttgtttggttgaggagaattatggaagatctgggcgagaagcaatatcagcctactacaatttattgcgacagtaagtctgcaattgcgatcagcgaaaatccagtcagtcatgacaggacgaaacatattgctatcaagtatcattatatccgggaagcagttgatcgccaggaagttaaattggaattttgccgaactgatgagcagttggcagatatatttaccaaggctttatccaaagaaaaatttgtccgcgacagagagctcatcggagtttgcaagaaataa

SEQ ID NO: 14688 - DNA, 4547 bp, Oryza sativa
  Clone ID: TFbOSC900147j.C1.o12.np
atggtgaagacaaggaatgatccccgtgactccaacgacaccagtggtagcgaagagcagatcgatggagcacataccagtggtgcatctggcagcagttcatctccaccgcccgagaacccaacggtcactcagatgatgacaatgatgatgcaacagatgcagcaacattaccatcagatgttgcagcaggcgcagcagaatcagcagtttggtcctccaccatcacgtctgtccagactgttagagtttcttcgtatccagccacccactttctcaagcaccaccaacccaatggaggccaacgactggctccgtgctattgagaagaagctgaaccttctgcaatgcaacgaccaagagaaggttgcctttgctacacaccagctgcaaggttccgcttctgcctggtgggacaactacgtggtaacccgtccagctacaatggaggttacttgggcagagttttgtcaaagcttcaggaaggcacagattcttgaggggattatggcacaaaggaaaagagagttccgtgcattgtaacaaggaaccaggacagttacagagtacttgcacgagttcaaccgccttgcgcgctacgctcctgaggacgtgcgcaccgatgccgagaagcaggaaaagtttttgtttggtcttgatgatgagttgaccaaccagctaatctctggagtctatgaggactttgagaagcttgtggacaaggctatctgtctggaagagcaacgcaacaaaatggactgtaaaagaaaggcagctcagatcaggactcctcaagggaacaatcagaagcctcgcttcatgatgggacaactgggtgggccttccaccctgatcgtccgtcagcaccatccctataatccgggcaacttcaacaacgactacaacggtggcagtcacaacaacagtgaacagcaccaccacaacttgactccacccccattaatggcaccagctgagtcagaactaccagctatgtcagctcagttagaacagctcaagaaggagtctgcaggaaagccaagaccctacttcaactgtggcaagctcggtcactttgctggcaagtgtccgaagcggaagcgcgctggacctaggttcgtccaggcccgcgtcaatcatgcatctgcagaggaagcacaggcagcaccagaggtcgtgctgggcacgtttctagtgaatttatttctggcaacaatactttttgattcgggtgcctcgcattctttcatttccaagagatttgctgggacacatggattatcagtagtggaacttaaaataccgatgcgggttcatacccctggaaatgacatgaacaccgcacactactgcccctggcgactatagagatcaaaagatcacagtttcaatccaacctcatccttctcgaatccaaagacctagatgtcattctcggaatggattggttgaccagacacaagggagtgattgactgcgcaagtcgcactatcaccctaaccaatgacaaaggagagaagatcaccttccgttctccagtgccacagaagtccgtagcaagtctgaatcaggctgctattgaggatcagacagaaatagcagagaaaagtccccaaaaattggaggatattcctatagtacaagagtatcctgaggtgtttcctgaagacctcactacaatgccaccgaagagagagatcgagtttcggattgatttggcaccgggaactgccccgatctacaagaggccctacaggatggcagctaatgagctagcagaagtcaaaaagcaagttgatgaacagctgcagaaagggtacattcgaccgagtacttcaccttggggtgctccggttatctttgtggagaagaaagacaaaaccaagagaatgtgcgttgattatcgcgcccttaatgaggtcacaatcaagaacaaatatccgttgccaagaattgatgacctgtttgatcagctaaaaggagctaaggtgttttccaagatagacctgcgatcaggctatcatcagttgagaattcaggaggaggatattcccaagacagccttcaccactcggtatgggttgtttgagtgcacggttatgtcatttggactcaccaatgcaccggttttcttcatgaacttgatgaacaaagtgtttatggaatttctggacaagtttgtcgtggtgttcattgacgacatacttatttattcaaagtcagaagaggaacatgagcaacatctccgtctggtactcgagaaattgaaggagcaccagttatataccaagtttagcaagtgtgacttctggttgtcggaagtcaaatttctgggtcacgttattactactcaaggtgtggcagtggatccatcgaatgtggagtcagttaccaagtggaccccacctaagacagtttctcagatccggagtttttttggacttgcgggttattatcgtcggttcattgaaaatttctccaagattgccaggcccatgacacagttgcttaagaaagatgaaaaatttaagtggtcagctgagtgcaaccaaagttttgaagaactcaagaagaagttagtctctgcaccagtcctgattctgccggaccagacgaaagacttccaggtctactatgatgcatctcgccaaggactaggatgtcttctgctgtaggaaggccgagtggtcgcatatgcttcgcgacagctgcgtccacacgagaccaattaccctactcatgatctagagttggcaccagtggttcacgctctaaaaatctggcggcactatcttattggcaaccgctgtgaagtctacactgatcacaagagcctgaagtacatcttcactcagtctgacttgaatctccgacagcgaagatggctggagttgataaaagattatgacatggggatacattatcatccaggcaaagcaaatgtggtggcagacgctctgagcagaaagagctattgcaatgcagtatgtaccgaaggcatgtgtgacaaattgcagcaagatcttgagcacataaatttgggcatcgtggaacacgggttcgcagctgccctagaggcacggcctacgcttgtggatcaagtcagagcagctcaggtaaatgatcctgaaatagctgagctgaaaaagaatatgaggtttggaaaagcccgagattttcatgaggatgagcatgacacaatttggttgggagaaagattgtgcgtacctgacgacaaagagctaaaagatctgatactaactgaagctcatcaaactcagtattcaattcatcccggcagtactaaaatgtaccaggacctcaaagagaaattctggtgggccagcatgagaagagagatagccgaatttgtcgcactctgcgatatttgtcagcgagtcaaagcagaacaccagaggcccgtaggattgcttcaacctcttcagatcccggaatggatatgggaagagattggaatggatttcataacaggtttgcccaggacatcatcggggcacgattcaatctgggtagttgtggatcgactcacgaaagttgctcacttcattccagtgaacaccacctatacagggaagagtttggcagagctgtacttagcaaggatcatgtgtttgcatggggtacctaagaagattgtatctgatcgagggagtcagttcacttcaaagttctggcagaagctgcaagaagaattggggactcgtttgaatttcagcacggcttatcatccgcaaactgatggtcagaccgagcgagtcaatcaaatattggatgatatgttgcgagcctgtgcacttgactttggcggagcttgggataaaagtctgccttatgcggaattctcctacaacaacagttatcaggccagtttgcaaatgacaccgtttgaagcattgtacggacggaagtgccgcactctgctcttctgggatcaaaccggagaacgccaactatttgggacagaagtgctaaccgaagcagaggagaaagtcagaaccgtcagagaaaggctaagaattacgcaatctcgacagaagagttatgctgacaaccgccgaagggagcttagttttgaagcaggagattatgtgtaccttcatgtcactccgctcaggggagtacaccggttccaaaccaaagggaagttggcaccacgcttcgtgggaccatacaggatcttggaacgcagaggtgaagttacttaccagcttaagcttccatctaacatggctggaatccatgatgtgttccatgtgtctcagttaaagaagtgcttgagggtaccagaagaacaagccgattcagagcacatcgacatccaggaagatctgacatatgtggtgaagccgattggtatcctcgaaaccagtgagagaaggactagaaataaggtgatcagattttgcaaagtccagcggagccaccactcagaggaagaggccacctaggaaagagaagatgaattgaaggccgctcatccgcacctcttcgccagctctttcgaatctcggggtcgagattccgtt

SEQ ID NO: 14689 - DNA, 4094 bp, Oryza sativa
  Clone ID: TFbOSC900329j.C1.o22.np
acttgggcagagttttgtcaaagcttcaggaaggcacagattcttgaggggattatggcacaaaggaaaagagagttccgtgcattgtaacaaggaaccaggacagttacagagtacttgcacgagttcaaccgccttgcgcgctacgctcctgaggacgtgcgcaccgatgccgagaagcaggaaaagtttttgtttggtcttgatgatgagttgaccaaccagctaatctctggagtctatgaggactttgagaagcttgtggacaaggctatctgtctggaagagcaacgcaacaaaatggactgtaaaagaaaggcagctcagatcaggactcctcaagggaacaatcagaagcctcgcttcatgatgggacaactgggtgggccttccaccctgatcgtccgtcagcaccatccctataatccgggcaacttcaacaacgactacaacggtggcagtcacaacaacagtgaacagcaccaccacaacttgactccacccccattaatggcaccagctgagtcagaactaccagctatgtcagctcagttagaacagctcaagaaggagtctgcaggaaagccaagaccctacttcaactgtggcaagctcggtcactttgctggcaagtgtccgaagcggaagcgcgctggacctaggttcgtccaggcccgcgtcaatcatgcatctgcagaggaagcacaggcagcaccagaggtcgtgctgggcacgtttctagtgaatttatttctggcaacaatactttttgattcgggtgcctcgcattctttcatttccaagagatttgctgggacacatggattatcagtagtggaacttaaaataccgatgcgggttcatacccctggaaatgacatgaacaccgcacactactgcccctggcgactatagagatcaaaagatcacagtttcaatccaacctcatccttctcgaatccaaagacctagatgtcattctcggaatggattggttgaccagacacaagggagtgattgactgcgcaagtcgcactatcaccctaaccaatgacaaaggagagaagatcaccttccgttctccagtgccacagaagtccgtagcaagtctgaatcaggctgctattgaggatcagacagaaatagcagagaaaagtccccaaaaattggaggatattcctatagtacaagagtatcctgaggtgtttcctgaagacctcactacaatgccaccgaagagagagatcgagtttcggattgatttggcaccgggaactgccccgatctacaagaggccctacaggatggcagctaatgagctagcagaagtcaaaaagcaagttgatgaacagctgcagaaagggtacattcgaccgagtacttcaccttggggtgctccggttatctttgtggagaagaaagacaaaaccaagagaatgtgcgttgattatcgcgcccttaatgaggtcacaatcaagaacaaatatccgttgccaagaattgatgacctgtttgatcagctaaaaggagctaaggtgttttccaagatagacctgcgatcaggctatcatcagttgagaattcaggaggaggatattcccaagacagccttcaccactcggtatgggttgtttgagtgcacggttatgtcatttggactcaccaatgcaccggttttcttcatgaacttgatgaacaaagtgtttatggaatttctggacaagtttgtcgtggtgttcattgacgacatacttatttattcaaagtcagaagaggaacatgagcaacatctccgtctggtactcgagaaattgaaggagcaccagttatataccaagtttagcaagtgtgacttctggttgtcggaagtcaaatttctgggtcacgttattactactcaaggtgtggcagtggatccatcgaatgtggagtcagttaccaagtggaccccacctaagacagtttctcagatccggagtttttttggacttgcgggttattatcgtcggttcattgaaaatttctccaagattgccaggcccatgacacagttgcttaagaaagatgaaaaatttaagtggtcagctgagtgcaaccaaagttttgaagaactcaagaagaagttagtctctgcaccagtcctgattctgccggaccagacgaaagacttccaggtctactatgatgcatctcgccaaggactaggatgtcttctgctgtaggaaggccgagtggtcgcatatgcttcgcgacagctgcgtccacacgagaccaattaccctactcatgatctagagttggcaccagtggttcacgctctaaaaatctggcggcactatcttattggcaaccgctgtgaagtctacactgatcacaagagcctgaagtacatcttcactcagtctgacttgaatctccgacagcgaagatggctggagttgataaaagattatgacatggggatacattatcatccaggcaaagcaaatgtggtggcagacgctctgagcagaaagagctattgcaatgcagtatgtaccgaaggcatgtgtgacaaattgcagcaagatcttgagcacataaatttgggcatcgtggaacacgggttcgcagctgccctagaggcacggcctacgcttgtggatcaagtcagagcagctcaggtaaatgatcctgaaatagctgagctgaaaaagaatatgaggtttggaaaagcccgagattttcatgaggatgagcatgacacaatttggttgggagaaagattgtgcgtacctgacgacaaagagctaaaagatctgatactaactgaagctcatcaaactcagtattcaattcatcccggcagtactaaaatgtaccaggacctcaaagagaaattctggtgggccagcatgagaagagagatagccgaatttgtcgcactctgcgatatttgtcagcgagtcaaagcagaacaccagaggcccgtaggattgcttcaacctcttcagatcccggaatggatatgggaagagattggaatggatttcataacaggtttgcccaggacatcatcggggcacgattcaatctgggtagttgtggatcgactcacgaaagttgctcacttcattccagtgaacaccacctatacagggaagagtttggcagagctgtacttagcaaggatcatgtgtttgcatggggtacctaagaagattgtatctgatcgagggagtcagttcacttcaaagttctggcagaagctgcaagaagaattggggactcgtttgaatttcagcacggcttatcatccgcaaactgatggtcagaccgagcgagtcaatcaaatattggatgatatgttgcgagcctgtgcacttgactttggcggagcttgggataaaagtctgccttatgcggaattctcctacaacaacagttatcaggccagtttgcaaatgacaccgtttgaagcattgtacggacggaagtgccgcactctgctcttctgggatcaaaccggagaacgccaactatttgggacagaagtgctaaccgaagcagaggagaaagtcagaaccgtcagagaaaggctaagaattacgcaatctcgacagaagagttatgctgacaaccgccgaagggagcttagttttgaagcaggagattatgtgtaccttcatgtcactccgctcaggggagtacaccggttccaaaccaaagggaagttggcaccacgcttcgtgggaccatacaggatcttggaacgcagaggtgaagttacttaccagcttaagcttccatctaacatggctggaatccatgatgtgttccatgtgtctcagttaaagaagtgcttgagggtaccagaagaacaagccgattcagagcacatcgacatccaggaagatctgacatatgtggtgaagccgattggtatcctcgaaaccagtgagagaaggactagaaataaggtgatcagattttgcaaagtccagcggagccaccactcagaggaagaggccacctaggaaagagaagatgaattgaaggccgctcatccgcacctcttcgccagctctttcgaatctcggggtcgagattccgtt

SEQ ID NO: 14690 - DNA, 4353 bp, Oryza sativa
  Clone ID: TFbOSC900402j.C1.o15.fg
atggcaggaatgtcggcatttagagtgtatttcagtgaaggtgaaattatggaaaatgaaagtggtgtcaatctgagcaactttaggcaatgcacactataccatccaaatcctgacacccttaccatgcccgaagtttggtactggctaacatgcacattttctttagatccgggtatatatagtgttaacgtgagggttatgtggagccgatcggccaacaacataagatgggagttaaaaaatgtgacacggagtaaggcctggcaggattggctcgctggctgcaggagacggggatatgaatatgtcatgctggtgcaagcatgtcaaggaagagtccccacggagagcgcagcggggcaatccagcaaccgtgaggagttggggtctagttcacacgaagaagatgaagttgtagctccccatcatggtggcgatgttggtcctgacattcaaaatctatccatacaaggagatgaagtggtcaaccgccatcctactggtgaagccgatgaaggggaggacatacctgctatagttgaagaaattgagagggtggaccgacatgcaatcgaagatgaggaaaacctcgctgctgaagagaatgatgacgaggatgaacaagaagttgaggaagttcctatgcctgcttcgtggaaccttgaagaccctggttatattgcagaaaactcttgtcatgattcaatatggttctacggggatggccaaatcaatctgggtgcaatgttccgtgacaaaacggggttgcaagacgcagtgaagtcatggtcattcaagacgcaaaggcagttcagggttgtgaagtctaacaagactgagtacacggtcgtcttccgtcttcatggtcacgtgccaaagtacgagtcttactggattctgtccaaactgcaggaacactcctgtctgattcggaacactagggagtcgcaccgcaacctgaccgcggcatacgttgcgaacaagtactacaaggaaattattgaaggtgatgacctgcctgtgcggcacataataaaactggtggagaaaggtgaacaatacacaattagttaccacaaggcttggagggcgaaacaaaaggccatggagaaaagatatgggacatttgaggaagcatacgacactctgtcacagatgcttaacattctgaagatcaggaaccctaggacctatgttgctgtgcaggatcgggagtcaattcgtcctccaaattatcttgtgatgcaacgggcattctttgcattcggagcatgcattcttgcgttccagtgctcgaggccggtgctgtgtgtcgacggtactttcctaactgggaagtaccgaggccaaatattaacagctgttggtgcggatgcgaacaaccagataattccagtagcttttgcttttgttgaaagcgagaattacgaaagctggttgtggttcttgcaacatctaaagtggggagtggtgcaaaaacgcacatcgatatgcatcatccatgaccggaatgccggtctgttgaaggcaatcaaagagctccaggaggatggtgatggtgcatactactggcctgacatgcacagccgttggtgcatgcggcacatgggagccaattttttcaaacaattcaacaaccggcgtctgatgaacatgttcaagcggttgtgcaaggcaaatcagtccacaaagttcgatgagctttggaaacaacttgacgaggtgacaaggacacatatccggtcaaagcagaccaacatcaacctgctggatgtacatgtcccccaggccctggaaccaatggatgatcttattccatcaaatggaaagaagcgtaggtcatcaaagaatatcaaatgttttacccattggattgagtgcgagccgaatgataagtgggcactcctgcatgacactaatggggctaggcatggcataatgaccactaatcttgcagaggcgtacaatgtggttcttagcaaattaaggcctttacctctgactgctattgttgaaggcattatgcacaggacaacgatgtggatgaggacgaggcgggccgcggcgttgcaacaaatgtctaatgcacaaacacctttctgcaaaaagatggcagagtacctccaagagaaggctaacaaggccagatttcacacggtcattaccactgggaacgtaagacgaaggtgggaagtcacatgtcgcactaagggggattttggatcttctactggggtcatcactcatgaagttactctagggcacgaatctgataacacatgttcgtgctcttgcaataagccgaagcttcttcataagccatgtagccatgtcctggccgcatgcgctaaaattaagcttgattcaacatcatacgtgtcgacgttctacctaaaggatagagttctaaatgcatggagtgctgagatcctcgggtggaggtccctccaacacctagtcgaaactgggggtgataacaggatctatgtgccagacttggatttgttgaaggccggtaagggtagaagacaaacacgtcgcttaagaaatgatatggatgcatccgaagcgggagggcctgtaaggcgatgtgagaactgtcttcagtacgggcaccgcactagagattgcaagaataacaaggagggtcttcttaccttcgtgcagatgacgcaggcaaggatgcattacgacgctagagaacctaaacaaaaacaaatgggggcacatagaaaacgacgacaaaatatcgacaagtccctacttatggcactggttgataggtggaggccagagacacatacatttcatctaccgtgcggagaaatgaccataactttgcaggatgtgtccatgctcatggggctgccactagccggccaggcaattgtacttccggaccctccgaaagattggagagatgatattgtatcacgatatgcctgtattttgccatggtacgctaccggtgatacagacgatgatgaggacaaaatatttttctctgaaaaagaaactcatggccccacattgaagtggttgtcacagtttgaggtgcgatatatgcccgacgatgtccaggagtaccaactgacgttgtaccttgaggcttatctactttggctgtttggttgggtcatgttcaccgggtcacacgggaacactgtggacgccaagctaatcccccttgctcaccaaattgctgaagaccgggcaaagcgcttctcgttcggacgtccatacatgagcgtggccgtggcccacaaggacgattacactaacgcaattgatgatcgtcctaccttcggtactcgctggtgctacggaccgccacagtgggcgagaatccaggtgcacaatgtgtacgagtactttaccgaggcgttcgaaagccttagggaaaatgaagttcggtggactccgtacacgaacgaagaggccattttgcgtgcaccgcatggagggtataatgttcaaagggtaatgcgtcagatgggactgtaccaacaagtcccagttcctgttggacttcaccttccaccagatgtgcacacgcaaaagaggcaagctgacaacaggagaccagggcatacgaccacaacacttacgaataatacatggcctggggagttagtaagggatgcaaaaacattgtgggagaagcttagagatggaatggcgggtaccaaccaggaagttatggctgcggtcgactccctccgtcgaaaaggaaagcgaatcatgcggctcgcatcgtgccggcattcctcggacgtctataatccggcaacatcaacaaggacgttcgagccaatgccggagtgtccctctacctcttcccggccgtccacctcagtccgcccttcagcatccgcgcgacgatccagtgatggtcgtgcaggagtaaggtcaacttcgtttcgtgatccacccactattccgactatcccagaaatcactgaaatttcggaacgcctaggaggctttggttcaactcaagagggaacgcgaatggtccgtcccgtgcctcatatgcctcctgctaggccacaaatgattcctcaaatggctctcgatgtgccaacctcacactggcaaggaggatttgcaccatttgcagggcctactcagtcggttccactgcatgcacctacatatggcaccaacccatggcaaggacaatccatagattacggtgggtcatttcgccctgaaataatgtcagggtttagtccttacactacatcgtacgacgacatgtctagcttcggtggagggtcgtcatcggtacccaacgagcttcggacttcacaaactaatgatgcgcctcatgtgacacagcccacataa

SEQ ID NO: 14691 - DNA, 1431 bp, Oryza sativa
  Clone ID: TFbOSC400683j.C1.o15.fg
atgtcatggcacagggctggtgtcctgctgctaggagctcaatcctgcctgcctgtcccggaggttccggctgtagatggggctgggtcggtacttttgtttatggctaggatgggttgggaactatgtgacgtcttccgtccgtatgccgtggtgatggataacactggtaacaaaggctatgtgaatgatggatccgatgactcaagaacccaagccaatgggaatgagaaaagcatcaacgaaacctcaccagagctaatccaaattgtggttaaccaaaccaacatgttggcaacagcatttcaactattacagaattggaacaacccagcaggggcaaccaacgttcaagtacctacagtccagcaacagtgcaagttatcagaatttctaaaaactaagcctccaacctttgccattgccgtcgatcctatggaagctagtgattggttgcgcacagtcgagaagaagctggggttgattcagtgcacagaccaggagcgggttgtctttgcaactcatcagttggttggaccagcttcagaatggtgggatagctacgaagcatcacggccagaaggacataccatcacctgggatgagttttcagccgtgttgaagagatcacatgttcccgcaggaatgatcacactgagaaaacgagaattccgctacctgaagcaagaagatttgaccgtcacagagtacctgcatgagttccatcgtttggctcactatgggttaaaagatgagatcgcagtgcaactactcctagaggaatatgaagattttgagaaacttgtggacaaaaccatacaactcgaaagtgagcataatcggatgaagaactgcaagagaaggattgtcagcatcccaacatttccatgtggtaaccaaagacagcgcactgagccacttcagatcaccggatcttctattgcgcatcaagagttcctgccccaagaagacggacacaatgcagacaataacattagcaatactaatgatgatgataccaccaacaaccatgcttcttgccccattagtgaccactcgaatcaagcgtgcaatgtcaacatcattcaccaaggtgtcgacgatagtatcaatgatggcacccagaatgacaaccctagaaattgtgatagcaactatggtaccactgatgccaatgttagcaaggatttccaaccaccaattccaactccaagtcagaatgatcgtccccagacggacagctcaataaagaagacgttgatttgttacaactgcaaagaaccagggcatgacttgagggactgtctacaaccaaggcaaagtcggcctccacattaccgccaatttacacgaagcagacatcctaatcgtattgtggtcactggagcaaacgccatacctgtgaggcctcgtgttaatcataacccatag

SEQ ID NO: 14692 - DNA, 3342 bp, Oryza sativa
  Clone ID: TFbOSC401051j.C1.o8.fg
atgtcgacaaccggcgacaacaacaacactggagacaaggagaaggagcctctcgtcaacaccaacggaggcaatactgcctcaaactccagcagagggccattctcgggatataacgtttcactattaccgttcgttcttcgtttcctacaactgtcggtcgcagtattattgcgttctcttatctatgttgatgcttattctatattaagcatgctcatgttgtacacatctagcactgtcactagatctactcaaattacaaatgtcatgtggaaagcacgtgcacttttgtggttgacggtgatgcaatgtttctttgtttcacggggcaaaccgagtgaaccgccgctctcccctgaggaagaggctaagttcgaggttgcggattgcttgttccgtggagcattgatcagtgtgctcgccgacagtattgtggacgtgtatatgcacatgccttcaaggaaggacatgtgggatgctcttcaggccaagttcagggtttccgatgccgggagcgagctgtatgttatggagcagttctatgactacaacatggtcgacgaccgttctgtagtggaacagtttgtggcgggtggcattattgccaaattgccaccttcttggtcggactttgctacttctctaaaacacaagaggcaagagttcagtgttactgatctcattggctctttgggtgttgaggagaaggcaagggcaaaggacaaccggggcaaaaaaaagaacgatggaggttctagtgccaatttggtgcagaagaagaaccctcacgcatctcacaacaacaagaagaaagtcaaacctgacgtcaaacctaaggctacaaccaattttaagaagaaaggccagggaaaggcaaaagtagatttctttgtgtgtggcaagcctgggcattgggccaaggattgtcttgatcgcaaagacaagaagtctgccaacatgatcattagcgagggcggaggaacatcggggagaggttcctccttgttgatgggaaacggatcgcttgcggctgttcatgatgttggtacagtcgatctgaagtttacttcgggaaaaatcgtgcagctgaagaacatgcagcatgtcctttcaataaagaagaatctagttagcggctctctactgtgtaaaggtggttttagacttgtgtttgaatccaataaatgtgtcgtatctaaatatggaacatttattggaaaaggttatgactgcggaggcttgttccgcttttccatggatgatatgtgtaataaagttgtgaaccatgtaagcgatgatgatgatgagtccaatgtgtggcattcgcgacattgtcacgtgaattttggttgtatgacacgcttagccaacatgagtttaattccaaaattcactttagtcaaaggctctaagtgtcatacttgtgttcaatcgaaacaacctcgcaaacctcacagggcatctgaggtgaggaatttggcaccactagaacttgttcattccgatctgtgcgaaatgaacggcgtgttgactaaagggggaaagaaatatttcatgagagtgatagataattgcactagattctgctatatgtacctattgaaaacaaaggatgaagcattacattactttaagatcgataaggctgaggtagaaaaccatctggaaaggaaaatcaaacggttgaggtctgataggggtggagagtatttttccaatgagtttaattctttttgcgaagagtatgaaattattcatgagaggacgcctccctattcaccccagtcaaacggggtagctgaaagaaagaaccgcactctaactgagatggtaaatgccatgttagacactgcaggattttccaaggaatggtggggtgaggcaatattgactgtgtgtcatgtcctgaatagaattcctactaagcataaggaagtaacaccattcaaggaatgggaaaggaagaaattaaatctctctcacctgcacacatggggttgtttggtcaaggtaaatgtacctatagccaaaaagtgtaaacttggacaaaagaccgtagattgtgtgttccttggttatgctatccacagtgtgggatataggttcttaatagtaaattctagagtacccaacatgcgtgttggtacaattactgagtccagagatgccacattttttgagaatgaatttcctatgaaaaatgcacttagcacttctagtcaagaacctattttatctcctgagcactttgtgccgatagaacacattgatcaaatgcttgaggaaaatcctgaggaggataacattgtagcaactcgaaagagtaagagacaaaggactgcaaagtcttttggagatgactacattgtatatcttgtggatgatactccaagaaccattgaagaggcatattcatctcttgacgctgactattggaaggaagcggtatgcagtgagatggactcaattatgtctaatggtacttgggaagtcgccgagcgtccatatgggtgcaagcctgtaggatgcaaatgggttttcaagaaaaagcttaggtctgatggtacaattgaaaagtataaggcaagacttgtggcaaagggttatacccaaaaagaaggcgatgactttttcgacacttattcaccagttgctcgcttgaccacgattcgagtactacttgctctggcagcctcttatggtctactcgtccatcagatggatgttaaagacagctttcctcaatggagagttggaggacgagatctatatggatcaaccagatggcttaagcaatggcatgagaagtttgacaatacacttacatctgctggctttattgtgaacgaagctgacaaatgtgtgtactatcgctacggtgggggagagggagtgatcttatgtttatatgttgatgacatattgatctttgggaccagtctcaatgtgattggggaggtcaaggactttctgtccaaaagctttgaaatgaaggatttggaagtggctgatgttattcttaacattaaactactgagaggagatgagggtaggattacacttgtgcaatctcactatatggataaggtcctgagtcgctttggttatagtgactgcaaggcagctcctactccttatcatcctagtgtgctattaaggaaaaaccaaagaataggaaaggatcaattgagatactcccagatcattggttcattgatgtacttagctagtgcaacgaggcctgacatctcatttgttgtgagcaagttgagccggtttatttcaaatccgggagatgatcattggcatgctcttgaaagagtaatgcgtgctatctaa

SEQ ID NO: 14693 - DNA, 1550 bp, Oryza sativa
  Clone ID: TFbOSC413055j.C1.o5.np
actatcaactgtgcttggccaagaacttgaactgcttctccgccgaatcctcggagcgatgtcgtggttgaaagagcagggctgtaaatggaggtttcatgcctctacaataattacattgttatatgtgcaggtcaaggtaaataggcctgcccacagttgttgttccataaataagactggggctgccatggcaacaaatagctgggttgctgaaagagttatagattggctgaaggagattccaactctaggagctagtgcattgaaggtcaagctagagaagaagtacaaatttacaataggatatgacaaagtttttagaggcaaagagaaggcccttgagaagatatttgggaagtgggaagacagctttgcattgctgcccacttttagagaggagcttttgaaggcacaacctggaagtattgtcgatattgataccgagattcatgaagaccaagtatgcttcaggcggctgttcatagctctaaaaccttgcattgatggattcctacaaggttgtaggccatatattgcaatggactcaacacacttgacagggaagcatagaggacagctggcagctgctgttgcaatagatggaaacaactggctttttcctgttgcatttggtgtgatagaagctaagacgacggagaggtggacatggttcgtgcagaacttgaagaatgctattggtaatcctcctgggctagccatcagcacagatgctgggaaaggactagagagagctgttagtgatgtctatccaactgctgagcaccgggagtgcatgcgacacctgtggaagaacttcaagaagcagtaccatggaccactttttggtgaaaacatgtggcatgctgctaagtgctacaccagccagcagtacaactatcacatgaacaagattgctgagaaatctcctgaagctattgcatatttaaaaaccaatcacccatttttttggagtaggagcaaattctcagagctttcaaaggtggactacatcaacaacaatctttctgagtcattcaacaattgggtgatgaagatcaaggaattacacatagtggacttatttgacacacttaggcaaatgataattgacaaatttcacttgagccaacttgcaagcaaaatggaaggaagaataattccatctattattaagacactgaatgaacagagcaagaatctaaaagattacaatgtggtaaggagtaattgcgatgatttagctgaagtttctatggtgtccaacaagggagtggtatggaggcatgcagtgaacctgaaggctcatacatgcttcaaattgatgaggccaaagttgaggagaaagcctggaaggcctaggacacataggattaaagcttcagatgagcctggctgtagaaagaagaggacatgccctgaatgtggtgacaaaggccactttgcaaagacatgtaagcaaagcagagcagcttgatcccgaggtcaggtcccggcaatatttgctaaacaaggaaatggtggattgcacccctttgttagtgattatt

SEQ ID NO: 14694 - DNA, 3525 bp, Oryza sativa
  Clone ID: TFbOSC409246j.C1.o6.fg
atggtgaagacaaggaatgatccccgtgactccaatgacgccagtggcagcgaagagcagatcgatggagctcataccagtggtgcatctagcaacattccatctccactgcccgagaacccaacggtcactcagatgatgacaatgatgatgcaacagatgcagcaacattaccatcaaatgttgcagcaggcgcaacagaaccaacagtttggtcccccaccatcccacttgtccaaactgttagactttctccgcatcaagccacccactttctcaagcaccaccaatccaatggaggccaacgactggctccgtgctattgagaagaagctgaaccttctgcaatgcaacgaccaggagaaggttgcttttgctacacatcagttgcaaggtcccgcttctacctggtgggacaactatgtggtaacccgtccagatgcaacggaagttacttgggcagagttttgtcaaagcttcaggaaggcacaaattcccgaggggattatggcacaaaggaagagagagttccgtgcactccaacaaggaaccatgtcagttacagaatacctgcatgagttcaaccgccttgcgcgctacgctcctgaggacgtgcgcaccgatgctgagaagcaggagaagtttttgtttggtcttgatgatgagttgaccaaccagctaatctcgggagtctatgaggactttgagaagcttgtggacaaggctatctgccaggaagagcaacacaacaaaatggaccgtaaaagaaaggcaactcaattcagggctcctcaggggaacaatcagaagcctcgcttcatgacgggacaacaagctcagttagatttaccagctgtgttagctcagtcagaacagctcaagaaggagtctgcaggaaagccaggaccctgcttcagctgtggcaagcacggccactttgctggcaagtgtccgaagctgaagcgcgctggacctaggttcatccaggcccgcgtcaatcatgcgtctgcagaggaggcacaggcagcaccagaggtcgtgctgggcacgtttccagtgaactcatatctggcaacagtactttttgattcgggtgcctcgcattctttcatttccaagagatttgctgggacacatggattatcagtagtggaacttaaaataccgatgcgggttcatacccctggaaataacatgaagacagcacactattgtccctcagtgactatagagatcaagagatcacagtttctatccaacctcatccttcttgaatccaaagacctagacgtcattctcggaatggattggttgaccaggcacaagggagtgattgactgcgcaagtcgcaccatcaccctcaccaacgacaaaggggagaagatcaccttccgttctccagtgtcgcagaagtccgtagtaagtctgaatcaggctgctattgaggatcagacagaaatagtgaagaaaagtctaaaggaattggaggatattcctaaagtacaagagtatcctaaggtgtttcctgaagacctcactacaatgccaccaaagagagaaatcgagttccggattgatttggcacccggaaccgctccaatttacaagaggccgtacagaatggcaactaatgagctagcagaggtcaagaagcaagttgatgaacagctgcagaaaggatacatccgaccgagtacttcaccttggggtgctccggtcatctttgtggagaagaaagacaagactaagaggatgtgcgttgattatcgcgccctcaatgaggtcactatcaagaacaagtatcccttgccaaggattgatgacctgtttgatcagttaaagggagctaaagtgttttccaagatagatctgcgatcaagctatcaccagttgagaattcaggaagaggatcttcccaagacagccttcaccactcggtatgggttgtttgagtgcacggttatgtcattcggactcaccaatgcaccggccttcttcatgaacttgatgaacaaagtgtttatggagtttcttgacaagtttgtcgtggtgttcattgacgacatacttatctattcaaagtctgaagaacaacatgagcaacatctttgtctggtactcgagaaattgaaggagcaccagttatatgccaagtttagcaagtgtgacttctggttgtcggaagtcaagtttcttggtcacgtcattactgctcaaggtgtggcagtggatccatcgaatgtggagtcagttaccaagtggaccccacctaagacaatttctcagatccggagttttcttggacttgcgggttattaccgtcagttcattgaaaacttctctaagattgccagacccatgactcagttgcttaagaaagatgaaaagttcaagtggtcagctgagtgcaaccaaagttttgaagaacttaagaagaagctagtatctgcacccgttctaattctgcccgaccagatgaaagacttccaggtctattgtgatgcatctcgccaagggctgggatgtgtactgatgcaggaaggcagagtggtcgcatatgcttcgcgacagttgcgtccacacgagaccaattaccctactcatgatcttgagttggcagcagtggttcacgctctgaaaatctggcggcactatcttattggcaaccgctgtgaagtctacactgatcacaagagcctgaagtatatcttcacccagcctgacttgaatctccgacagcgaaggtggctggagttgataaaagattatgacatggggatacattatcatccaggcaaagcaaatgtggtggcagacgctctgagcagaaagagctattgcaatttagtatgtactgaaggcatatgtgacaaattgcagcaagatcttgagcacctaaatttgggcatcgtggaacacgggtacgtagctaccctagagtcacggcctacactcgtggatcaagtcagagcagctcaggagaaagttaggaccgtcagggaaagactgcgaatcgcccagtctcggcagaagagttatgctgataactgccgaagggagctcactttcgaagcaggagattatgtgtaccttcgtgtcactccgctccggggagtacaccgcttccagacgaaaggcaagttggcaccacgttttgtgggaccatacagaatcttggaacgcagaggtgaagttgcataccagcttgagcttctatccaatatggctggtattcatgatgtgtttcacgtgtctcaactgaagaagtgtttgagggtacctgaggaacaagctagctcaaagcacatcgacattcaagaggatctgacatatgtggagaagccgatttgtatcctcgaaaccagtgagagaaggaccagaaacaaggtgatcaggttttgcaaagttcagtggagccatcactctgacgaagaagcaacatgggaaagggaagatgagttgaaggccgcccatccgcacctctttgccggctcttccgaatctcggggtcgagattccgtttaa

SEQ ID NO: 14695 - DNA, 2008 bp, Oryza sativa
  Clone ID: TFbOSC414373j.C1.o37.np
tcctccgtttcttgtcttctccagcgcgagcaacacagagagggggagagacagggtgccgccgtttcggtcgccgacggccggaacgctagctcggaggatgacgctactatcatgcacctggcacgcatggtggaggcgtacgacacgggccgcatcaacttccatcatatggtgcgccgtgggttggtcgaggacaacatgaagatcctggagctacgttaggagaatttgcagctgaaggacttggacgccgtggaggcgcagctgtgtcagctcaagattgctcagggggagatctgtcgccccaagcgccgccgcgtttgccgcagccagaagatcaccgcccgcaagagtacctctaggcctgagcttgttcgtcagttcttggcgtggacctgcttcgtggagactccttgcgtcgagcccgcgcccttggttccttaggaggagggagcctctggcgttggcagcacggaggatgtgttgttgctcaccttccgccctggcccgtcgcagaagagaagcgctgctaccggtgagggcagtcaccccgaaggcagcaaccacaacaaccatggcagcccacctccacctccccctccgccaccaccaccgccacccgataccaaccccatcctcacccaaatcctcgctcagcaggccaacatgatggctgctttcctccaccacatccagactccgccgcaacacaatgctccaccaccaccaccaccacccccacagcactccaagcttgccgagttcctccacatccgcccgcctaccttctctagctccaataaccccgttgatgccttggactggttgcatgccgttgggaaaaagttggacaccgtccagtgcaatgatgaggaaaaagttatcttcgcaacccatcagctgcaagggcccgcatcactatggtgggaccacttccaggctatgcagccagaaggacagccaatcacctgggcccgcttcaccgccgctttccaaaggacccatgtgccagctggagtcatggcccttaagaagagggaatttcgggagttgaagcaaggcaaccgctctgttatggagtatttgcatgagttcaataacctggcctggtacgccctggaggatgttcgtgaagatgaagaaaagcaggagaagtttctagtaggaatggaccctgaactttctgtgcgtctggtctccggggattaccctgatttccagctcgtagtggacaagagcatccgcctggaggccaagcacaaggaactggagtcacacaaacgtcgcttggcgaatttccgtaatcaacagggggctaaccaaaggatccgctacaccaatccctatccagggggatcctcctcacaacaacagcagcaacaacctcgcccagtgccatgacctcaatttgtggtacgcgttccacagccgcagcaacagcagaatcagcaagggaaccgtgcaccccgtccccctgcaccggccgtgcagcctagtcatggacgcagggatgttcaaggtcagccgcgtttgtgcttcaactgtttagagcctgggcacttcgcggataaattcccaaagccgaggcgttaggaaggccaagcgcctccccgccccaacaatggtggaaaggatgccactcggggtcgtgtgaaccatgttactgcagaggatgtgcagacaactccagatgtcatcatcggtacgttcttcattcattccatccccgctaccattttgtttgactctggagcttcccactcgtttatatctgtgcaattcgtggggagaaatcagctggggttagaaaggcttaggaactcactgctcatcaccacccctggaggagctatgacagcaaagtattatagcccggccgtacctatagagatccagggaattccttttccctcggatctgatccttatagacaccaaggatttggatgtgatcctcgggatgaattgttgacccaattccgaggagtagtggattgagcaaggcg

SEQ ID NO: 14696 - DNA, 1086 bp, Oryza sativa
  Clone ID: TFbOSC423123j.C1.o13.fg
atggcgccgacaggtatgaaatttgatttggtgaagtttgacggctctggaaattttggcttgtggcaaactagggtcaaagatttgttagctcaacaaggtgcttcaaaggctttgaagggtgtcaaaccggccaagatggaggatgacgattgggaggagatgcagttgcaggtggctgcgacaataaggctatgtctttcagatcagaagttgtatgggctaaagatgcaggaaggggtggatctgacagcacatgtgaacgttttcaatcaactagtcacagatcttgtgaagatggatgtggaagttgacgatgaagacaaggccatagttcttttgtgttcgttacctgaatcgtatgagcatgtgatgagaaagaacaaagagggtgaaacatctcaagcggagggtttgctagtcaaagaagatcatgctgggcataaggtaaagaagaacaaaaagaagaaggtggtgcagtgcttcagatgtgatgagtgggggcatataagcaagaagtgcccaatactgaagggaaaagctaaggctaatgcagcgacttcttcaaatgactcagatagcgatggttgtgatcttctcaaaatgtcaagtgcacagtctaaggatgcagaagcgtggatattagattcagctagctcgtttcacgtgacgccaaggaaggagtggttcttttcatacaagtctagtgagtttggttttgtctacttaggcgatgacacaagttatccagccgtgggagtaggtgaagtcaaaatcaagctagaagatggaggtgaacatgttcttcagggtgtcaggcatgtaccagggctaaagaggaatctgatttcgcttggaaccttgcatgaagaagggttaatatttcgcggtaatcggaataagaagaccatggagatcatgaagggcaagacgactgtgatgactggagagaaggtggagtcgcaactttacaagctgcgagggtgcactattgcaggtggagtccaggaggaagcggttgctgggatagcaattgcttttggtggcggcgggtctggcgcagactcgtcgggcggcttgcggtga

SEQ ID NO: 14697 - DNA, 5076 bp, Oryza sativa
  Clone ID: TFbOSC18587j.C1.o4.fg
atggcagattacaccactcgtgggcatgagataaagttagatgagacacaaaccatagttgctacatcatcttccataagtgcagataataaagcgaagcaaaaacagtgccacaatttatttctagcaaggttcatggttaagcatagatcatgtcgtgttatattcgatagtggtggaagttgcaacaaccttgtgagttcagatttagttgagaaccttgggttgcctataaaaccgcatcctcatcgatattacatccaattgttcaattcttttcataagaatgaaggtaatgataatggtgctagatttactcaagataagttcaataggttcaatgacaaggtgaaaccgaagacggtttccaatcaagaaggtgaagatgatgaggacacaactagctcagatatgactatgcctatcttatgtattaatcaacaaaaggaattagccttttcgatggccggcagcatcaaccgtcgtggtctggacctgactggcttcgttttggagctgcggggcatgtgcgttgtcttggggtatccgcatggagtggactaccagggcaagcaactcccggagcaggagggtgatgatgcagagccccacgctacttgggaggtcactgcagtgatcctcactggctcacccgagaggacttcgttggcagtcaccaacgccgctctcctcgccattggcactctgcaccagcgctacctagacgagttgcagcactcgccctaccgctaccaccctcgtcgcggaggagcccgcgactacgccaccttccgggatgctagctcggaggatgacgccaccatcatgcacctggcgcgcatggtggaggcttacgacgcggctcgtatcgacttccatcatatggtgcgtcgtgggttggtcgagaacaacatgaagatcctggagctgcgtcaggagaatctgcagctgaagaaggacctagacgcagtggaggcgcagctgtgtcagctcaagatcgcccagggagaggtttgtcgccccaagcgccgtcgcgtctgccgcagcctgaagatcaccgcccgcaagagtacctccaggcccgaacttgttcgtcagtccctggcgtggacctgcttcgtcgagacccctcgtgccgagcccgcgcctgtggttcctcaggaggagggagcctccggcgttggcagcacggaggatgcgctgctgctcaccttccgccctggcccgtcgcagaaagtcgtgtggggcatggttataccgatggtgacaaccaggagaagtgctactaccggtgatggcaaccaacccgaaggtagcaaccacaacaaccatggcagcccacctccgcctcctcccccgcctccaccaccaccaccagacaccaactccatcctcacccaaatcctcgcccagcaggccaacatgatggctgctttcctccaccacatccaaaatccgccacagcataatgctccacctccaccaccacccccgcaacactctaaactcgccgagttcctccgcatccgtccgcctaccttctctagctccaataaccccgtggatgctttggattggttgcatgccgtggggaaaaagttagacaccgtgcagtgcaacgatgaggagaaagtcatctttgccgctcaccaactgcaggggcccgcatctctatggcgggaccacttccaggctacgcagccagaaggacagcctattacttgggcccgcttcaccgccgctttccggaggacccatgtgcccgccggagtcatggcccttaagaaaagggaattccaagagttgaagcaaggcaaccgctctgtgatggagtatttgcatgagtttaacaacctggcccggtacgccccggaggatgttcgtgaagatgaggagaagcaagagaagttcttggcagggatggaccctgagctgtccgtgcgtctggtctccggggattatccggatttccagcgtttggtggacaagagcatccgcttggaagccaagcacaagaaactggagtcgcacaagcatcgcttggcaaatttctgcaaccaacagggggctaaccaaagagtccgctacaccaatccctatccagggggatcctcctcgcagcagcaacagcagcagcaacctcactccgcgccccgagctcaattcgtggtgcgcgttccacagctgcagcagcagcagagtcagcaagggacccgtgcgccccgtcctcctacgccagccgtgcagcctggacaaggccgcagagacgttcaaggtcagcagcgtctgtgtttcaactgcttcaagcccaggcactttgcggataaatgcccaaagccgaggcgccagcaaggccaagcgcctccccgccccaacaacggtggtaaggatgtcattcggggtcgtgtgaaccacgtgactgccgaggatgtgctgacaactccagacgtcatcgttggtacgttcctcattcattccatccctgctaccattttgttcgactctggagcttcccactcgtttatatctgtgccattcgtggggagaaatcagttgggggtagaaaggcttaggaaccctctactcatcaccacccctggaggggttatgacagcaaaacacgaagaacttggatgtgatccttgggatgaattggttggctcaattccaaggagtagtggattgcgcaaacgcactgtcactctgtaccgagggccggaacaaccggtagttttctttgcacccccaacctctgtcggcagttcggaacttcatcagataggactgtcggaaacccccatcgtcagtgagttcggagatgtgtttccggaagaactacccggtatgccgcccaagcgagagattgagttccggatagatcttgctccaggaacaactcctctgtacaagcaaccctaccgtatggcagcaaatgaactggccgaagtcaagaaacagttggaagagttgaaagaaaaggggtatatacggccgagcacttccccctggggtgctcccgtgatttttgtggaaaagaaggacaagacaaagaggatgtgtgttgactacagagctctcaatgaagttactatcaaaaacaagtaccctcttccccggaccgatgatctgttcgatcagcttaaaggtgccactgtcttttcaaaaatcgatcttcgctccggatatcaccaattgcgtattcgtgaagaagatatcccgaagaccgcgttcaccacgcgatatgggctgtatgaattcacggtgatgtcgttcggtctaactaatgctcctgccttcttcatgaacttaatgaataaagtgttcatggaatacttggataagtttgttgtggtcttcatcgacgacatcctggtgtactcgcaatcagaggaagaccatcagcaacatctccgtcgggtgttgggaaagttgcgggaacatcaattgtatgccaagcttagcaagtgtgagttctggttgtccgaagtcaaattcttagggcatgtgatatctgctaaaggagttgctgtggaccccaaaacagtgaccgccgtcactgattggaagcaacccaagacagtcactcaaattcacagctttttgggtttggccgggtactaccgaaaattcatcgagaatttctccaaaattgccagacccatgacgcagttgctgaagaaggaagaaaaatttgtgtggagcccgcaatgcgagaaagcgttccaaactctcaaagaaaagctggtttcctcgccagtgttaatcttaccggatactcgcaaggacttcctggtgtactgtgacgcttcgcgccaaggattggggtgcgtgctcatgcaggaaggtcatgtggtagcctatgcctcccggcagcttcgtcctcatgaaggcaactaccctacccatgatttggagttagccgctgtgaggagatggttagaactcatcaaggattatgatgtgggaatttactatcatcctggtaaggccaacgtggtcgccgacgctctaagtcgaaaaagccgttgcaacactcttggcgtccatgacattccaccggaacttaatcaacagatggaagccctgaatctaagcatagttagtcgtggatccttggctatgctggaagccaagcctaccttgctcgatcaaatccgcgaggctcagaagaatgatccagatatgcatgggatcctcaagaatatgaaacaagagttcgtggccctttgtgatgtgtgccagcgtgtcaaggcagagcaccaacgaccggccggacttctccaacctctccaagtaccagaatggaaatgggatgaaattgggatggatttcatcaccggacttccaaaaacccagggcggatatgattctatatgggtagtcatggatcgactaaccaaggtagcccggtttattcctgtgaagaccacctatggagggaacaaactagctgaactctacttcgctaggatcgtgagtctccatggcgttcctaagaaaattgtatctgataggggaagccaattcacctctcacttctggaagaagctccaagaagagttgggtacccgattaaatttcagcactgcgtatcacctgcagacagatgggcagaccgagcgtctgaaccagatcctcgaagatatgctgcgcgcatgcgttctagatttcgggaagacctgggataagagtctcccctatgccgagttctcctacaataacagctaccaagccagcctacaaatggcaccctacgaagcgttgtatggacgcaaatgtcggacaccgctattgtgggaccaagttggggaaagccaagtgttcaggactgatatcctgagagaagctgaagcgaaagtcagaaccattcgggagaatctaaaggtggcccagtctcggcagaagagttatgcagacaaccgatgccgtgacctggaattcgcagtggatgactttgtgtaccttcgggtcatgccattgcggggcgtacacaggtttcaaacgaaaggaaagctcgcacctcggttcatgggtcctttccgtatcattgctcaacgcggagaagtcgcttactag

SEQ ID NO: 14698 - DNA, 1618 bp, Oryza sativa
  Clone ID: TFbOSC401453j.C1.o7.np
atggccaagaagaccctttgcgaattcgctgccccatctgctgacaacgtgcctgttggcccgctgtcaacattggagacaccgatttcgaccttaagagcagcctgataactatggcgcaggcaagcccgttctttggcaagccgaatgaggacgcaagcgttcatctgcagcaattcctagagatctgcaccacttacacggtaaaaggtgtcagtctggacgccgagaggctatgtttgtttcctttctcactcttgggaaaggcaaagcagtggttctacgtaaaccgaatgatagttaacactcgggacagatgctccactgcgttcctctccaaattcttcccgatggaagcatgggaatgtctgcaggagtatgtagctgcctgccctaatcatgggatggatgactggctcatcctgcagagtttctacaatagactcactccatcgtcgatggatcaccaggatgctgctactggggttgccttcttctcaaagatagtccgtgcggcaattgatattattgagaagatggtatccaacatgggctggagtgaagaacgactccagaccagtcatcgtggcatgcacaccgtcaaggagacggagatgcttgctgctaaactggatgtcctaatgaagagacgggacgatcaggagaaatccaagccgcaggacactgtcaaggcattggactcgcacatcacatgcgaggtctgtggaaacactggtcactcaggaaatgattgccccgaaacccatgaggaagccatgttcatggggaacaatggctaccggcaacaaggaggccaggggtggaaccagctccggccattctaccaaggaggcaacaacagcaacaataacggtaatttcgaccagccctccttaaaggacttagtttttacgcaagctaaaacaactgttgctgtaaaaaaaagctttccattaatgataaagtagccgctttagtacctactaaggagacgggaaggattctgaggcagcccgaatcaccacgaggggacgaaaatccactcgggatccgccatatcctaacactgcagggaccaggcaagctggcgaggaggaatggggcatagcagaacccaaggaagatgaggaggcgcagctcgacaagatcccgccgcaggaatactatgactcaacgctgctgccgttccctccatgccagaagaagccttccgtggactagcaattcgctcggttcatggatgtcatccagaagatccacatcaacatcctgttggtggatgcaatgcgggtaccaatatacgcccgctatctcaaagacatcctgaacaacaagaggccactgcctaccatggagatggtcaagcttacggaggagtgtagcaatgctatactccactgactcccggaaaagaagaaaaatccagggtgtcccacgatatcatgctcaattgggacattgcatttcaaccaagccttatgcgatcttggggccagtgtcagcgtgatgcggaaggacgtctttgacaagctgaactatacgatattgatcccaacaccgatgaggctccaactagctgatttctctatctgctaccaagcaatcttggggggagatg

SEQ ID NO: 14699 - DNA, 5415 bp, Oryza sativa
  Clone ID: TFbOSC407182j.C1.o1.fg
atggatgaagtcgggggtcgatggacattctccagggcaaatgaaggctacacgagctgcggcccgatggccggcagcgttacccgtcgtggtttgggcatgactggcttcgtcttggagctgcgaggcatgtgcgtggtcttggggtatccacatggagtggattaccaggccaggccgctcccggagcaggagggtgaggatgcagagcctcacgctggttgggaggtcactgcagtgatcctctccggctctcccgagcggacttcgctggcagtcaccgcgggtggagactccttccccgccgcttgccagaacgccgctctcctcgccatcggcacccttcaccagcgctacccggacgagttgcagcactcgccctaccgctaccaccctcgtcgcggaggagcccgcgactacgccaccttccgagacgccagctcggaggatgacgccaccgtcgtgcatctggcacgcatggtggaggcgtacgacgcggctcgtatcgacttccaccagatggtgcgtcgtggcatggtggagaacaacatgaagatcctggagctgcgccaggagaacctgcagctcaagaaggacctcgacgcgttggaggcgcagctgcatcagctcaagatcgcccagggagaggacagccgtcccaagcgtcgccgcgtctgccgcagccagaagatcaccgcccgcaagagcacctccaggcccgagcttgttcgtcagtccctggcgtggacctgcttcgtcgagacccctcgtgccgagcctgcgcccgtggttccccaggagggggaagcctccggcgttggtagctcggagggtgcgctgttgctcaccttccgtcctggcccgtcgcagcgctctccttctctgtttgctggttctgtgtggggttttcagatggtgacgaccaggagaaatgttaacaccggtgaaggcaaccaacccgagggcagcaaccccaacccccaaggcaatccacctccaccaccaccaccagacaccaacgccattctcacccaaatcctcgcccagcaagccaacatgatgaatgctttcctccaccacctccaaaatccaccacaacagaatgctccaccaccacctccccaacactccaaactcgccgagttcctccgcatccgcccacctaccttctctagctccaacaatcccgtagatgcgttggattggttgcatgccgtggggaagaagctagacactgtgcagtgcagtgatgaagagaaagtcatcttcgccgcccaccagctgcaggggcccgcatctctatggtgggaccatttccaggccacgcagcccgaggggcagccgattacttgggctcgcttcaccgccgctttccggagaacccatgtgcccgccggagtcgtggctctcaagaaaagggaattccgggagttgaagcaaggcaaccgctccgtgatggagtatttgcatgagttcaacaatctagcccgttacgctccggaggatgtgcgggaagatgaggagaagcaagagaagttcttggcaggaatggaccctgagctgtccgttcgtctagtctctggggactatcctgattttcaacgactggtggacaagagcatccgcttggaagccaagcacaaggagctggagtcgcacaagcgccgcttggcgaacttccgcaatcagcagggtgctaaccagagggtccgctacactaatccctacccagggggatcctcctcgcagcagcaacaacagcagcagccacctcgcccagcgccccgacctcaattcgtggtgcgcgtcccacagccgcagcagcagcagaatcagcaagggactcgtgcgccccgtcctcctacgccagctgtgcagcccgttcaaggccgcagggacgcttcaggtccgcagcggctgtgcttcaactgcttcgagcccgggcactttacggataaatgcccgaagccaaggcgtcagcaaggccaagcgcctccccgctccaacaacggcgggaaggatgtcattcggggtcgtgtgaatcacgtgacggccgaggacgtgctgacaactccagacgtcatcgttggtacgttcctcgttcattccatccccgctactattttgttcgactctggagcttcccactcgtttatatctgtgccattcgtggggagaaatcagttgggggtagaaaggcttagaaaccctctgctcatcaccacccctggaggggttatgacagcaaagtactatagccctgccgtccctatagaaattcaggggattccttttccctcggacctgattcttctagacacaaagaacttggatgtgatccttgggatgaattggctggcacaattccaaggagtagtggattgcgcgaggcgcactgtcactctgtaccgaggaccagaacaaccggttgttttctttgcacctccaacctctgtcagaagttcagaactgcatcagataggtctgtcagaaatccccatcgtcagagagttcggagacgtgtttccggaagaactacctggtatgccgcccaagcgagagattgagttccggatagatcttgctccaggaaccactcctctgtacaagcgaccctaccgtatggcagcaaatgaactggccgaagtaaagaaacaattggaagagttgaaagaaaaggggtacatacgtccgagtacttccccatggggtgctcctgtgatttttgtagagaagaaagacaagacgaagaggatgtgcgttgactacagagctcttaatgaagtcaccatcaaaaacaagtaccctcttccccggatcgatgatctgttcgaccagcttaaaggtgccactgtattctccaaggttgatcttcgttccggatatcaccaattacgtattcgtgaagaagatatcccgaagaccgcattcactacgcgatatggactgtatgaattcacggtgatgtcgttcggcttaaccaatgctcctgccttcttcatgaacttgatgaacaaagtgttcatggaatacttggacaagtttgttgtggttttcattgatgacattctgatatactcacaatcagaggaagaccatcagcaccatctccgtctggtgttgggaaagttgcgggaacatcaattgtatgccaagcttagcaagtgtgagttctggttgtccgaagtcaaattcttggggcacgtgatatctgctaaaggagttgctgtggaccccgaaacagtgaccgccgtcaccgattggaagcaacccaagacagttactcaagtccgcagtttcttaggtttggcaggatactaccggagattcatcgagaacttctccaaaatcgctcgacccatgacacagttgttgaagaaagaagagaagtttgtgtggagcccgcaatgcgagaaggcgttccaaactctcaaagaaaagctggtttcctcgccagtgttaatcttgccggatactcgcaaggatttcatggtgtattgtgatgcttcgcgccaaggattggggtgcgtgctcatgcaggacggtcatgtggtagcctatgcctcacgccagctacgtcctcatgaaggcaactaccctacgcatgacttggagttagcagcggtggttcatgctctaaaaatctggcggcactatctcattgggaaccgctgtgaaatatataccgaccataagagtttgaaatacatcttcacccagtcggatctgaatcttcggcaaagtagatggttagaacttatcaaagactatgatgtgggaattcactatcatcctggtaaggccaacgtggttgccgacgctctaagtcgaaagagccactgcaacactctcaacgtccgaggcattccacccgagcttaaccaacagatggaagccctgaacctaaacatagttggtcgtggattcttggccgcgttggaagccaagcccaccttgctcgatcaaatccgcgaggctcagaagaatgatccggacatgcatggactcctcaagaatatgaaacagggtaaagccgctggtttcacagaggatgaacacggaaccttatggaacggaaagcgggtgtgcgttcccgataacagagaacttaaacagctgatacttcaggaagctcacgaaagtccttattccattcacccgggcagtaccaagatgtacttagacttgaaggagaaatactggtgggtcagcatgaagcgggaaattgcagagtttgtggctctatgtgatgtgtgccagcgtgtcaaggcagaacaccaacgaccggccggacttctccaacctctccaagtaccggaatggaaatgggatgaaattgggatggatttcatcaccggccttccaaaaacccaaggtggatatgattctatatgggtaatagtggatcgattaaccaaggtagctcgattcattcctgtgaagaccacctatggagggaacaaactagcggagctctacatcgctaggatcgtgagtctccatggtattcccaagaaaatcgtatctgataggggaagccaattcacctctcacttttggaagaagctccaagaagagctgggtactcgattgaatttcagcaccgcctatcacccgcagacagatggacagaccgagcgtctaaatcagatcctagaagatatgcttcgcgcatgtgtcctagatttcgggaagacctgggataagagtctcccctatgccgagttctcctacaataacagctatcaagccagcatacaaatggcaccatatgaagcgttgtacgggcgcaaatgccggacaccgctattgtgggaccaagttggggaaagccaagtgttcgggactgatatcctgagagaagctgaagctaaagtcagaatcattcgggataacttaaaggtggcacagtcccggcagaaaagttatgccgataaccgacgccgtgatctggaattcgcagtggatgattttgtgtaccttcgggtcacgccattgcgaggtgtacacaggtttcagaaaaaagggaagctcgcacctcggtatgtgggtcccttccgtatcatcgctcgacgcggagaagtcgcctaccagctggagttgcccgcctcctggggtaacgtgcatgatgtgttccatgtgtcgcaactcaagaaatgtctccgagtgccatccgagcaggccaactcagagcaaattgaagttcgcgaagatttgacgtatgtggagaagccagtgaaaatcctggacaccatggagcgcaggaccaggaaccgggtaatccgtttttgcaaggtccagtggagcaaccacgccgaagaagaagctacttgggagcgcgaagacgaactgaaggcagcccatcccgatctcttcgccagttcttccgaatctcggggtcgagattccgtttaa

SEQ ID NO: 14700 - DNA, 4565 bp, Oryza sativa
  Clone ID: TFbOSC900010j.C1.o10.np
atgaacgaagtcggggctcgatggacatctctaggacaaatgaatgctacacgagccgcggcccggtagtcgagatgtcatggcacagggctggtgtcctgctgctaggggctcaaccttggttacctgtctcgggaatcctggccgtagccagggttgggtcgatgtacacctctgatcagagtaaatctattcgaatagctgtgccctcggttatgggcaagcctagcaatgtacccaaatggccgacaacctcaaccgtcgtggtctggatctgactggattcgctttggaactgtggggcatgtgcgttgtcctgggatattcgcatggagtggactaccaaggcaagaagcttccggagcaggatgatgacgatgcagagcccggtgccgcttgggaggtcactacggtgatcctcaccggctctcccgagaggacttcgctggcagtcactgcgggtggagactccttccctgccgcttgccagaacgccgcgctcctcgccaccggcactcttcaccagcgctatccagacggacgagttgcagcactcgccctaccgctaccaccctcgtcgtggaggagcccgtgactacgccgccttcagggatgctagctcggaggatgacgctaccatcatgcatctggcgctcatggtggaggcgtacgacacagcccatatcgacttccatcatatggtgcgccgtgggttggtcgagaagaacatgaaggtcctggagctgcgtcaggagaatttgtagctgaagaaggacttggacgccgtggaagcgcagctatgttagctcaagattgctcaaggacaggtctgccaccccaagcgccgccgtgtctgccgcagtcagaagatcaccgcccgcaagagtacctccaggcctgagcttgttcgttagtccttggcgtggacctgcttcgtggagactccttgcgccgagcccgcgcccttggttcctcaggaggagggagcctctggcgttggcagcacagaggatgtgctgttgctcaccttctgccccggcccgtcgtagaagtagacgagcagctagtaggcccgcgcatggtgacaaccaggaaaagcgctgctaccggtgagggcagtcaccccgaaggcagcaaccacaacaaccatggcagcccacctccatctccacctccccctccgccaccaccaccgccaccttacacaaaccccatcctcacccaaatcctcgcccagcaggccaacatgatggctgctttcctccaccacatccagaatccgccgcaacccaatgcgccaccaccaccaccacccccacagcactccaagcttgccgagttccaccgcatccgcccgcctaccttctctagctccaacaaccccgtggatgccttggactggttgcacgccgttgggaaaaagttggacaccgtccagtgcaatgttgaggagaaagtcatcttcgcaacccatcagctgcaggggcccgcatcgctatggtgggaccacttccaggctacgtagccagaaggacagccaatcacctgggcccgcttcaccgccgctttccggaggacccacgtgccagctggagtcatggcccttaagaagagggaatttcaggagttgaagcaaggcaaccgctctgttatggagtatttgcatgagttcaataacctggcccggtacgccccggaggatgttcatgaagatgaagaaaagcagaagaagtttctggcaggaatggaccttgaactttctgtgcgtctggtctccggggattaccctgatttccagcgcctggtggacaagagcatccgcctggaggccaagcacaaggaactggagtcacacaaacgtcgcttggcgaatttccgtaatcaatagggggctaaccaaaggatccgctacaccaatccctatccagggggatcctcctcacagcagcagcagcagcagcagcctcgccccgcgccatgacctcaatttgtggtacgcgtcccacagccacagcagcagcagaatcagcaagggaaccgtgcaccccgttcccctgcaccggccgtgcagcctagtcaaggacgcagggatgttcaaggtcagccgcgtctgtgcttcaactgtttcgagcctgggcacttcacggataaatgcccgaagccgaggcgtcagcaaggccaagcgcctccccaccccaacaatggtggaaaggatgcaactcggggtcgtgtgaaccacgttactacagaggatgtgctgacaactccagatgtcatcatcggtacgttcttcattcattccatccccgctaccattttgtttgactctggagcttcccactcatttatatctgtgcaattcaaggggagaaatcagctgggggtagcaaagcttaggagctctctgctcttcaccacccctagaggggctatgcagcaaagtattatagtccggccgtacctatagagaactagggaattcctttcccctcgaatctgatccttcttgacaccaaggacttggatgtgatcctcgggatgaattggttgacctaattctaaggagtagtggattgtgcaaggcgtactgtcactatgtaccggaagcctgatctacgggttgtcttctttgcgcacccaactcccaccggctcaatacttcgtcagctaggactgtcagaaatactcgtcgccaacgagttcggtgatgtgtttccagaagagctacccggtatgccgccaagcgggagattgagttcaggatagatcttgctctaggaaccactcccatgtacaagcgaccctaccgtatggcagcaaatgaattggcagaagtcaagaagcagttggaagagttgaaagagaaggggtatatacggccgagcacttccccctggggtgctcccgtgatttttgtagaaaagaaagacatgacaaataggatgtgcgttgactaccgagctcttaatgaagtcactatcaaaaacaagtaccctcttccccggatcgatgatctgttcgatcagcttaaaggtgccactgtcttttccaagattgatcttcgtttcggatatcaccagttgcgtatccgtgaagaagatatccctaagaccgcattcaccacgcggtacgggctgtatgaattcacggtgatgtcattcggtctgaccaacgctcctgccttcttcatgaatttaatgaacaaggtgttcatggaatacttggataagttcgttgtggtctttattgatgacatactggtgtactcacagtcagaggaagaacatcagcagcatctccgtctggtgttaggaaagctccgggaacatcagttgtatggcaagctcagtaagtgtgaattctggttgtccgaagtcaagttcttagggcatgtgatatctgctaaaggagttgctgtggatcttgaaatagtaacagccgtcatcggttgacagcaacccaagacggtcacccaggtccgtagtttcttgggtttggcagggtactatcggaggttcatcgagaatttgtccaaaattgccaggcccatgacgcagttgctgaagaaggaacaaaaatttgtgtggagtccgtagtgtgagagagcatttcaaactctcaaggaaaagttggtttcctcgccagtgttaatcttactggatactcgcaaggatttcctggtgtactgtgacgcttcgcgccaaggattggggtgtgtgttaatgcaagaaggtcatgtggtagcttatgcttcacgccagcgatgaccctatgaaggtaactatcctatccatgacttggagttggccgctgtggttcatgctctgaagatctggcggcattatctcattggaaatcgctacgaaatatacaccaatcataagagtttggaatatatcttcacccagtcggatctgaatcttcggaagagaagatggttagagctcatcaaagattatgatgtgggaatccactatcaccctgataaggccaacgtggtggccgacgcgctgagtcgaaaaggccattgcagtactctttgcgtccgtggcattccaccggaacttaatcaacagttggaagcaacctaagtgtcgttagccatggattcttggctgcactagaagcaaagcccaccttgcttgaccaaatacgcgaggctcagaagaatgatccggatatgcatgggatcctcaagaatatgaagcagggtaaagccgcaggcttcacggaagatgaacacggaaccttatggaacagaaatcgtgtatgcgttccgggcgacaaggaacttaaatagttgatactttaggaagctcatgaaagtccttattccatccacccaagcagtacgaagatgtacttagacttgaaagagaaatattggtgggttagtatgaagcgggaaatcgcagagttcgtggccctttgtgatgtgtgtcagcgtgttaaagcggagcagcaacgaccggccggacacctccaacctctaaaggtaccagaatggaaatgggatgaagtctcacttgatatactatttggaactcctttttaaacattatgtt

SEQ ID NO: 14701 - DNA, 6564 bp, Oryza sativa
  Clone ID: TFbOSC900197j.C1.o21.gm
atgggcaacaatagatccaaactgacagactttctgagttctcgtccgccagagttctctcagaccgtcgagcccgtcgaggctgacgattggctgaaagatgttgatagaaaactcaacttagtgcagtgtactcctgttgagaagacgctctacgcctctcaccagctaagaggacctgctgcagattggtgggagaattactgcaatgcacaccctgaacccactaacattgcttgggatgagtttgctacggctttccgtgcagctcatgtgcctgaaagcaccattgatatgaagaaagaagaattcaacagacttaagcaaggcaacaacagtgtcaatgagtacctaagtctgttcaacaagttggctcggtacgcccctgaggaagtggacacagacaagaagaagatcaggaaggaaattcttcccgaggcgcacctcgccctcgctatggagaagaaaggcaccgatttctccatagacgatcaaggcacagtttggtgcggtccacgcatctgtgtaccggccaagaaggagttaagagatctcatcctaaaggaagctcatgagtccgcctactccattcatccaggaagtacgaagatgtaccaggatatcaaggcatacttctggtgggctagaatgaagcgagatgtcgcagaatatgtagccctgtgtgacatttgccaaagagtcaaggcagagcatcagaggccagctggtctgctgcaacctctaccgattcccgagtggaaatgggaagagatcggaatagatttcatcactggtttgccaagaacccctagcggccgccgccgcgtccgtgccctagcgccgccgccgccgcggattgcgccgcatcccgccgtccccgcgcgcattaaagagaggggaatcactccccgtgattccctctcccgtttcccccgttttcccctctctctctccctcggattcgtccggattcgtcccgcgaagttcgccggcgtcttcaatggcgcccgagatctccgcgcgcggtttcctctctccccggccgctctttccttcccccggcgctataaaatcgttgcccgagctccgctcttccgtttccgccgctcgccgctcgctctcgccgtcgatttcgtgcccgcgccgtgctccgccctctccgccatcgccgccgagctccgttccgccgccgccgccgctccggacttcctccttactcggcgacacccccgtccgcttcgccgtgttgccgccgaccccgtccgccgctccgcttcgcccgtcgaccgccggagcaccgtcgtcatcgtcatcccgaaccgcgccgccgtcttcctccgctccgtccgccgtttccaccgccttcgccgtcttggggtgagccgtggaccgctccgttcgtttccccctttcctcctctctctcgggtgccactccgccgcgccgttggtcgccggcggcgaccatcggggcgcgggtgcgcgccgctcccgtcggccgcgccggcgaggccgccctcgggcgcgccctcgcggctgccaagtgggcccggccgtcagccgcccgcgcccgcgggtgcggctgacgcgcgggacccacggcgccgaccgccgccagccgcgtgcgcccggtccaccgtggaccgagcggctgacgcatgggccccacttcccgtggacccgggcaaatgaaggctacacgagctgcggcccgatggccggcagcgttacccgtcgtggtttgggcatgactggcttcgtcttggagctgcgaggcatgtgcgtggtcttggggtatccacatggagtggattaccaggccaggccgctcccggagcaggagggtgaggatgcagagcctcacgctggttgggaggtcactgcagtgatcctctccggctctcccgagcggacttcgctggcagtcaccgcgggtggagactccttccccgccgcttgccagaacgccgctctcctcgccatcggcacccttcaccagcgctacccggacgagttgcagcactcgccctaccgctaccaccctcgtcgcggaggagcccgcgactacgccaccttccgagacgccagctcggaggatgacgccaccgtcgtgcatctggcacgcatggtggaggcgtacgacgcggctcgtatcgacttccaccagatggtgcgtcgtggcatggtggagaacaacatgaagatcctggagctgcgccaggagaacctgcagctcaagaaggacctcgacgcgttggaggcgcagctgcatcagctcaagatcgcccagggagaggacagccgtcccaagcgtcgccgcgtctgccgcagccagaagatcaccgcccgcaagagcacctccaggcccgagcttgttcgtcagtccctggcgtggacctgcttcgtcgagacccctcgtgccgagcctgcgcccgtggttccccaggagggggaagcctccggcgttggtagctcggagggtgcgctgttgctcaccttccgtcctggcccgtcgcagcgctctccttctctgtttgctggttctgtgtggggttttcagatggtgacgaccaggagaaatgttaacaccggtgaaggcaaccaacccgagggcagcaaccccaacccccaaggcaatccacctccaccaccaccaccagacaccaacgccattctcacccaaatcctcgcccagcaagccaacatgatgaatgctttcctccaccacctccaaaatccaccacaacagaatgctccaccaccacctccccaacactccaaactcgccgagttcctccgcatccgcccacctaccttctctagctccaacaatcccgtagatgcgttggattggttgcatgccgtggggaagaagctagacactgtgcagtgcagtgatgaagagaaagtcatcttcgccgcccaccagctgcaggggcccgcatctctatggtgggaccatttccaggccacgcagcccgaggggcagccgattacttgggctcgcttcaccgccgctttccggagaacccatgtgcccgccggagtcgtggctctcaagaaaagggaattccgggagttgaagcaaggcaaccgctccgtgatggagtatttgcatgagttcaacaatctagcccgttacgctccggaggatgtgcgggaagatgaggagaagcaagagaagttcttggcaggaatggaccctgagctgtccgttcgtctagtctctggggactatcctgattttcaacgactggtggacaagagcatccgcttggaagccaagcacaaggagctggagtcgcacaagcgccgcttggcgaacttccgcaatcagcagggtgctaaccagagggtccgctacactaatccctacccagggggatcctcctcgcagcagcaacaacagcagcagccacctcgcccagcgccccgacctcaattcgtggtgcgcgtcccacagccgcagcagcagcagaatcagcaagggactcgtgcgccccgtcctcctacgccagctgtgcagcccgttcaaggccgcagggacgcttcaggtccgcagcggctgtgcttcaactgcttcgagcccgggcactttacggataaatgcccgaagccaaggcgtcagcaaggccaagcgcctccccgctccaacaacggcgggaaggatgtcattcggggtcgtgtgaatcacgtgacggccgaggacgtgctgacaactccagacgtcatcgttgaaatccccatcgtcagagagttcggagacgtgtttccggaagaactacctggtatgccgcccaagcgagagattgagttccggatagatcttgctccaggaaccactcctctgtacaagcgaccctaccgtatggcagcaaatgaactggccgaagtaaagaaacaattggaagagttgaaagaaaaggggtacatacgtccgagtacttccccatggggtgctcctgtgatttttgtagagaagaaagacaagacgaagaggatgtgcgttgactacagagctcttaatgaagtcaccatcaaaaacaagtaccctcttccccggatcgatgatctgttcgaccagcttaaaggtgccactgtattctccaaggttgatcttcgttccggatatcaccaattacgtattcgtgaagaagatatcccgaagaccgcattcactacgcgatatggactgtatgaattcacggtgatgtcgttcggcttaaccaatgctcctgccttcttcatgaacttgatgaacaaagtgttcatggaatacttggacaagtttgttgtggttttcattgatgacattctgatatactcacaatcagaggaagaccatcagcaccatctccgtctggtgttgggaaagttgcgggaacatcaattgtatgccaagcttagcaagtgtgagttctggttgtccgaagtcaaattcttggggcacgtgatatctgctaaaggagttgctgtggaccccgaaacagtgaccgccgtcaccgattggaagcaacccaagacagttactcaagtccgcagtttcttaggtttggcaggatactaccggagattcatcgagaacttctccaaaatcgctcgacccatgacacagttgttgaagaaagaagagaagtttgtgtggagcccgcaatgcgagaaggcgttccaaactctcaaagaaaagctggacggtcatgtggtagcctatgcctcacgccagctacgtcctcatgaaggcaactaccctacgcatgacttggagttagcagcggtggttcatgctctaaaaatctggcggcactatctcattgggaaccgctgtgaaatatataccgaccataagagtttgaaatacatcttcacccagtcggatctgaatcttcggcaaagtagatggttagaacttatcaaagactatgatgtgggaattcactatcatcctggtaaggccaacgtggttgccgacgctctaagtcgaaagagccactgcaacactctcaacgtccgaggcattccacccgagcttaaccaacagatggaagccctgaacctaaacatagttggtcgtggattcttggccgcgttggaagccaagcccaccttgctcgatcaaatccgcgaggctcagaagaatgatccggacatgcatggactcctcaagaatatgaaacagggtaaagccgctggtttcacagaggatgaacacggaaccttatggaacggaaagcgggtgtgcgttcccgataacagagaacttaaacagctgatacttcaggaagctcacgaaagtccttattccattcacccgggcagtaccaagatgtacttagacttgaaggagaaatactggtgggtcagcatgaagcgggaaattgcagagtttgtggctctatgtgatgtgtgccagcgtgtcaaggcagaacaccaacgaccggccggacttctccaacctctccaagtaccggaatggaaatgggatgaaattgggatggatttcatcaccggccttccaaaaacccaaggtggatatgattctatatgggtaatagtggatcgattaaccaaggtagctcgattcattcctgtgaagaccacctatggagggaacaaactagcggagctctacatcgctaggatcgtgagtctccatggtattcccaagaaaatcgtatctgataggggaagccaattcacctctcacttttggaagaagctccaagaagagctgggtactcgattgaatttcagcaccgcctatcacccgcagacagatggacagaccgagcgtctaaatcagatcctagaagatatgcttcgcgcatgtgtcctagatttcgggaagacctgggataagagtctcccctatgccgagttctcctacaataacagctatcaagccagcatacaaatggcaccatatgaagcgttgtacgggcgcaaatgccggacaccgctattgtgggaccaagttggggaaagccaagtgttcgggactgatatcctgagagaagctgaagctaaagtcagaatcattcgggataacttaaaggtggcacagtcccggcagaaaagttatgccgataaccgacgccgtgatctggaattcgcagtggatgattttgtgtaccttcgggtcacgccattgcgaggtgtacacaggtttcagaaaaaagggaagctcgcacctcggtatgtgggtcccttccgtatcatcgctcgacgcggagaagtcgcctaccagctggagttgcccgcctcctggggtaacgtgcatgatgtgttccatgtgtcgcaactcaagaaatgtctccgagtgccatccgagcaggccaactcagagcaaattgaagttcgcgaagatttgacgtatgtggagaagccagtgaaaatcctggacaccatggagcgcaggaccaggaaccgggtaatccgtttttgcaaggtccagtggagcaaccacgccgaagaagaagctacttgggagcgcgaagacgaactgaaggcagcccatcccgatctcttcgccagttcttccgaatctcggggtcgagattccgtttaa

SEQ ID NO: 14702 - DNA, 2456 bp, Oryza sativa
  Clone ID: TFbOSC29718j.C1.o2.gm
atggcaccagcacagccagctccatcagcccaagccaagaaggagactggagcaaaaccagggtcctcctacaactgtggcgagctcggccactttgctgacaagtgcccgaagccaaggcgtgccgggccaaggtttgcccaagctcgtgtcaaccacgcgtccgcagaagaggcgcaagcaacaccagaggtcgtactggacctggatatcattcttgggatggattggctgaccaagttcaagggtgtcattgattgtgcgaatcgcacagtcacctttaccaaggagaaaggggaaacagtggtgtacaagtcaccagtctcaccgaatcagggaatccccttgaatcagattgaggtggaaaatccggtgaaagggtacattcgaccgagtacttcaccttggggtgctccggccatttttgtggagaagaaggacaacacgaagagaatgtgtgtcgattatcgcgcactcaatgaggtcacaatcaagaacaaatatcctttgccatggattgatgatctgtttgatcagttgaaaggagccaaggagcatcagctttatgccaagttcagcaaatgcgacttttgggtatcagaggtcaaattcttgggtcacgtcattacagctcagggtgtggcagttgatccatcgaatgtggagaagagctactacaatgctttgtgcaccggcggcatgtgtaaagaattgcagcaggagcttgaacatctcaacttggggattgtagaacacgggtacgtggctgccctagaggcacggcctacgctcgtggatcaagtccgagcagctctggtaaatgatcctgaaatagcaaagctgaaaaacaatatgagggtcggaaaagcccgagatttacttgaagatgagcacggcacaatctggttgggagaaagattcgccgtcgccgcgttcgtcttctctgtccaccaccggcagccgctccagccgcctgtagcagccgcctcggccatcgacgacctgcgccgccgcctctctcggctccgcaaggtcaagctccaccccgtccaccccttcccccaagccaaaatccaccggagctttatcgtcgccgtcaacccgaacgccaagccgaaggccgtccaccccttcttctccgccggtgttcgccgtaaagccaccgtcacagtcgtcccgatctcgccgccgctcgaagctcgtcgccggctgccgttcatcgtcgctcgtcgtcgtcatggttcattgcggggcaccagactgagaagcggtgagaagcccgtggtggtcgctggggagtccatgcctctggttattgagggggtgattatgatccaggaacggaaaagctactgcaacgcttcttgcactggcggcatgtgtaaagaaatgcagcaggagcttgaacatctcaacttggggattatagaacacgagtacgtggctgccccagaggcacggtctacgctcgtggatcaagtccgagcagctcaggtaaatgatcctgaaatagcagagctgaaaaagaatatgagggttggaaaagcccgagatttccttgaagatgagtacggcacaatctggttaggagaaagattatgcgtacctgatgacaaagagctgagagaactgatactcaccgaggctcatcagactcagtactccattcatccaggcaataccaagataacaccagagacccgcaggattactacaacctctttagatcccggaatggaaatgggaagagattggaatggatttcataacagcacagcttaccatccgcagacagatggccagaccgagagggtcaatcaaatattggaggatatgttgcgagcctatgcgctcgattttggtggagcttgggataaaagtctgccttatgctgaattctcttacaacaacagctatcagaccaatctacaaatggcaccgttcgaagtattgtatggccggaagtgccgcacacctctcttctgggatcaaataggcgaacgtcaactgttcggaacagaagtgctaacagaagcagaggagaaagtcagaaccatcagagagaggttgagaattgcacaatctcgacagaagagctacgcagacaaccaccgaagggagctcacttttgaagcaggggattatgtgtaccttcgtgtcactccgctccggggagtgcactgtttccagacgaaaggcaagttggcaccatgtttcgtgggaccatacaagatcttggaacgaagaggagaagttgcatataagctagaacttccatccaacatggccggcatccatgatgtgttccatgtgtctcagttaaataagtgcttgagggtaccggaagaacaagctgattcagagcacatcgatcttcaagaagatctgacttatgtggagaagccaattcgcatccttgagaccagtgaaaggaggactagaaacaaggtcaccag

SEQ ID NO: 14703 - DNA, 2259 bp, Oryza sativa
  Clone ID: TFbOSC101628j.C1.o6.fg
atggagattatgcaacagctcgccgccgccgccaccgccaccgccaccgccacggcaacgcccctgtgccttcctgaaccccctccgacggcgatgacgacggcgcaggtggaggccgccatcgcgacgctgcacggcaagaagcagggcctccgcgaggcctacgacagcctcgtcctccactcgcccatccccctccccttccgctggtccgacctcgactcccacctctcctccctccagtcctccatccacgcccgcttcagccagctgcaggccctccaggcttcccgccccgcgccccccgccgccgccgccgcgagccacgacgaggacgtcgagatggaggacgtccaggaacagggagaggacgaggtgatggcgcctccgtctacggtgcaggtcaaggaggagcctgtggaggcggcggcatgcgcgtcgaataccgccggcgagcgtgccggtgtcgggcaagatgggttcgttcgacccggcgggatggcggcggcgaagatggcgtctccgtcaaaggtgcaggtcaaggaggaacccgtggaggtgagtccatctcctccggccggcgccacgggtcttacggcggcggcatgcgcgagcatggacgccccgagactaaccgacgtctgcaagcgcgccggcggtggcggcggccaaggtttgtgcgcgcgaaacggtagtggtacagcgcagtcacccccgatccctagttgccctgtgctccagcagcagcacacggccggcgccccgaacggcagccaccctgtgctacggcaacacgccgctaacgccatgaacgccggccactcggccgcgttccggccgcagcagcacatgggtaaaccccgggacacgtgtgacttgcggaaggccgccgcaccgaacaccggagatcgcctgccgctgcaatggcggcagcagcgcgtgcacgctaatctcacgtgccccttgccgccaccggtggtcgcgggctcctcctcctcgccgccacagcagcgcgtgggcgtgttcccctcgccaacgccgcagatcgtgggctcctcgccgccgccgccatcacaggcgcgcgtgggagaggctaatgtaacgaacccatcgcggcagcagttcacagctagcgcgccacacgcgggcgatggccagctccagaagcggccgccgtggcagcggctgcagcgcgtgggcgtggctaatcccatgaacgccggtgacctgccgccccagaagccgcacttcacggccaacgcaagaaacgccggagaacacccgttccaggagcagcagcagccgccgcccgtggccaaacccacggacgccgccgccggtgacctgcttcctcagcagaagcagttgatggccaacgcaccaaacgccggagaacacttgctcccggagcaacagaagcagcagcccgtgacagctgcaaaacccgcgaacgcgccgcctctgcagcacgcggcgaacgccaccaacccagccgttctccggcggcagcggcagcggcagtgggttcgacttcgaccaccgaccgccactaacctgccgcaaacgaagcaggagcagcatcatctgttcatggctgacgacggcgccaacgcccgcaatcccctgtcgccgccgccgccgtgcggcatggccaaaccccccaactccggtgacccgctgacggatcagaacaatcagcagctcatggcgaacacccactctgcccctacaccggtttccacaccattggttgcatcgaaccagagtgaatcatcagccatgacgacgacgacgacgacgaacagcaaccaaaactccggcggcggtcgcaccggcccgcaacccgtagcggccggcgctgctccaaatccggccggcaaccagcagcaagggcagcggaaaggtggtgcaaacaggcgaggcggacgaggccaaggcaacaagaacaacaacgttgctaataccaatattagcaacatgagcaaggtgattggcaagggcaacaaggggcagggcaatggaaacccccagctcaacaagaatgggaacccccagttcaacaagaacgtgccgggtgatcatcaccagaagaacaagaatgcagggcagctttgctacaggtgcgggtgcagggggcactggtcgcgcatctgccgcactcctgagcatctggtgaagctttatcagcaggacagaaaggccaaactgcaagcaggagcgaatacgaatacggtttatgtgggagccatgacggattag

SEQ ID NO: 14704 - DNA, 1880 bp, Oryza sativa
  Clone ID: TFbOSC15757j.C1.o1.np
atggctaacaagactctccgagagttcgctgctccctctgctgacaatgtggccattaggctgcaggtcaatataggagacatggatttcgacttgaagtccagcctcatcacgatggcgcaggctaacccgttctgtggcaagcctaatgaggatgccaatgctcatctgcaacagttcttagagatctatagcacgtacaccatcaagggcgtcagtcccgacgtcgtcaggctgcgactgtttccgttctcccttctcgggagagcgaagtagtggttctatgccaaccgtgctgctgtcaatacctgggacaaatgctctacgacattcctctcgaaattcttcccgatggaagcatgggaacgactgtaggagtatgtggccgcctgtcctcatcattggatggatgactggctgatcctgcagaacttttataacggactcaccccgatgtcccgagatcacctggacgcggcagctggaggagcattcttctctaaaacggttcaaggagccgttgatctaatagagaagatggtctccaatatgggttggagcgaggaacgactccagacccgttagcgaggcatgcacaccgtcaaggagacggagttacttgctgccaagctggatctcctcatgaagcgattggacgaccatgagaaatggccacaaggcaccgtcaaggccttggactcccacgtcacatgtgaggtctgcggcaacacgggtcattctgggaatgactgcccggaaacccatgaggaggcgatgtacatgggcaacaacaacaacgggtaccttccacaaggaggtctggggtggaaccaaccacgcccatattatcaaggaggtaacaacaacggtaacttttctaaccagccctccttgaaggatctcgtttttgcgcaagctaaaaccaccgatgcgctaagcaaaaagcttgcaaccaatgacaagttggcatccttagtccttacaaatgaaactaggaggattccggggcaacccgactcctccattgaaaatgttaaggcaatcacgacgaggggaggtaagtccactcgtgatccgccatatcctaaccctacaggaattaatgggatatcaaaagaagcgccatctaaagactcggctgacaaggatgttcagccagaaaagacagtgccgcaagagtactgcgacacgcggttgctgccatttcctcaacggattaggaaatcgtcagtagacaagcattttgctcgttttattgaagaaatccagaaaatccacatcaacgtgccgttgttggatgctatacaagtgccaacatacgcctgttatctcaagaacatactcaacaataagagacagctcccaacaatggaggtggtcaagctgatggaacaatgcagcaacgtaatactccacaagctcccggagaagaagaaagatccggggtgtcctacgatacctgctcgatcggggcacaacagtttgacccggccttgtgcgaccttggagccagtgtcagcgtcatgccaaaagacgtcttcgacaagctcaacttcacggtgttggcaccaacaccaatgcgccttcaactggctgattcgtcagtctattactcggcagggatagcggaggatgtgccagtcaagatacgtgatttcttcatcctggttgacttcgtgatgctggacatggatacggggaaagagacgccgctcatcctggggcgcaccttccttagcaccgcaggagccaacattgacgtgggaatggggattatctgtttccacatcaatgggaaggaagagaagtttgagtttcaaccgaggatggaacaatgctccatgatcaggataaagttgggagccaactggggatgcacc

SEQ ID NO: 14705 - DNA, 1190 bp, Oryza sativa
  Clone ID: TFbOSC16925j.C1.o1.np
atggatgaagtcgttgcgacgatggatatctctgagccaaataaaggctacgcgagctgcggctcggtaatcgagatgtctaggcaaatgaagactacacggctaggatgggtgaagggttatgtcacatgtttacgacgggttccatgcccatggaatgcggagtaaagatgtgtcttgtgggttggcctgggttggcttgagactagctgggacccaggtcgggttgccagttcagtctgaatcatcgtaggccttgggttaaggcagtactagatggttagttttgcgaagaaaaagatgtcgccaattgtttgccgaagctccggaagaccgcagggtccgctagcgaagcgaaggaagcagtgaagctagatgtgaagcaggacaaaagacttagatctgttaaggtcctatccttagtttttgatctgtctctcccctttgttttccctctctccctctccaaaccttgcaacagatggctgacaatgagaaaggcaataaggtcagaagtcaggacatgggtacctcaagctcccgagtgaatgaagcaccagacaccaattgtgtggcagtggtccaacacttgattaagcagaacaaattgcttatagagatactacagcagcatcggacgccaattctgaaccggagtcagatgcaaccttaagtgcagttggaggcagtccaagcactcacaccacaagtcagcgcaccgccaacatcccagaaggcccctcatgccatgtcacatgttgactcaaaagaagcaagaatcatttgttttatgtgtgatgaacaagggcactatgcaaggaactgtcctcagcagaaaagaaaagcaccaatgcgaaccgaagatgaagtccgtaagatgatcattaccagcacagaatggcctccaccaggaatgacaaaacgtcagagaagaaattccttccgaggtgcaccacagttgacagagcatcttttagctagtggaggtagagtgtatgatagtgaagattcagatcaagtctcctcagatgatgaagatgagaagtctccccaaggtttcaaccagaataaaatggaacataaggcatgctctcgttgtggagaaatcggtcatgttgctagctcgtgtgccactacctgctttcattgtgaggaagaccatccacccgcgagtgccccatgagaaagat

SEQ ID NO: 14706 - DNA, 1072 bp, Oryza sativa
  Clone ID: TFbOSC19175j.C1.o2.np
atagctgacaagactctccatgagttcgctgctccctctgctgagaatgtggccattggaccacagatcaacatgggagacatggatttcgacttgaagtccagcctcatcactatggcgtaggctagcccgttctgcggcaagcctaacgaggatgccaatgctcatctacagcagttcctggagaactgtaacacgtacgccataaagggcgtcagtccagacaccgtcaggctaaggctgttcccggtttccctcctcaggagagcgaagcagtggttctacgctaaccgtgctgctgtcaacacctgggacaagtgttctacggtattcctctcgaagttcttcccgatggaagcatgggaacgacttcaagagtatgtggccgcctgtcctcatcatgggattgacaactggctaatcatgcagaacttctacaatggactcccatgtcccgcgatcacctggacgtggcagctggaggagctatcttctctaaattggttcgaggagccgctgatttaatagagaagatggtctccaatatgggttggagcgaggaacgactccagacccgtcagcgaggcatgcacaccgtcaaggagacggaattacttgctgccaagctggaccttctcatgaagcgattggacgaccacgacaaacggcctcaaggcaccatcaaggccttggactcacacgttacgtgtgaggtctgcggcaacatgggtcattctgggaatgattgcccagaaacctatgaggaggcgatgtacatgggcaacaacaacaacggttaccatccacaaggcggtcaagggtggaactagccacgcccgtattatctaggaggtaataacaacggtaacttttctaaccaatcctccttgaaggatctagtttttgcgcaagctaaaactaccgatgctctaagtaaaaagctcactgccaatgacaagatctgtcacaccctaaaaatcccaaattattccgacgttcccggagagtccgattttgcaggagaagattttgaagagttctaaggccagcaaggcaagtcacacacacctca

SEQ ID NO: 14707 - DNA, 2211 bp, Oryza sativa
  Clone ID: TFbOSC404812j.C1.o4.gm
atggggatggtcaagttctcggctagcgcagctcatttgcaaatagccccttcgcgctacagtagagcactgggcaccacaaaaatccccaaatctctcggccgcctccgtcgtcaccttgcccgccgccgcctcatgtcatcctcgtcgccgcacatcgtcctcgtcgcgcaccacggctgtgtcgcctcgctcgtcaagttctccggcctcgccgtgtccctagacgtgcactccgccgcagcgatcgcgtccctcccggcgtcctccgtcgccgccgtcgcgctcccggaggtcaagctcgacgacaaccccaccggacgccgcccgatggcgagatcctccacctgctccacctctactacctggttcttgccaccgaaggacaggacaagcgacagcggcggcggcggcgtgggcagcaaggaggaggaggacgaggcgtgggacgagtggctggcgaagccgatccacgagcggatgccatggcagatgccgccggcgacggagctgcaggacgccgggctggaggccgtgaccaactgctacggcgagctgtacggcgacatgatggagtattgcggccggagctggaagcctggaaccggcaccgcgccatgctggtgcatgactgccatcccaccgttcaaccctactacctccctaagtggtgcgcgactggagggccatgtcctcggaacatccgttccgccagaagccgagcttgagcagaaggaaggagaaaaaggagagaagaccatcagagtcccaaacccggcgtatggcgaatggtttgccactgaccaacaggtcattggttttctgttcacctctctgaccagggagattctgtcgcaagtcgcagacgcaccgacggcagccgcggcatggaagacgatcgagaacgtgttctcgacacgatctcgcgcaggcgcgatcaacgtcagattggctctcaccaccactcagaagggccaatcgactgtcactgagtacgtcagcaagatgcgtgctctcggtgacgaaattgctgcaacagggaagccaatagatgatgaagaacttgttgcttacattattaatggtcttgattcagagtttgatccagtggtggaagccctcgtcgccaagaatgcatctgtcacagttgcagaggtctactcacagcttcttggctttgaaaacagggtgaagatccgaacggcgtgcgctgctatgagtggaaaccgtggcggtggaaatcagggacgtggtggcggcaacccccgtggccgcggcgctggacgcggcggcagtggccgaggtggcgggcgcggccgtggcaatggacgcggcggcgctgacaacagacccacctgccaagtctgtcacaagaaagggcatgtggcggcggactgctggcactgctacgacgagaactacgtccccgatgagaagctaggaggcgctgcgacgcatgcttacggtgttgacaccaattggtatgttgacaccggggcaaccgaccacatcaccgggcagctggacaagctgaccacacgggagaagtacaagggcaccgaccaaatccacacagctagtggtgaagatgacactgaggcagatgctagcgacagcaatgcagagattaacgcagaacaacctgatggaactcatcctggtgcatcaaccggggtacacacagcagaaacagaagtggcggaagaatcgtcgtctcgtactgatcagtggcgcgccgtgcaggcccccgagcaacctgcgaccgccaccgaaccagcagccgccacgtcgtcggctgtacagagctcccgcgcgagttctcgctccatcgcaagccaccaccagcccggaggtgacacgtcgccagggcctcgtcatgatgcggcaggatcgtctgcggctccggaggttattgctgaaatagagcaagtctctaaaggttggagtcttcgtcagttagatgttcaaaatgccttcttgcatggagttctagaagaagaggatttgaatcaggagtttgcactgaaggatttggaagatcttcacttcttcctaggaattgaggttaaaaaggacctaaccttgtatcttggagtgcacgaaaacaagctacagtctctagatcaagtattgaagctgaatacaaggcattggcaaatgcaacagcagaaattatgtggatacaaacattacttcaggaacttggtgtaa

SEQ ID NO: 14708 - DNA, 744 bp, Oryza sativa
  Clone ID: TFbOSC420074j.C1.o7.gm
atgaagcgcttggatgaccacgacaaacggcctcaaggcactgtcaaggccttggactcacacgttacatgtgaggtctgcggcaacatgggacattctgggaatgactgcccagaaacccgtgaggaggcgatgtacataagcaacaacaacaacgggtaccgtccacaaggaggccaggggtggaaccagccacgcccgtattatcaaggagaaaccaatggggtagccaaggaagcgccatccagtgactcggctgacaaagagattcagccagaaaaggtcgtgccgcaggagccgcggaagtcggttcggacaggagaaggagaagaaggacatggcaatggaggcgtggagaagaagagcacggcgccggctctgtccgctgattggccggtgatggcgaactgcgggcgacggcagcggctgcgcgtgcgagcgtgcgccaagcgcgtccatggcacacggcggtggcgcccacgggacagggaggaggatcggctgtgtggctgggccagcctgggtcttggtctgttaggtggtgcatcaaacattttcctcttcctattcgtcttcgtcttcctcttcatcttcttcttcgtaagggtctccaaaagagtcttcatcttcgtcttcgtgagagttctcatcttcatcttcctccacttcgtcctgatagatatcgtcttcgccaatgcgcagcccggtggcagacttccagaggtggagccatcgccgggctag

SEQ ID NO: 14709 - DNA, 1467 bp, Oryza sativa
  Clone ID: TFbOSC20612j.C1.o3.fg
atggacatctctaggacaaatgaaggctacacgagctgtggcccggtagtcgagatgtcatggcacagggctggtgtcctgctgctaggggctcaatcctgcctgcctgtcccagaggttccggccgtaggtggggttgggtcggtactcttgtttatggctaggatgggttgggaactatgtcacgtcttccgtccgtataccgtggtgatgtttaacagagaaaaaggaaagaatgtcagcgggtatgcctcaactaactcaagttttcaactcaatccaccactgtcctcaagagagttaacaagggcacacccttggtccattccaagcatgctgctgagttcacagctaccattggttggaagtcaagaccaaaatcagtatgtgtttgatcgagcatttgccacccaggtcaatgagcttccaatgccagaagagcatgtccccttttgtcatgattgtagagaacaaggacactatgccctgaattgtccatgggtatatgccaaacaagcctcttcctttggtttagcagggcagacatcgctaaaccagcctcctcgcaccaagtcaagcttgcagcctagtgtgcaaagtagagagcccaatggagagaatccattgaatcccgggaaatgctttcctcctagcctttcgtaccacgtggggtcacatactaagcaagccaaaggcaagaagagtaagaatcagaagagaaaagcaccgatgcgaactgaagaagaagtacgtaagatgactattaccaacaccgaatggcctccagtagggataactattcctagacgtcaaagaggaaatacctttcgaggtgcacgacagttgacccagcacctcctaagccatggtggcagagtatctgatagtgaagggtcagatcaagtctcctcggatgatgaagatgagtctccccgacatctcggcgaggaagagatggaatcaaaggcatgcacctgttgtggagaaattggacacgttgctagcatgtgtctcacactctgccctcattgtgaagaagaccatccaccaggggagtgtcccacccgcaagatgacatgttttctgtgcgaaggtacaaaccatgtgcccaaggattgccaactcagtgtgttgttgaccaagaccgtagaaatccaacgaacaaccctacgattgtctcatcagctagtcagctccaacagcaacatcgacgatatcatccatagcaccaatgttcctcctgctccacctaactctgcaataaatcatagcaataataccttcagcaccaaccattctctgcaccgacagcctcagcaaagaattgtcgtcgatggaagaagttgtgtctctccccgacctactccaggccgagcaaagggcaatcaacctccggagggcgataccaagcagaagaccgtcatccgcttcaaacagcaatcagaaggaagcttctcctgtgaatga

SEQ ID NO: 14710 - DNA, 2136 bp, Oryza sativa
  Clone ID: TFbOSC401388j.C1.o4.fg
atggccagcaagactcttcgcgagttcgctgctccctctgctaacaatgtggtcgtcgggccgcaagtcaacataggagatgtggatttcgacttgaagtccagcctcatcacgatggcgcaggctagcccgttctgtggcaagcctaatgaggatgccaacgctcatatgcaacaattcctggagatatgtagcacgtacaccatcaagggcgtcagtcctgatgccgtcagactgcgactgtttccgttctccctcctcaagagagcgaagcagtggttctatgccaaccgtgctgctatcaacacctgcgataaatgctctacgacattcctctcgaagttcttcccgatgggcaaaaccaacgcccttcgaggacgaatttctagtttccagcagacaagggacgagtccattccggaagcgtgggaacgactgcaggagtatgtggctgcctgtcctcatcatgggatggatgactggctgattctgcagaatttttacaatggactcaccccagtgtcccgcgatcaccaggacgcggcagctggaggagccttcttctctaaaacggttcaaggagccgttgaattaatagagaagatggtctccaatatgggttggagcaaggaacgattccaaacccatcagcgaggcatgcacatcgtcaaggagatggagttacttgttgccaagctggacctcctgatgaaacgcttggacgaccacgacaaaaggctacaaggcaccatcaaggccttggactcacacgtcacgtgtgaggtctgtggcggcacgggtcattctgggaatgattgcccgaaaacccgtgaggaggcgatgtacatgggcaacaacaacaacgggtatcgtccacaaggaggtcaggggtggaactcaacttcacttcatggcaacgccgatgtcaggcgtcatgccaaaagacgtttcgacaaactcaacttcacggcgttggcatcaacaccaatgtacctccaactggctgactcatcagtccgttacccgactaggatagcggaggatgtgccaatcaaaatacgggatttcctcatcccggttgatttcgtggaaccgttattggaggatgccggtaaaatcacccgtaccggccaagaaattagagcagccggctcagaagaagccgtcttccgcatcgaaatcaaagaaggtgtggaaggaaaagccaaagacacccgctccatcacctccggagacgggtggaaaatccatgaactgaaacgcaaggaggagttcacactcacatggaaaggcttgagtacacttcttggttttcacgattcctgcaaaatcgatctccagagaggaatttcggggttcgagaaaaataggttttgggaagacatttctggtgctccaatttgcaagaaacctagaacgaataatatccataatcctacacttaggctcgtgcacaaatggattgctatgactttgttttctagaagtgatctgagacccattaggggagatgaattaattatcatgtttgccatggttagaaaggtcaaaatttctcctgtgaaatgtatgataaggcaatggttagaaagtataatgttctctgctcctgttgagtgcacttctctgattactcggatagcaaaagagctaggggtcgttagcgaccaaattgcttttatctcagccgctcgtccgcatattgatgaggcttatctagtgcaagggcatattttgaaacaaggagcagatggatctttgatatactttttcccaagttgtacaaatgaaatcccattgccaaatgcggggtatcatttgtacaactgccatgaactaaccattcccctgcagaccatagaagaatctcgtgcaggtggaacatacagggagacgcgcaacatgacaaggaacgaacaagagagttcatcatcctcgacacctgtgcagatgtatgaggcaggatgggcaccaactggggatgctcctagatggacccaagctccacgccatagcattggagtctcaccctgggcaagcgccggcgaggaccggtggcacgccgcccccctccggctcccttccttccattctcccctaaaccctaggcacggcagcggagtttggtgccggtag

SEQ ID NO: 14711 - DNA, 3987 bp, Oryza sativa
  Clone ID: TFbOSC102349j.C1.o24.fg
atggcaaccaacccgaagggtagcaaccacaacaaccatggcagcccacctccgcctcctcccccgcctccaccaccaccaccagacaccaactccatcctcacccaaatcctcgcccagcaggccaacatgatggctgctttcctccaccacatccaaaatccgccacagcataatgctccacctccaccaccacccccgcaacactctaaactcgccgagttcctccgcatccgtccgcctaccttctctagctccaataaccccgtggatgctttggattggttgcataccgtggggaaaaagttatacaccgtgcagtgcaacgatgaggagaaagctacgcagccagaaggacaacctattacttgggcccgcttcaccgccgctttccggaggacccatgtacccaccggagtcatggcccttaagaaaagggaattccgagagttgaagcaaggcaaccgctctatgatggagtatttgcatgagtttaacaacctggcccggtatgccccggaggatgttcgtgaagatgaggagaagcaagagaagttcttggcagggatggaccctgagctgtccgtgcgtctggtctccggggattatccggatttccagcgtttggtggacaagagcatccgcttggaagccaagcacaaggaactggagtcgcacaagcgtcgcttggcaaatttccgcaaccaacagggggctaaccaaagggtccactacaccaatccctatccagggggatcctcctcacagcagcaacaacagcagcaacctcgctccgcgccccgacctcaattcgtggtgcgcgtcccacagccgcagcagcagcagagtcagcaagggacccgtgcgtcccgtcctcctacgccagccgtgcagcctggacaaggccgcagagacgttcaaggtcagcagcgtctgtgtttcgactgcttcgagcccgggcactttgcggataaatgcccaaagccgaggcgccagcaaggccaagcgcctccccgccccaacaacggtggtaaggatgtcattcggggtcgtgtgaaccacgtgactgccgaggatgtgctgacaactccagacgtcatcgttggtacgttcctcattcattccatccctgctaccattttgttcgactctggagcttcccactcgtttatatctgtgccattcgtggggagaaatcagttgggggtagaaaggcttaggaaccctctgctcatcaccacccctggaggggttatgacagcaaagtattatagccctgccgttcctatagaaatccatggaattccttttccctcggatctaattcttctagacaccaagaacttggatatgatccttgggatgaattggttggctcaattccaaggagtagtggattgcgcaagacgcactgtcactctgtaccgagggccggaacaaccggtagttttctttgcacccccaacctctgtcggcagttcagaacttcatcagataggactgtcggaaacccccatcgtcagtgagttcagagatgtgtttccggaagaactacccggtatgccgcccaagcgagagattgagttccggatagatcttgctccaggaaccactcctctgtacaagcgaccctaccgtatggcagcaaatgaactggccgaagtcaagaaacagttggaagagttgaaagaaaaggggtatatacggccgagcacttccccctggggtgctcccgtgatttttgtggaaaagaaggacaagacaaagaggatgtgtgttgactacagagctctcaatgaagttactatcaaaaacaagtaccctcttccccggatcgatgatctgttcgatcagcttaaaggtgccactgtcttttcaaaaatcgatcttcgctccggatatcaccaattgcgtattcgtgaaaaagatatcccgaagatcgtgttcaccacgcgatatgggctgtatgaattcacggtgatgtcgttcggtctgactaatgctcctgccttcttcatgaacttaatgaacaaagtgttcatggaatacttggataagtttgttgtggtcttcatcgacgacatcctggtgtactcgcaatcagaggaagaccatcagcagcatctccgtcgggtgttgggaaagttgcgggaacatcaattgtatgccaagcttagcaagtgtgagttctggttgtccgaagtcaaattcttagggcatgtgatatctgctaaaggagttgctgtggaccccgaaacagtgatcgccgtcactgattggaagcaacccaagacagtcactcaaattcgcagctttttgggtttggccgggtactaccgaagattcatcgagaatttctccaaaattgccagacccatgacgcagttgctgaagaaggaagaaaaatttgtgtggagcccgcaatgcgagaaagcattccaaactctcaaagaaaagctggtttcctcgccagtgttaatcttaccggatactcgcaaggacttcctggtgtactgtgacgcttcgcgccaaggattggggtgcgtgctcatgcaggatggtcatgtggtagcctatgcctcccggcagcttcggcctcatgaaggcaactaccctacccatgatttggagttagccgctgtggttcatgctctaaagatctggcggcactatctcattgggaatcgctgtgaaatatatactgatcataagagtttgaaatacatcttcactcagtcggatctgaatcttcggcagaggagatggttagaactcatcaaggattatgatgtgggaattcactatcatcctggtaaggccaacgtggtcgccgacgctctaagtcgaaaaagccgttgcaacactcttggcgtctgtgacattccaccggaacttaatcaacagatggaagccctgaatctaagcatagttagtcgtggattcttggctacgctggaagccaagcctaccttgctcgatcaaatcagcgaggctcagaagaatgatccagatatgcatgggatcctcaagaatatgaaacaaggtaaagccgctggtttcacagaagatgaacatggaaccctatggaacggaaatcgtgtatgcgttccggacgacaaggaacttagacagctgatacttcaggaagctcacgaaagtccttattccatccaccctggcagtacgaagatgtacttagacttgaaagagaaatactggtgggttagtatgaagcgggaaattgcaaagtttgtggccctttgtgatgtgtgccagcgtgtcaaggcagagcaccaacgaccggccggacttctccaacctctccaagtaccaaaatggaaatgggatgaaattgggatggatttcatcaccggacttccaaaaacccagggcgaatatgattctatatgggtagtcgtggatcgactaaccaaggtagcccggtttattcctgtgaagaccacctatggagggaacaaactagctgaactctacttcgctaggatcgataagagtctcccctatgccgagttctcctacaataacagctaccaagccagcatacaaatggcaccctacgaagcgttgtatggacgcaaatgccggacaccgctattgtgggaccaagttggggaaagccaagtgttcgggactgatatcctgagagaagttaaagcgaaaatcagaaccattcgggagaatctaaaggtggcccagtctcggcagaagagttatgcagacaaccgacgccgtgacctggaattcgcagtggatgactttgtgtaccttcgggtcacgccattgcggggcgtacacaggtttcagacgaaagggaagctcgcacctcggttcgtgggtcctttccgtatcattgctcgacgcggagaagtcgcttaccagttggagctgcccgcatcattgggcaacgtgcatgatgtgttccatgtgtcgcaactcaagaaatgccttcgagtgccgtccgagtag

SEQ ID NO: 14712 - DNA, 1647 bp, Oryza sativa
  Clone ID: TFbOSC401716j.C1.o8.gm
atgccgccgccgcgccttggctcggccgagccggtctcatgccgtgcccgtgccccagccgcgccgcctcgtgaccgtccgatcggctttgtgccgatccgagccgtcggttcccgtggaccggcggtggacagcctcggtggtcccggtccacggtggaccggcgcccatgtgccgctgactggtggggcccgcttgccggcgccgcccctcccccttgatgacgtcagcgaggggtatggtttgcgtcattggtggggatgcgaccatactagcagatggtctgcaagagggacaatttcgccggatcaagaccccgtcagtttcatggggcaactcagtgcaattctaataatattccacgtcagcctcttgaagatcagcctcaaccccaagtcatggctaatcaaactcagacagtggaagagttgttacaacagatgcgacgtcgataccaaatataccagatgcaacagatgcaacgacaatgtcaggagtcacgtcaatgtcacccaccacaggtcacctgaaaaggacgagaagcagtgcccaggaagtaaccaagctccaagtcagtctactaacaagaaagatggtactctgcagcacaactttggagcgaacaggaaggtgatatggaagatggataatggcaggaccatgatcatcaccagttcagaatttactcctgaagacgcagcaaggatacccaagcgaacagatcatgtgcctaaggactgtcagttgaacgcggtcatagctaagaccaagaaagaacaagggacaaccgtgcaacccattcgtcaaccaatgacaatcgacaacagcggtcacaatccttctgctcttcctccaactccagctccagtggaagccaaccatggaagaagcaacgtcaccaaggatgttcataagtctctgcttgttcccgtttcagctgccaaagtgcataatcagaagcctgcacctcgggaccaagcaagtcgattctgccgtaactgtcgtaagccaggacatcgtttcagtgattgtcctcttccaagagcagcaaaggcagttcgtcgtgattcacaagttaccagcattgcccatgacaccaatcgacacctgaatgtgcaacctccgcctcaacggattatcgtcaagggcaccgtcaaaggtcgcattgttccaccggcaaccgtttcaagcctacagcaccaacgccagcagggtaagcaatgccaggagaacaacagctcgctacagctacaaagaggtggtacgctccttcgtcagcacccgcggcaagtgttgtcagcaccaggtcgtccaactgttgtcagttctagcaatgcacctggtattgctccaatctggaggcccatcgacaaatcaccgctcggtaaccccacgggcaagaagatcctacccgttacagctgacaagacagttgcccctccaccatcgaagatcaacaagcagagcaacgttcccggcagcatcagtggtactcaaatgaaaagagtgatggaatatttgaaagtgacaatggttggatccatggtgctcgacactatgaaatctctccaaaggcagtaccaagggatgtggcagttcaatgtgcagatcagtcagaccgccgaccagcaccagctttctttctag

SEQ ID NO: 14713 - DNA, 2139 bp, Oryza sativa
  Clone ID: TFbOSC405120j.C1.o8.gm
atggggcaactcagtgcaattctaatagtattccacgtcagcctcttgaagatcagcctcaaccccaagtcatggctaatcaaactcagacagtggaagagttgttacaacagatatgacgtcggagttcccaatatcggcatcgaagacccctgtcaaaatgctgtccagatccccgaagataacgacagccaagtcaacgtgttcgccaggtcacctgaaaaagacgagaagcagtgcccagggagtaaccaagctccaagtcagtctaccgacaagaaggatggtactttgcagcccaactctggagtgaacaggacagtgatatggaagatggataatggccggaccatgatcatcaccggttcagaatttactcctgaagacgcagcaaggatacccaagcgagaacggttttctgctgatgacgatgacgacaacgatgatgataatgatgacaatgatgatgcgacccttgacagtttcagggaaagagagttgaagttcaaagcatatcatgtgcctaaggactgtcagttgaacgcggtcatagctaagaccaagaaagaacaagggacaaccgtgcaacccattcgtcaaccaatgacaatcgacaacagtggtcacaatccttctgctcttcctccaactccagctccagtggaagccaaccatggaagaagcaacgtcaccaaggatgttcataagtctctgcttgttcccgtttcagctgccaaagtgcataatcaggagcctgcaccccgggaccaagcaagtcgattctgtcgcaactgtcgtaagccaggacatcgtttcagtgattgtcctcttccaagagcagcaaaggcagttcgtcgtgattcacaagttaccagcactgcccatgacaccaatcgacacctgaatgtgcaacctccgccccaacggattatcgtcaagggcaccgtcaaaggtcgcattgttccaccggcaatcgtttcaagcctacagcaccaacgccagcagggtaagcaatgccaggagaacaacagctcgctacagctacaaagaggcggtacgctccttcgtcagcacccgcggcaagtgttgtcagcaccaggtcgcgcaactgttgtcagatctagcaatgcacctcgtattgctccaatctggaggcccatcgacaaatcaccgctcggtaaccccacgggcaagaagatcctacccgttacagctgacaagacagttgcccctccaccatcgaagatcaacaagcagagcaacgttcccgaagtagagggtgttctaacacaaagcggaacttctcccgattacaaggttggcaacagaataacagacatcagccaaaaaatggttgaagaactaaaggagtctgtgaaagaagagcaggctgagaaaaaggaggaggcagccaaggagaagccagatgaaccacaagagatcgtactgaaagtcgacatgcactgcgaaggatgtgcaaagaaggtcgagaaatccctcttgagatttgaaggtcagaaagcatttcataccgtctcaaactacgacttctgtcgtagggccgcagatccctcaaaggtctgcgagagggttcagaggaagacaaagagaagagttgagctgattttccctcttcctccacctccagaagaggagaagaaagaggaggctccagcaccacctccagaagaaaagaaagaggagccaccgaagacaataactgtcatcttgaaggtccagatgcactgcgacgcttgtgcgcagattctgcaaaagcgtataagcaggacagaaggtgtagaatcggtcgagactgatctcctcaacggcctagtggtcgtcaaaggggtgatggatccggctgtgctcatcgaaagcatccagcggaagacgcggaggccggcagtcatcgtcgaagaggtgaagccgcgggaggaggagaagaaggcagaggaggaagagaagaagccagatgaggataaggccgacggcatcgaagagatcaagaagtatgacttctggccgcccgtccagtactatgtcgagtacgtctacccatacccgctaccgccgccaccgacggcactggtgtccgaggagttcagtgacgagaacccgaacgcttgcaccgtcgcgtga

SEQ ID NO: 14714 - DNA, 3273 bp, Oryza sativa
  Clone ID: TFbOSC14471j.C1.o1.fg
atggcttctaagcttaaatcaatggaaatggaaatctctaaaggttttcttgtccatttcattatgtcatctctgccccaggagttttctccatttacgatcaattataatgcaatgaagatcaagtggggcattgatgaattaatagctatgtatgtacaagaagaggaaaggcttaaggcagaaagagttgaccatgcaaatctatttaaacactccaagaagaaaaagtataagaaatttaagaaggagtatttgaagcctaagcctagtcaatttaaagaaaaagggcaatcttcgaatcaatcccagcagaataaatctggaggaaatccctatacagaagaaaagggaaaagaaaaggatgggtgctacttttgtggaaagagtggacaccgccaaaaggactgtattgggtttatgagatggctcagtaagaaagatactgatgttatttcttttgttgatgaatccctaaatattgattatgccaccaattcttggtggattgactcaggagcgacaattcatgttgcaaattccttgcagggattcgctatgaggaggacactaagaagaggggaaagaagaattagagttgctaatggagaaagaatctccacccacggtgactgccaacgaggtcctctcggatgtaagcgggcctgtcctggggaaggcgggacattacagtattatagccctgccgttcctatagaaatccagggaatcccttttccctcggatttgattcttctggacaccaagaacttggatgtgatccttgggatgaattggttggctcaattccaaggagtagtggattgcgcaagacgcactgtcactctgtaccgagggctggaacaaccggttgttttctttgcacccccaacctctgtcggcagttccgaacttcatcagattggactgtcggaaacccccatcgtcagagagttcagagatgtgtttccggaagaactacccggtatgccgcccaagcgagagattgagttccggatagatcttgctccaggaaccactcctctgtacaagcgaccctaccgtatggcagcaaatgaactggccgaagtcaagaaacagttggaagagttgaaagaaaagggaggaagaccatcagcagcatctccgtctggtgttgggaaagttgcgggaacaccaactgtttgcaagctcagcaagtgtgagttctggttgtccgaagtcaagttcttagggcacgtgatatccactaaaggagttgctgtggaccccgaaacagtaaccgctgtcactgattggaagcaacccaagatagttactcaggttcgcagctttttgggtttggcaggatactaccggaggttcatcgagaacttctccaaaatcgctcgacccatgacacagttgttgaagaaagaagaaaaatttgtgtggagcccgcaatgcgagaaggcgttccaaactcttcatgaaaagctggtctcctcgccagtgttgatcttaccggatactcgcaaggactacctggtgtactgtgacgcttcgcgccaaggattggggtgcgtattaatgcaggaaggtcatgtggtagcctatgcctcacgccagctacggccccatgaaggcaactaccctacccatgatttggagttggccgctgtggttcatgctctaaagatctggcgacactatctcattgggaatcgctgtgaaatatatactgatcataagagtttgaaatacatcttcactcagtcggatctgaatcttcggcagaggagatggttagaactcatcaaggattatgatgtgggaattcgctatcatcctggtaaggcaaacgtggtcgctgacgctctaagtcgaaaaagccgttgcaacactcttggcgtccgtggcattccaccggaacttcatcaacagatggaagccctgaacctaagcatagttggtcgtggattcttggctatgctggaagccaagcctaccttgctcgatcaaatccgcgaggctcagaagaatgatccagatatgcatgggatcctcaagaatatgaaacagggtaaagccgctggtttcacagaggatgaacacggaaccctatggaacggaaatcggcgtgtcaaggcagagcaccaacgaccggccagacttctccaacctctccaagtaccagaatggaaatgggatgaaattgggatggatttcatcaccggacttccaaaaacccagggcggtcatgattctatatgggtagtcgtggaccgactaaccaaggtagctcggttcattcccgtgaagaccacctatggagggaacaaactagctgaactctacttcgctaggatcgtgagtctccatggcgttcctaagaaaattgtatctgataggggaagccaattcacctctcacttctggaagaagctccaagaagagttgggtacccgattaaatttcagcaccgcgtatcacccgcagacagatggacagaccgagcgtctaaatcagatcctagaagatatgctccgtgcctgtgttctagattttgagaagacctgggataagagtctcccctatgccgagttctcctacaataacagctaccaagccagcatacaaatggcaccctatgaagcgttgtatggccgcaaatgccggacaccgctattgtgggaccaagttggggaaagccaagtgttcgggactgatatcctgagagaagctgaagcgaaggtcagaaccatttgggataatctaaaggtggcacagtcccgacagaagagctatgcagataaccgacgccgtaacctggaatttgcagtggatgactttgtgtaccttagggtcacgccattgcggggtgtagacaggttccagacaaaagggaagctcgcacctcggtttgtgggtcctttccgtatcattgctcgacgcggagaagttgcttaccagttggagctgcccgcctccttgggcaacgtgcatgatgtgttccatgtgtcgcaactcaagaaatgtcttcgagtgccatccgagcaggccgattcagagcaaattgaagttcgcgaagacttgacctacgtggagaggctagtgaaaatcctggacaccatggagcgcaggaccaggaaccgggtaatccgtttttgcaaggtccaatggagcaacaacgccgaggaagaagctacttgggagcgtgaaagcgagctgaaggcagcccatcccgatctcttcgccagttcttccgaatctcggggtcgagattccgtttaa

SEQ ID NO: 14715 - DNA, 1833 bp, Oryza sativa
  Clone ID: TFbOSC21716j.C1.o1.fg
atgggcaatattgaacaacttaatggaagtaattatgcttcatggaaggagaagctggaaattactctagctctattggatattgattatgccctccataatgatcctccggttgagcctagaccggaaaatgagaattatgagacattaaaaaggatatatgatgaagtaaaggcaaaatgggatatttcaaaccgtaaatgccttatgattatcaagagctccattattgacgcaataagaggagcagtcccagatactcagacagccagagaatatcttgctaaagttgaggaacaatttaaaggctcttctaaggtttatgccaccactcttattaaaagattggtcaatgaaagatacgattttactgaaaatctgagggaacatattatgaagaaatgtcacatggtttctaagcttaaatcaatggaaatggaaatctctgaaggttttcttgtccatttcattatgtcatctctgcctcaggagttttctccatttacgatcaattataatgcaatgaagatcaagtggggcattgatgaattaatagccatgtgtgtacaagaagaagaaaggcttaaggcagaaagagttgaccatgcaaatttatttaagcactccgagaagaaaaagtataagaaatttaagaaggagtatttgaagcctaagcctattcaatttaaagaaaaagggcaatcttcgaatcaatcccagcagaataaatctggaggaaatccctatacagaagaaaagggaaaagaaaaggatgggtgctacttttgtggaaagagtggacaccgccaaaaggactgtattggatttatgagatggctcagtaagaaaggtactgatgttatttcttttgttgatgaatccctaaatattgattatgccaccaattcttggtggattgactcaggagcgacaattcatgttgcaaattccttgcagggattcgctatgaggaggaccctaagaagagggcaaagaagaattagagttgctaatggagttgaaactgaagttgaggccattggagacttcactctcacacttcatactggcttcaaacttcagctgcatgatgttctttattatcgtttgggccatatttcaagggggggaattgagcgtctcattaaagaaaacatcctttatcctttggacttctcagatgcagatgttgatcactgcattgattgcatcaaaggaaaatattccaagcaaatcaagaaaggtgcaaatcgaagtatgggagttttggaaatcatccacacagacatctgtggtccatttaatgaaaaacatactacttatggtcaaattcctggaccttttgcgaggttcttacaggaaaatggcattaaggcccagtactcagcaccaggcgaaccccagcaaaatggagtagctgaaaggcgtaatcgcactcttatggatatggtttcacttggagaccaagaacacgctgtgttcttggaaaatgacataatcaaggggagtatgacacccagagaagttgttctggaagagaaacgaaattatattccaatgcctataattgaagaacccgttttctcaacacatactcatgttgcaccttcaatagaaagaaataatgatgcaacacctgctgaaactcctgcaactacttctagtagtgtatcaaatgatgagaataatgaggatgctcagcagccccagattgtgatagatgagcaaaataacgaacccgtcagaagatcacaacgagttagaaagtcagcgattccaagtgactatgtcacttacataaatgaagaggtgaataaacctatgggtgaagag

SEQ ID NO: 14716 - DNA, 4314 bp, Oryza sativa
  Clone ID: TFbOSC23733j.C1.o3.fg
atggcgtcttcttcctccaacccatctgctctcaatgggcagacagtttctgagaagctcaccaagagcaacttcgtgctgtggaaagcgcaagttcttgccgcgctgcgcggcgcacagatggccggcttcctcgacgggagcaatcaggcaccggctgcaacgatcatcatcaccaaggacgatggcaagaccaccgagaaggtggcaaatccggcgctggtgcaatggaaggcgcaggaacagcaggttctcagctacctgctgtcgtctctgtcgcgtgagatggaggcaattgagagcctcttcgcatctcaatctcgcgcccgcatcctcaacactcgcatggcgctctccaccaccgtgaaaggaaaccggagcatggcggagtatgtcggaaaaccagttgatgatgaggagctcatctcctacattcttgccgggctggatttcgactacaactcggtggtctcgtcagtcacgggacgcaccggtccaatctctgtgagcgatgtctatgcgctcctggttggctttgagtcgcggctggaacttctccagaacgcggccaatccttctgccaacaccgcgtcgcgaggaggacgaggcggaggcggtcgtgatggcagagggcgcggcggcggcaaccctggacgtggcggcagcttcgggcgcggtcgtaatgacggcaagcccaagccgacgtgccaactctgcggcaagatcggccacatcgtcgccaagtgctggaagaggtttgatccctctttcaccggtgaagagaagaacgccaacactgctgcagtgaactcctacggcatcgacacgaactggtacatcgacagcggcgccaccgaccacatcactggagagatggagaagctcatggtgaaggacaaatacaccggcaatgatcaagtccacaatgctagtggcgcaggtatgaatatcgatcatgttggtcatactgcaattcgtacccctactcgtgatctaacgttgaaaaacgtcctccatgttcctgatgcatgcaaaagccttgtttctgcccatcgctttactcgtgacaataaaacatttgttgaacttcatcctttcttctttttggttaaggatcaggtaacgaggatgccactccttcgaggcaggtgtagatccggcctctatcctctgccaacagacaagctccaaaccatctccaacaagcaggcttttggtgttgtcaagccctctcttttccggtggcacagtagattagggcacccttctttttctgttgtcaatcgcgtcattagccaaaataatctcccagttgttagggattctagtcaagagtttgtgtgtgatgcttgccagaaaggcaagagccatcagctaccctaccctaagtccagtagtgtttctattgaacctttgcaacttgtgttttccgatgtatggggtcctgctataaactctgttggcaataaagtttattatgttagtttcatcgatgactttagcaaattcacttggatctatctccttaaacacaaatctgaggtttttgccaagtttcaggattttcaaaaccttgttgaacgcttgacgaatagaaaaatcaaagctgtgcagacggattggggcggggaataccaacgtcttaattccttctttcagcgcattgggattgaacactacgttgcctgtccctatgcgcatcagcagaacggttctgccgagcgcaaacaccgtcacatcgttgaggtcgggctctcgttgttagctcatgcctccatgcctctcaaattctgggatgaggccttcaccaccgctgcttacctcataaacaggaccccaaccaaagtgataaactttgagacccctctacaacgtctgtttaacctgcccccagattattctctgcttcgcaccttcggctgtgcctgctggccgaatctgcgtccctacaacgcccgcaaattagctttccgttctaaacagtgtgcttttctgggttatagcacgcttcacaaaggttttaagtgcctagacatctctacagggcgtgtgtatatttcccgtgatgttgtctttgacgagcaaatctatccctttgaaaaacttcatcccaacgccggtgctcgcctccgggctgagatcaatctcctcccggcgcatcttcttccgctgcttgatcacgggggtgtacagatgcatgatcaaccgctgattgatgattctaatcctgctaatccaattattgagaatagtgcaggcagcagtgcaggcaatggagcaaaatcaggggcgcagcacgggcatgatttcatgcagagttccggcgggcaacctaccggcggccatcatgactctctgacgcacagtaccatgcatggcacggagaaccaggcggaccaggagaactcggcgtcatctcgatctgcagaaccggtcacgccgcgacacgcagcgagtccctcggccgcgccacacgcggcaaccgcgccaatcgcgtcgtcacacgcggcagcctcgtctctgtcgggagacattgtgggaccgggttcacgtgggccatcgcaggaggatcaagacacgtcgcaggaggatcaagacacgtctgcatcagctcctgcttcttccacatcgcatgatgatgatagtgctcagtttgccgctcagccgactcgaccagtgaccagagcacagcgtggtatccacaaaccaaagaagtacacagatggcacagtaaggtatgcaggactcacacatacaggagaaccaggtaatctccaagaggctttaagtaatactaattggaagtcagctatggatagcgagtttgctgctttagtgagaaataaaacctggcacctagttccaccaaagcagggggtgaatgtaatagattgtaagtgggtctataagattaaaagaaaggcagatggaactatagatagatataaagctaggttagtagcaaagggttttaaacaacgttatggtattgcttatgaggataccttcagtcctgtagttaaggctgctactattagacttgttctgtcactggctgtgtcacagggatggagtcttcgacagcttgatgtacagaatgccttcttgcatggctatcttgaagaagatgtgtacatgaggcagccaccaagatacgaggagaaaaagatgccacactatctctgtaagttggataaggctctgtatggcttaaaacaggcacctagagcttggtactccaggttgagtaaaaggctacaagaacttggttttgtttcatctaaggctgatacatctttgttcttctataataagaagggacttgttatgtttctgcttgtatatgttgatgatattatagttgctagctcttctggtcaagcagttacagttttactcaaggaacttgagaaagattttgctctgaaagatcttggggatctgcactactttctgggaattgaagtaaagaaaactgagaaaggtctgctgttgacacaggaaaggtatgcaggtgatattattaagagaactggaatgagtaattgtaagcctgtgagtactcctctctgtgtgtctgaaaaactgtggttaaatgatggtgaatttttgggtgcaaatgatgccagtcagtacaggagtatcgttggggctctacagtacttaactcttacaagaccagacatatctttctcagttaataaagtgtgtcagttcttacagaatcctactattgtacattgggcagcagtaaagagaatacttagatatctgcaaggtactcttggtctaggattaaagattgacaaatccttttcttatattgttagtgctttctctgatgcagactgggcaggatgtctagatgacaggagatctactggaggttttgcagtatttctgggatcaaatttgatatcctggagtgccaggaagcaagcttctgtatcacgctctagtactgaagccgaatataaagccttggctaatgcaactgctgaggtaatgtgggttcgtaaattgctagaagagattggtttgttgcatccaggaccttctcaattatggtgtgataatattggagctacctatttgtcagcaaatcctgtgtttcatgctagaacaaaacacatagaagtggattaccattttgtcagagaacaggtggcgcagaaaatgttggaaattcggtttgttccgtcacaagatcaaattgctgatggatttacaaagcctcttcctgtgagacaattacaattgttctgtaacaatctcaatcttggagagttgagattgagggggagtgttagatga

SEQ ID NO: 14717 - DNA, 336 bp, Oryza sativa
  Clone ID: TFbOSC23733j.C1.o3.gm
atgtctcccgacagagacgaggctgccgcgtgtgacgacgcgattggcgcggttgccgcgtgtggcgcggccgagggactcgctgcgtgtcgcggcgtgaccggttctgcagatcgagatgacgccgagttctcctggattagaatcatcaatcagcggttgatcatgcatctgtacacccccgtgatcaagcagcggaagaagatgcgccgggaggagattgatctcagcccggaggcgagcaccggcgttgggatgaagtttttcaaagggatagatttgctcgtcaaagacaacatcacgggaaatatacacacgccctgtagagatgtctag

SEQ ID NO: 14718 - DNA, 3765 bp, Oryza sativa
  Clone ID: TFbOSC400390j.C1.o57.fg
atgggcaatattgaacaacttaatggaagtaattatgcttcatggaaggagaagctggaaattactctagctctattggatattgattatgccctccataatgatcctccggttgagcctagaccggaaaatgagaattatgagacattaaaaaggatatatgatgaagtaaaggcaaaatgggatatttcaaaccgtaaatgccttatgattatcaagagctccattattgacgcaataagaggagcagtcccagatactcagacagccagagaatatcttgctaaagttgaggaacaatttaaaggctcttctaaggtttatgccaccactcttattaaaagattggtcaatgaaagatacgattttactgaaaatctgagggaacatattatgaagaaatgtcacatggtttctaagcttaaatcaatggaaatggaaatctctgaaggttttcttgtccatttcattatgtcatctctgcctcaggagttttctccatttacgatcaattataatgcaatgaagatcaagtggggcattgatgaattaatagccatgtgtgtacaagaagaagaaaggcttaaggcagaaagagttgaccatgcaaatttatttaagcactccgagaagaaaaagtataagaaatttaagaaggagtatttgaagcctaagcctattcaatttaaagaaaaagggcaatcttcgaatcaatcccagcagaataaatctggaggaaatccctatacagaagaaaagggaaaagaaaaggatgggtgctacttttgtggaaagagtggacaccgccaaaaggactgtattggatttatgagatggctcagtaagaaaggtactgatgttatttcttttgttgatgaatccctaaatattgattatgccaccaattcttggtggattgactcaggagcgacaattcatgttgcaaattccttgcagggattcgctatgaggaggaccctaagaagagggcaaagaagaattagagttgctaatggagttgaaactgaagttgaggccattggagacttcactctcacacttcatactggcttcaaacttcagctgcatgatgttctttattatcgtttgggccatatttcaagggggggaattgagcgtctcattaaagaaaacatcctttatcctttggacttctcagatgcagatgttgatcactgcattgattgcatcaaaggaaaatattccaagcaaatcaagaaaggtgcaaatcgaagtatgggagttttggaaatcatccacacagacatctgtggtccatttaatgaaaagtctgaccgtggtggtgaatactatggtagacatactacttatggtcaaattcctggaccttttgcgaggttcttacaggaaaatggcattaaggcccagtactcagcaccaggcgaaccccagcaaaatggagtagctgaaaggcgtaatcgcactcttatggatatggtacgaagtatgttaagtcactccactctgccggtaaagttatggatggaagctcttaaaacagctacacacattcttaacagggttcctagtaaatcagtccctaagacaccttttgaattatggactgggaagaaaccaaccctaaattattttcatgtgtggggttgtcctgctgaagcacgagttttcaatccaaatatgggaaaattagacatcaaaataatcagttgtcattttatcggttatcctgataagtcaaaggcatatagattctactgcccaaatcagtttacaaagttcattgagacaagacacgctgtgttcttggaaaatgacataatcaaggggagtatgacacccagagaagttgttctggaagagaaacgaaattatattccaatgcctataattgaagaacccgttttctcaacacatactcatgttgcaccttcaatagaaagaaataatgatgcaacacctgctgaaactcctgcaactacttctagtagtgtatcaaatgatgagaataatgaggatgctcagcagccccagattgtgatagatgagcaaaataacgaacccgtcagaagatcacaacgagttagaaagtcagcgattccaagtgactatgtcacttacataaatgaagaggtgaataaacctatgggtgaagaggtgaatgagcctatactagataatgatcccatctcatttaaagaagcaatgaagagtaaacattcgtctgaatggctaaaagctatgaaagatgaaatgaaatccatgagtactaataaagtctgggacttagtagaaattcccgaaggagccaaaacagttggctgcaaatgggtctataagactaaacgtgaccccaagggaaatatcgaaaggttcaaagcaaggcttgtagcaaaaggatttacgcaaagagaagggattgattataatgaaacattttctccagtatctactaaggattcattcagaattattatggcactagttgctcattatgatttggaactacaccaaatggatgttaagacggcattcctgaacggtgatttgtatgaagatgtatacatggcacaaccagaaggttttgttatgaaaggaaaagaacatatgggatgtcatctaaagaaatcgatttatggactaaagcaagcatcaaggcagtggtatctaaagtttgaccaaatcataagacaatttggttttaaagaaaataaaaaggatgactgtatatacactaagtttaaggagagtaagttcatcttcctaatattatatgtcgatgacatactcttagccagtaatgataaaaatatgctactggaaacaaagaaatttctggcctctaagtttgaaatgaaagatctcggtgaagccaattatgtgttgggtatagagatttaccgaggcagatcaaatggtgttttggggctatctcagaaagcatatatagaaaaggtactgaaaaagtataatatgcataattgttcagcctcgcctgctcctataatgaagggtgataagtatggaaaattccaatgtcctaagaatgagtatgaagctgcgcagatgaagtcaatatcatatgcttcagctgtcggaagcataatgtatgcacaagtgtgcactcgccctgatttagcttttgttaccgggatgcttggcagatatcaatctaatccaggtctagaacactggaaattagctaagaagaccttgcgttatcttcaaggcactaaagacctcatgctcacatatagaaagtctgaaaaccttgaagttgttggttattcggactccgatcttgcagggtgtgttgatgataagaaatccacgtcaggttatatattcacccttgcaaggggagctatatcgtggaaaagctccaaacaaagagttactacatcgtcgacaatgcaggctgagtatgtggcatgttatgaagctactggacaggcaatatggctgaaaaactttatcccgggattaagagtggtcgacagcatatcaaaaccactcaaattatactgcgataacaaaccagcagtatactatgcgagtagcaacaaatcaagtgcttctgccaaatacattgatatcaagtaccatgttgtgaaagaaatgatccaggatcagacaataagcattgagtatatgaacactaagttgatgttagcggatccacttacaaaaggcctaccacctgttgtatttaaagaacatgttgccggcataggtttggtagaaaagccttcgatcctggaataa

SEQ ID NO: 14719 - DNA, 3560 bp, Oryza sativa
  Clone ID: TFbOSC400596j.C1.o9.np
atgggaacccctggagatcaagcatcttatgcctcacaaattgccggaataattggcaatattgaacaacttaatggaagtaattatgctccatggaaggagaagcttgaaattactttagctctgttggatattgattatgccctccataatgatcctctggttgagccaagaccggaaaatgagaattatgataccctaaaaaggagatatgatgaagtaaaggcaaaatgggatatttcaaaccgtaaatgccttatgattatcaagagctccattattgacgcaataagaggagcagtcccacatacttagatagccagagaatatcttgctaaagttgaagaagaatttaaaggctcttctaaggtttatgccaccactcttattaaaagattggtcaatgaaagatatgattttactggaaatctgagggaacatattatgaagaaatgtcacatggcttctaagctaaaatcaatggaaatggaaatctctgaaggttttcttgtccatttcattatgtcatctctgccccaggagttttctccatttacgatcaattataatgcaatgaagatcaagtggggcattgatgaattaatagccatgtgtgtacaagaagaggaaaggcttaaggcagcaagagttgaccatgcaaatctatttaaacactccgagaagaaaaagtataagaaatttaagaaggagtatttgaagcctaagcctattcaatttaaagaaatagggcaatctttgaatcaatccgagcagaataaatctggaggaaatctctatacagaagaaaagggaaaagaaaaggatgggtgctacttttgtggaaagagtggacaccgccaaaaggactgtattgggtttatgagatggctcagtaagaaagggattcgctatgaggaggaccctaagaagaggggaaagaagaattagagttgctaatggagttgaaactgaagttaaggccattggagacttcactctcacacttcatactggcttcaaacttcagctgtatgacattctttatgtaccctctatgaaaaggaacttagttttagtttcacgtttagataacggtggttactattgtacttttggaaacaatagatgtataattatgcatgataataaagaggttggtctcgccgatgggaacaactttatcaaatctttatgtgcgatgccacctataatgttcactcctcaaatgcaaatgtcagtaccaaacgaaaatataacgataatgagacttcttcgaaattatggcactatcgtttaggccatatttcgagggggagaattgagcatctcattaaagaaaatatcctctatcctttggacttctcagatgcagatgttgatcactgcattgattgcatcaaaggaaaatattccaagcaaatcaagaaaggtgcaaatcgaagtatgggagttttgaaaatcatccacacagacatctgtggtccatttaatgaaaagtcagtggatggatttgtttcattcataacattcaccgacgactactctcgttatggatatatctatccaatcaaagaaagatctgaggcattagacaagtttaaaattttcaaagcagaagttgagaatcaacatgatcgaaagataaaaatttttacaaagttcattgagacaagacacgttgtgttcttggaaaatgacataatcaaggggagtatgacacccagagaagttgttctggaagagaaacggaattatgttccaatgcatataattgaagaacccgttttctcaacacatactcatgttgcaccttcaatagaaagaaataatgatgcaacacctactgaagctcctgcaactacttctagtagtgtatcaaatgatgagaataatgaggatgctcagcagccccagattgtgatagatgagcaaaataacgaacccgtcagaagatcacaacgagttagaaagtcagcgattccaagtgactatgtcacttacatgaatgaagaggtgaatgaacttatgagtgaagaggtgaatgagcctatactagataatgatcccatctcatttaaagaagcaatgaagagtgaacattcgtctgaatggctaaaagctatgaaagacgaaatgaaatccatgagtactaataaggtctgggacttagtagaaattcccgaaggagccaaaacagttggctgcaaatgggtctataagactaaacgtgaccccaagagaaatatcgaaaggttcaaagcaaggcttgtagcaaaaggatttacgcaaagagaagggattgattataacgaaacattttctccagtctctactaaggattcattcagaattattatggcactagttgcctattatgatttggaattgcaccaaatggatgttaagacggcattcctgaacggtgatttgtataaagatgtatacatggcacaaccagaaggttttgttatgaaagaaaaagaacatatgggatgtcatctaaagaaatcgatttatggactaaagcaagaatcaaggcagtggtatctaaagtttgaccatatcataagacaatttggttttaaggagaataaaaaggatgactgtatatacgctaagtttaaggagaaattcctggtctctaagtttgaaatgaaagatctcggtgaagccacttatgtgttgggtatagagatttaccgagacagatcgaatggtgttttggggctatcctagaaagcatatatagaaaaggtactgaaaaagtataatatgcataattgtttagcctcgcctgctcctataatgaagggtgataagtatggaaaattccaatgtcctaagaatgagtatgaagctgcgcagatgaaatcaataccatatgcttcagctgtcggaagcataatgtatgcacaagtgtgcactcgccctgatttagcatttgttaccgagatgcttggcagatatcaatctaatccaggtctagaacactggaaattagctaagaagaccttgtgttatctacaaggcactaaagacctcatgctcacatatagaaagtctgaaaaccttgaagttgtcggttatttggactctgatcttgcagggtgtgttgatgataagaaatccacgtcaggttatattttcacccttgcagggggagctatatcgtggaaaagctccaaacaaagagttactgcatcgtcgacaatgcaggctgagtatgtggcatgttatgaagctactagacaggcaatatggctgaagaactttatcctgggattgagagtggtcgacagtatatcaaaaccactcaaattatactgtgataacaaaccagcagtatactatgcgagtagcaacaaataagtgcttctgccaagtacattgatatcaagtaccatgtcgtgaaagaaatgatccaggatcagacaataagcgttgagtatatgaacactaagttgatgttagcggatccacttacaaaaggcctaccacccgttgtatttaaagaacatgttgccagcatgggtttggtagaaaagcctttgatcctggaa

SEQ ID NO: 14720 - DNA, 3678 bp, Oryza sativa
  Clone ID: TFbOSC401051j.C1.o47.fg
atgggaactccgggagatcaagcatcttatgcctcacaaatttccggaataatgggaaatattgaacaacttaatggaagtaattatgcttcatggaaagaaaagctggaaattactctagctatgttggatattgattatgccctccataatgatcctccagttgaacctagaccggaaaatgagaattatgagaccctaaaaaggatatatgatgaagtaaaggcaaaatgggatatttcaaaccgtaaatgccttatgattatcaaaagctccattattgacgcaataagagtagcagttccagatactcagacagctagagaatatcttgctaaaattgaggagcagtttaaaggctcttctaaggtttatgccaccactcttattaaaagattggttaatgaaagatatgatttttctggaaatctgagggaacatattatgaaaaaatgtcatatggcttctaagcttaaatcaatggaaatggaaatctctgaaggttttcttgtccatttcattatgtcatctctgcctcaggagttttctccatttacaatcaattataatgcaatgaagatcaagtggggcattgatgaattaatagccatgtgtgtacaagaagaggaaaggcttaaggcagaaagagttgatcatgcaaatctatttaaacactctgagaagaaaaagtataagaaatttaagaaggagtatttgaagcctaagcctattcagtttaaagaaaaagggcaatcttcgagtcaatcccagcagaataaatctggaggaaatccctatacagaagaaaaggaaaaagaaaaggatgggtgctacttttgtggaaagagtggacaccgccaaaaagactgtattgggtttatgagatggctcagtaagaaaggtactgatgttatttcttttgttgatgaatccctgaatattgattatgccaccaattcttggtggattgactcaggagcgacaattcatgttgcaaattccttgcagggattcgctatgaggaggaccctaagaagaggggaaagaagaattagagttgctaatggagttgaaactgaagttgaggctattggagacttcactctcacacttcatactggcttcaaacttcagctacatgatgttctttatgtaccctctatgaaaagaaacttagtttcagtttcacgtttagataacggtggttactattgtacttttggaaacaatagatgtataattatgcatgataataaagaggttggtctcgccgttggacgggaacaactttatcaaatctctgtgtgcgatgccacctataatgtggactcctcctcaaatgcaaatatcagtaccaaacgaaaacataacgataataagactttttcgaaattatggcactatcgtttgggccatatttcgagggggagaattgagcgtctcattaaagaaaacatcctttatcctttggacttctcagatgcagatgttgttcactgcattgattgcatcaaaggaaaatattccaagcaaatcaagaaaggtgcaaatcgaagtatgggagttttggaaatcatccacacagacatctgtggtccatttaatgaaaagtcagtggatggattcgattcattcataacattcaccaacgattactctcgttatggatatatctatccaatcaaagaaagatctgaggcattagacaaatttaaaattttcaaagtagaagttgagaatcaacatgatcgaaagatcaaaatttttacaaagttcattgagacaagacacgctgtgttcttggaaaatgacataatcaaggggagtatgacacccagagaagttgttctggaagagaagcggaattatgttccaatgcctataattgaagaacccgttttctcaacacatactcatgttgcaccttcaatagaaagaaataatgatgcaacacctgctgaagctcctgcaactacttctagtagtgtatcaaatggtgagaataatgaggatgctcagcagccccagattgtgatagatgagcaaaataacgagcccgtcagaagatcacaacgagttagaaagtcagcgattccaagtgactatgtcatttacatgaatgaagaggtgaatgaacctatgattgaagaggtgaatgagcctatactagataatgatcccatctcatttaaagaagcaatgaagagtgaacattcgtctgaatggctaaaagctatgaaagacgaaatgaaatccatgagtacaaataaggtctgggacttagtagaaattcccaaaggagccaaaacagttggctgcaaatgggtctataagactaaacgtgaccccaagggaaatatcgaaaggttcaaagcagggcttgtagcaaaaggatttacacaaagagaagggattgattataatgaaacattttctccagtgtctactaaggattcattcagaattattatggcactagttgctcattatgatttggaattacaccaaatggatgttaagacggcattcctgaacggtgatctgtatgaagatgtatacatggcacaaccagaaggttttgttatgaaaagaaaagaacatatgggatgtcatctaaagaaatcaatttatggactaaagcaagcatcaaggcagtggtatctaaagtttgaccaaatcataagacaatttggttttaaagcaaataaaaaggatgactgtgtatacgctaagtttaaagagaaaattctggcctctaagtttgaaatgaaagatctcggtgaagccacttatgtgttgggtatagagatttaccgagacagatcaaatggtgttttggggttatctcagaaagcatatatagaaaaggtactgaagaagtataatatgcataattgttcagcctcgcctgctcctataatgaagggtgataagtatggaaagttccaatgtcctaagaatgagtatgaagctgcgcagatgaagtcgataccatatgcttcagctatcagaagcataatgtatgcacaagtgtgcactcgccctgatttagcttttgttaccgggatgcttggcagatatcaatctaatccaggtctagaacactggaaattagctaagaagaccttgcgttatctacaaggcactaaagacctcatgctcacatatagaaagtctgaaaaccttgaagttgttggttattcggactctgatcttgcagggtgtgttgatgataagaaatccacatcaggttatatattcacccttgcaaagggagctgtatcgtggaaaagctccaaacaaagagttactgcatcgtcgacaatgcaggctgagtatgtggcatgttatgaagctactggacaggcaatatggctgaaaaactttatcccgggattaagagtggtcgacagcatatcaaaaccactcaaattatactgcgataacaaaccagcagtatactatacgagtagcaacaaatcaagtgcttctgccaagtacattgatatcaagtaccatgttgtgaaagaaatgatccaggatcagacaataagcgttgagtatatgaacactaagttgatgttagcggatccacttacaaaaggcctaccacccattgtatttaaagaacatgttgccggcatgggtttggtagaaaagcctttgatcctggaataa

SEQ ID NO: 14721 - DNA, 1884 bp, Oryza sativa
  Clone ID: TFbOSC405418j.C1.o1.fg
atggccgccgccacggcctcctcgccggcgaccgccgccgccgccaactccgatgacgaagacaactacgaggagtacatccccgtcgccaagcgccgggccatggaggccgaccgcctccgccgcctccgcctctccaagcccgcgcccccatcctcctccgccgcggaggccgcctcggatctcccgcctccccctcccccaccgccgaaccagccctcagccggcggtggcggtggcggcctcgaagcctccgcgaagcccagcctcctcgtcaaggcgacgcagctcaagcgggccgcgccggaggtgacccacacggagcagctcatcatgcaggagaaggagatgatcgagcacctctccgaccgcaagacgctcatgtcggtgcgcgagctcgccaaggggatcacctactccgacccgctcaagacggggtggaagccgccgctccgcctccgccgcatgccgcgcgccaaggccgacgagctccgccgcaagtggcacatcctcgtggacggggacgacgtgccgccgcccgctcgggacttccgcgacctccgcctgcccgagcccatgctgcgcaagctccgcgagaagggcatcgtccagcccactcccatccaggtgcagggattgcccgtggtgctctccgggcgcgacatgattggcattgccttcacagggtccgggaagacgttggtgtttgtgctgccgctcatcatggtggcattacaggaggagatgatgatgccaatcgtgccgggtgaagggccatttgggatgatcatctgtccatcgcgagagctggccaagcaaacgtacgatgtcattgagcagttccttgttccacttaaggaggctgggtacccggagatacgcccgttgctttgcattgggggtgtcgatatgagggcgcagctggatgtggtcaagaagggagtacatattgtggtggctacacctggccgactcaaggatttacttgccaagaaaaagatgaacctcgacaattgcaggtacttgaccttggatgaagctgataggcttgtcgatcttgggtttgaggatgatatccgtgaggtttttgaccatttcaaggcacaaaggcagacacttctattttctgccactatgccgaagaagattcaaaactttgcgaagagtgcccttgtgaaacctgttattgtgaatgttggtagagctggtgcggcaaatctggatgtcatccaagaagttgagtatgtcaaggaggatgccagaattatatatctcctggaatgcctccagaagactccacctccagttcttgtcttttgtgaaaacaaagctgatgtcgactatatccatgagtatcttcttctgaagggtgtagaggctgttgcaatccatggaggaaaggatcaagaggaaagagagaatgcaatcgagttcttcaagaatggaaagaaggatgttttggtggctactgatgttgcctcgaaaggtcttgatttccctgatatccagcatgtgattaactatgatatgcctgctgaaatagaaaactatgttcaccggattggtcgaactggtcgatgtgggaaaactggaatagcaacaaccttcataaacaagaatcaaacggagactacccttcttgaccttaagcacttgcttaaggaagctaagcaaagaataccgccagtgttggctgagctcaatgacccattggaagatgaggaaaccatggccaaggagagcggtgttaagggatgtgcatactgtggtggtcttggccatcgtgttaccgactgtccaaagctggagcaccagaagtccatggcgatcgcgggctctagaagagattactatggcggtggaggctacagaggagaaatatga

SEQ ID NO: 14722 - DNA, 3297 bp, Oryza sativa
  Clone ID: TFbOSC416746j.C1.o19.fg
atgggaacccctggagatcaagcatcttatgcctcacaaattgccagaataatgggcaatattgaacaacttaatggaagtaattatgcttcatggaaggagaagctggaaattactctagctctgttggatattgattatgccctccataatgatcctccggttgagccgagaccggaaaatgagaattatgagaccctaaaagggagatatgatgaagtaaaggcaaaatggtatatttcaaaccgtaaatgccttatgattatcaaaagctccattattgacgcaataagaggagcagtcccagatactcagacagccagagaatatcttgctaaagttgaagaacaatttaaaggctcttctaaggtttatgccaccactcttattaaaagattggtcaatgaaagatatgattttactggaaatctgagggaacatattatgaagaaatgtcacatggcttctaagcttaaatcaatggaaatggaaatctctgaaggttttcttgtccatttcattatgtcatctctgcctcaggagttttctccatttacgatcaattataatgcaatgaagatcaagtggggcattgatgaattaatagccatgtgtgtacaagaagaggaaaggcttaaggcagaaagagttgaccatgcaaatctatttaaacactccgagaagaaaaggtataagaaatttaagaaggagtatttgaagcctaagcctattcaatttaaagaaaaagggcaatcttcgaatcaatcccagcagaataaatctggaggaaatccctatacagaagaaaagggaaaagaaaaggatgggtgctacttttgtggaaagagtggacaccgccaaaaggactgtattgggtttatgagatggctcagtaagaaagatgttgatcactgcattgattgcatcaaaggaaaatattccaagcaaatcaagaaaggtgcaaatcgaagtatgggagttttggaaatcatccacacagacatctgtggtccatttaatgaaaagtcagtggatggatttgattcattcataacattcaccgacgactactctcgttatggatatatctatccaatcaaagaaatatctgaggcattagacaaatttaaaattttcaaagcagaagttgagaatcaacatgatcgaaagatcaaaattgtaaggtctgaccgtggtggtgaatactatggtagacatactacttatggtcaaattcctggaccttttgcgaggttcttacatgaaagtggcattaaggcccagtactcagcaccgggcgaaccccagcaaaatggagtagctgaaaggcgtaatcgcactcttatggatatgggttgtcctgctgaagcacgagttttcaatccaaatatgggaaaattagacctcaaaacaatcagttgtcattttattggttatcctgataagtcaaaggcatatagattctactgcccaaatcagtttacaaagttcattgagacaagacacgctgtgttcttggaaaatgacataatcaaggggagtatgacacctagagaagttgttctggaagagaaacggaattatgttccaatgcctataattaaagaacccgttttctcaacacatactcatgttgcaccttcaatagaaagaaataatgatgcaacacctgctgaagctcctgcaactacttctagtagtgtatcaaatgatgagaataatgaggatgctcagcagccccagattgtgatagatgagcaaaataatgaacccgtcagaaaatcacaacgagttagaaagtcagcgattccaagtgactatgtcacttgcatgaatgaagatgtgaatgaacctatgagtgaagaggtgaatgagcctatactagataatgatcccatctcatttaaagaagcaatgaagagtgaacattcgtctgaatggctaaaagctatgaaagacgaaatgaaatccatgagtactaataaagtctgggacttagtagaaattcccgaagcagccaaaacagttggctgcaaatgggtctataagactaaacgtgaccccaagggaaatatcgaaaggttcaaagcaaggcttgtagcaaaaggatttacgcaaagagaagggattgattataatgaaacattttctccagtgtctactaaggattcattcagaattattatggcactagttgctcattatgatttggaattacaccaaatggatgttaagacggcattcctgaacggtgatctgtatgaagatgtatatatggcacaaccagaaggttttgttatgaaaggaaaagaagatatgggatgtcatctaaagaaatcgatttatggactaaagcaagcatcaaggcagtggtatctaaagtttgaccaaatcataagacaatttggttttaaagagaataaaaaggatgactgtatatacactaagtttaaggagagtaagtttatctttctaatattatatgttgatgacatactcttagccagtaatgacaaaaatatgctactggaaacaaagaaatttctggcctctaagtttgaaatgaaagatctcggtgaagccacttatgtgttgggtatagagatttatcgagacagatcaaatggtgttttggggttatctcagaaagcatatatagaaaaggtactgaagaaatataatatgcataattgttcagcctcgcctgctcctataatgaagtgtgataagtatgaaaaattccaatgtcctaagaatgaatatgaagctgcgcagatgaaatcaataccatatgcttcagctatcggaagcataatgtatgcacaagtgtgcgctcgccctgatttagcatttgttaccgggatgcttggcagatatcaatctaatccagggggagctgtatcgtggaaaagctccaaacaaagagttactgcatcgtcgacaatgcaggctgagtatgtggcatgttatgaagctactggacatgcaatatggctgaaaaactttatcccgggattgagagtggtcgacagtatatcaaaaccactcaaattatactgtgataacaaaccagcagtatactattcgagtagcaacaaatcaagtgcttctgccaagtacattgatatcaagtaccatgttgtgaaagaaatgatccaagatcagacaataagcgttgagtatatgaacactaagttgatgttagcggatccacttacaaaaggcctaccacccgctgtatttaaagaacatgttgccggcatgggtttggtagaaaagccttcgatcctggaataa

SEQ ID NO: 14723 - DNA, 3891 bp, Oryza sativa
  Clone ID: TFbOSC421895j.C1.o14.fg
atgggaactccaggagataaagcatcttatgcctcacaaattgccggaataataggcaatattgaacaacttaatggaagtaattatgcttcatggaaggagaagctggaaattactctagctcagttggatattgattatgccctccataatgatcctccggttgagcctataccggaaaatgaaaattatgagaccctaaaaaggagatatgatgaagtaaaggcaaaatgggatatttcaaaccgtaaatgccttatgattattaagagctccattattgacgcaataagaggagcagttccagatactcagacagccagagaatatcttgctaaagttgaggagcagtttaaaggctcttctaaggtttatgccaccactcttattaaaagattggtcaatgaaagatatgattttactggaaatctgagggaacatattatgaagaaatatcacatggcttctaagcttaaatcaatggaaatggaaatctctaaaggttttcttgtccatttcattatgtcatctctgcctcaggagttttctccatttacgatcaattataatgcaatgaagatcaagtggggcattgatgaattaatagccatgtgtgtacaagaagaggaaaggcttaaggcagaaagagttgaccatgcaaatttatttaaacactccgagaagaaaaggtataagaaatttaagaaggagtatttgaagcctaagcctattcaatttaaagaaaaagggcaatcttcgaatcaatcccagcaaaataaatctggaggaaatccctatacagaagaaaagggaaaagaaaaggatgggtgctacttttgtggaaagagtggacaccgccaaaaggactgtattggatttatgagatggctcagtaagaaaggtactgatgttatttcttttgttgatgaatccctgaatattgattatgccaccaattcttggtggattgactcaggagcgacaattcatgttgcaaattccttgcagggattcgctatgaggaggaccctaagaagaggggaaagaagaattagagttgctaatggagttgaaactgaagttgaggccattggagacttcactctcacacttcatactggcttcaaacttcagctgcatgatgttctttatgtaccctctatgaaaaggaacttagtttcagtttcacgtttagataatggtggttactattgtacttttggaaacaatagatgtataattatgcatgataataaagaggttggtctcgccgttggatgggaacaactttatcaaatctctgtgtgcgatgccacctataatgttgattcctcctcaaatgcaaatgtcagtaccaaacgaaaacataacgataatgagacttcttcgaaattatggcactatcgtttgggccatatttcgaaggggagaattgagcgtctcattaaagaaaacatcctttatcctttggacttctcagatgcagatgttgatcactgcattgattgcatcaaaggaaaatattccaagcaaatcaagaaaggtgcaaatcgaagtatgggagttttggaaatcatccacacagacatctgtggtccatttaatgaaaagtcagtggatggatttgattcattcataacattcaccgacgattactctcgttatggatatatctatccaatcaaagaaagatctgaggcattagacaaatttaaaattttcaaagcagaagttgagaatcaacatgatcgaaagatcaaaattgtaaggtctgaccgtggtggtgaatactatggtagacatactacttatggtcaaattcctggaccttttgcgaggttcttacaggaaagtggcattaaggcccagtactcagcaccgggtgaaccccagcaaaatggagtagctgaaaggcgtaatcgcactcttatggatatggtacgaagtatgttaagtcactccactctgccggtaaagttatggatggaagctcttaaaacagctacacacattcttaacagggttcccagtaaatcagtccctaagacaccttttgaattatggactgggaagaaaccaaccctaaattattttcatgtgtggggttgtcctgctgaagcacaagttttcaatccaaatatgggaaaattagacctcaaaacaatcagttgtcattttatcggttatcctgataagtcaaaggcatatagattctactgcccaaatcagtttacaaagttcattgagacaagacacgctgtgttcttggaaaatgacataatcaaggggagtatgacacccagagaagttgttctggaagagaaacggaattatgttccaatgcctataattgaagaacccgttttctcaacacatactcatgttgcaccttcaatagaaagaaataatgatgcaacacctgctgaagctcctgcaactacttctagtagtgtatcaaatgatgagaataatgaggatgctcagcagccccagattatgatagatgagcaaaataacgaacccgtcagaagatcacaacgagttagaaagtcagcgattccaagtgactatgtcacttacatgaatgaagaggtgaatgaacctatgagtgaagaggtgaatgagcctatacttgataatgatcccatctcatttaaagaagcaatgaagagtgaacattcatctgaatggctaaaagctatgaaagatgaaatgaaatccatgagtacaaataaggtctgggacttagtagaaattcccgaaggagccaaaacagttggctgcaaatgggtctataagactaaacgtgaccccaagggaaatatcgaaaggttcaaatcaaggcttgtagcaaaaggatttacgcaaagagaagggattgattataatgaaacattttctccagtgtctactaaggattcattcagaattattatggcactagttgctcattatgatttggaattacaccaaatggatgttaagacggcattcctaaacggaaaagaacatatgggatgtcatctaaagaaatcgatttatggactaaagcaagcatcaaggcagtggtatctaaagtttgaccaaatcataagacaatttggttttaaagaaaataaaaaggatgactgtatatacactaagtttaaggagagtaagttcatcttcctaatattatatgttgatgacatactcttagccagtaatgacaaaaatatgctactggaaacaaagaaatttctggcctctaagtttgaaatgaaagatctcggtgaagccacttatgtgttgggtatagagatttaccgagacagatcaaatggtgttttagggttatctcagaaagcatatatagaaaaggtactgaagaaatataatatgcataattgttcagcctcgcctgctcctataatgaagggggataagtatggaaaattccaatgtcctaagaatgagtatgaagctgcgctgatgaagtcaataccatatgcttcagctgtcggaagcataatgtatgcacaagtgtgcactcgccctgatttagcttttgttaccgggatgcttggcagatatcaatctaatccaggtctagaacactggaaattagctaagaagaccttgcgttatcttcaaggcactaaagacctcatgctcacatatagaaagtctgaaaaccttgaagttgttggttattcggactctgatcttgcagggtgtgttgatgataagaaatccacgtcaggttatatattcacccttgcaaggggagctgtatcgtggaaaagctccaaacaaagagttactacatcgtcgacaatgcaggctgagtatgtggcatgttatgaagctactggacaggcaatatggctgaaaaactttatcccgggataa

SEQ ID NO: 14724 - DNA, 4224 bp, Oryza sativa
  Clone ID: TFbOSC900317j.C1.o15.fg
atgggaacccctggagatcaagcatcttatgcctcacaaatttccggaataatgggaaatattgaacaacttaatggaagtaattatgcttcatggaaagaaaagctggaaattactctagctctgttggatattgattatgccctccataatgatcctccggttgagcctagaccggaaaatgagaattatgagacccttaaaaggatatatgatgaagtaaaggcaaaatgggatatttcaaaccgtaaatgccttatgattatcaagagctccattattgacgcaataagaggagtagttccagatactcagacagccagagaatatcttgctaaaattgaggagcaatttaaaggctcttctaaggtttatgccaccactcttattaaaaggttggtcaatgaaagatatgattttactggaaatctgagggaacatattatgaagaaatgtcacatggcttctaaacttaaatcaatggaaatggaaatctctgaaggttttcttgtccatttcattatgtcatctctgcctcaggagttttcttcatttacaatcaattataatgcaatgaagatcaagtggggcattgatgaattaatagccatgtgtgtacaagaagaggaaaggcttaaggcagaaagagttgaccatgcaaatctatttaaacactccgagaagaaaaagtataagaaatttaagaaggagtatttgaagcataagcctattcagtttaaagaaaaagggcaatcttcgagtcaatcccagcagaataaatctggaggaaatccctatacagaagaaaagggaaaagaaaaggatgggtgctacttttgtggaaagagtggacaccgccaaaaagactgtattgggtttatgagatggcttagtaagaaaggtactgatattatttcttttgttgatgaatccctgaatattgattatgccaccaattcttggtggattgactcaggagcgacatttcatgttgcaaattccttgcagggattcgctatgaggaggaccctaaaaagaggggaaagaagaattagagttgctaatggagttgaaactgaagttgaggctattggagacttcactctcacacttcatactggcttcaaacttcagctgcatgatgttctttatgtaccctctatgaaaagaaacttagtttcagtttcacgtttagataacgatggttactattgtacttttggaaacaatagatgtataattatgcatgataataaagaggttggtctcgccgttggatgggaacaactttatcaaatctctgtgtgcgatgccacctataatgttgactcctcctcaaatgcaaatatcagtaccaaacaaaaacataacgataatgagacttcttcgaaattatggcactatcgtttgggccatatttcgagggggagaattgagcgtctcattaaagaaaacattctttatcctttggacttctcagatgcagatattgatcactgcattgattgcatcaaaggaaaatattccaagcaaatcaagaaaggtgcaaatcgaagtatgggaattttggaaattatccacacagacatctgtggtccatttaatgaaaagtcagtggatggatttgattcattcataacattcaccgacgattactctcgttatggatatatttatccaatcaaagaaagatctgaggcattagacaaatttaaaatcttcaaagcagaagttgagaatcaacatgatcgaaagatcaaaattgtaagatctgaccgtggtggtgaatactatggtagacatactacttatggtcaaattcctggaccttttgcgaggttcttacaggaaagtggcattaaggcccagtactcagcaccgggcgaaccccagcaaaatggagtagctgaaaggcgtaatcgcactcttatggatatggtacgaagtatgttaagtcactccactctgccggtaaagttatggatggaagctcttaaaacagctacacacattcttaacaggattcccagtaaatcagtccctaagacaccctttgaattatggactgggaagaaaccaaccctaaattattttcatgtgtggggttgtcctgctgaagcacgagttttcaatccaaatatgggaaaattagacctcaaaacaatcagttgtcattttatcggttatcctgataagtcaaaggcatatagattctactgcccaaatcagtttacaaagttcattgaaacaagacacgctgtgttcttggaaaatgacataatcaaggggagtatgacacccagagaggttgttctggaagagaaacggaattatgttccaatgcctataattaaagaacccgttttctcaacacatactcatgttacaccttcaatagaaagacataatgatgcaacacctgctgaagctcctgcaactacttctagtagtatatcaaatgatgagaataatgaggatgctcagcagccccagattgtgatagatgagcaaaataacgaacccgtcagaagatcacaacgagttagaaagtcagcaattccaagtgactatatcacttacatgaatgaagaggtgaatgaacctatgagtgaagaggtgaatgagcctatactagataatgatcccatctcatttaaagaagcaatgaagggcgaacattcgtctgaatggctaaaagctatgaaagacgaaatgaaatccatgagtacaaataaggtctgggacttagtagaaattcccgaaggagccaaaacagttggctgcaaatgggtctataagactaaacgtgaccccaagggaaatatcaaaaggttcaaagtaaggcttgtagcaaaaggatttacgcaaagagaagggattgattataatgaaacattttctccagtgtctactaaggattcattcagaattattatggcactagttgctcattatgatttggaattacaccaaatggatgttaagacggcattcctgaacggtgatctgtatgaagatgtatacatggcacaaccagaaggttttgttatgaaaggaaaagaacatatgggatgttatctaaagaaatcgatttatggactaaagcaagcatcaaggcagtggtatctaaagtttgaccaaatcataagacaatttggttttaaagaaaataaaaaggatgactgtatatacgctaagtttaaagagagtaagttcatcttcctaatattatatgttgatgacatactcttagccagtaataacagaaatatgctactggaaacaaagaaatttctggcctctaagtttgaaatgaaagatctcggtgaagccacttatgtgttgggtatagagatttaccgagacagatcaaatggtgttttggggttatctcagaaagcatatatagaaaaggtactgaagaagtataatatgcataattgttcagcctcgcctgctcctataatgaagggtgataagtatggaaagttccaatgtcctaagaatgagtatgaagctgcgcagatgaagtcaataccatatgcttcagctgtcggaagcataatgtatgcacaagtgtgcactcgcccagatttagcttttgttaccgggatgcttggcagatatcaatctaatccaagtctagaacactggaaattagctaagaagaccttgcgttatcttcaaggcactaaagacctcatgctcacatatagaaagtctgaaaaccttgaagttattggttattcagactctgatcttgcagggtgtgttgatgataagaaatccacgtcaggttatatattcacccttgcaaggggagctgtatcgtggaagagctccaaacaaaaggttactgcatcgtcgacaatgcaggctgagtatgtggcatgttatgaagctactggacaggcaatatggctgaaaaactttatcccaggattaagagtggtcgacagcatatcaaaaccactcaaattatactgcgataacaaaccagcagtatactatgcgagtagcaacaaatcaagtgcttctgccaagtacattgatatcaagtaccatgttgtgaaagaaatgatccaagatcagacaataagcgttgagtatatgaacactaagttgatgttagcggatccacttacaaaagacctaccacccgctgtatttaaagaacatgttgccggcatgggtttggtagaaaagcctttgatcctggaataa

SEQ ID NO: 14725 - DNA, 3942 bp, Oryza sativa
  Clone ID: TFbOSC400615j.C1.o16.fg
atggcgagctcttctatggcggcggcaatctccaaccctctgtttggcctccaaatctcggagaagctaaccaaacagaatcatcctctctgggctgcacagatcctcaccaccttgcgaggtgcgcagctggaggagcacatcgtcagcacgaccgcagctccggcggctgaaattgaaaaagaagacggcgacaaggacaagaagaccaagattgtcatccccaaccctgagtacaagacatggtttgttcaggaccagcaagtgctcggattcatcttctcctctctatcaagggaggtgctgcaacaagtggccggcgctaggacggcggcccaggcatggaacatgattgatgacatgttctcgtgcaagtcgaaggcgggtacaatcaatgtactcctcgccttaaccaccacacagaagggacctatgtctatcagcgaatatattgcgaagatgaggtccctcgccgacgagatggcggctgcagggaagccgctggatgaggaggagctggtggcgtacatcatcaacgggctggattcagaattcgacgccgcggttgaaggaccgatggccacggcaaggattgctccagtttcaatttctcatgtttattcacagctcttgagttatgaaaacaggattcggattcggcaagcttatctcaccacttcggcaaatgcggcaaaccgaggtggtggtcgtggtggacgcggcagcagcactggaaacagaggtggcggacgcggcggcttcggtcgtggcggtcacggccgcggcgcccctagcggcgcaagtcagggacgcgggcgaggcaatgatactcgccccgtgtgccaagtgtgtcacaagcgagggcatgttgcaagcgactgctggcatcgttatgatgactcatatgttcctgatgagaagcttggcggtgctgcaacatacgcctacggtgttgataccaactggtatgttgacactggggcgacgaatcacattaccgggcagctagacaaattgacaaccaaggagagatacaagggaacagatcaaattcacactgcaagtggcgaaggtatgagtattaaacatgttggtcatgctattgttcctactcctagtcgccccttgcatcttaaaaatgttttacatgttcctgaagcggcgaaaaatctagtatctgttcataaacttgttgcagataattatgcttttcttgaaattcatggcaaatattttttgattaaggacaaggccacgaggaggacaattcttgaaggtccctgtcgacgaggcctgtacccacttccagccagattgtctttgagacaggccttcgttgcgacgccatcttttgagaggtggcatgggcgtcttggtcatctctccaagccaattgttcttagaattctcagtcaaaataaattgccttgtcttagtaattctgtcaatgagtctgtgtgtgatgcctgtcaacaagcaaagtgtcatcaattaccttttcctagatcaactagcgtgtcaaataatcctttggaacttattcattccgatgtgtgggggcctgcctctgagtctgtaggtgcaaagaaatactatgttagtttcattgatgattatagtaaattcgtttggatctactttcttaagcataaatctgaggtgtttcagaagtttcatgaatttcagaaacttgttgaaaggcaatttgatcgcaaaattctttcgatgcaaactgattggggaggcgaatatcttaagctgcacactttctttaatgaaatagggatctcccatcatgtctcttgccctcacacacatcaacaaaatggagctgtagagcgcaaacatcgccacatagtagaagttggtctatctcttttagctcatgcctccatgcctttgaaattctgggatgaagcctttttagctactacttatttcattaatcgccttcctagtaaggtcataaaatttgatacaccccttgaacgaatctcccagaaatgtgaattcagatataccgggggcatttggccgggtacatggagcaaatggcgacttggcgggagaatccgcctcagattcagcgtcggtccaggcgcagctgcagcggcaggcctccggatctgcgacgcagggggagtcggagcagcagcgctcgggcatccaaccagcgcgcgcgccacgtcgcctgctgcatcgcctactgctgctcctccatcgcctgcccgtgctgtcgcgtcttcgtcaggtggtgcgcagcagtcacatcagccaggatcatctgcgccgtctgagtctgcacagctatctgaggtaatgcgacctaaaacaaggttacaaagtggtattagaaaagagaaaatatacactgatgggacagttagatacagttgttttacatcttctggagaaccacaaactttgcatgaggctttaggtgataaaaattggaaagaagcaatggatagtgaatatcaagctcttatgaaaaacaaaacctggcacctagttccttctaagaaagggcagaatataatagattgtaagtgggtctataaggtcaaacgaaaggccgatggcagtctagatcgatataaggctagacttgtggcaaaggggttcaaacagagatatggtatagattatgaggataccttcagtcctgtagttaaggctgctactatcagaactattttgtccatagcaatctctagaggttggacccttcgtcagctagatgtacagaatgcctttcttcatggggttctagaggaagatgtctttatgaggcagccaccaggttatgaacagaaagatggctatgtgtgcaaactagataaggccttatatggtttaaagcaggctcccagggcatggtattccaggttaagtactaagctgcatgagttaggttttaaatcatctaagtcagatacatctttgttcttttacagtaagggagatgttactatgtttatgttggtatatgtggatgacattatagtagccagctcatctattgatgccactaatgctttgcttaagaatcttaatcaagaatttgcactcaaggatctaggaagactgcattacttcctaggcattgaagttaaagaagtaaatgatggcatagttttgacacaagagaaatatgctatggatgtgttaaagagagtgaatatgagtgactgtaaagcagtcaatactcctttgtctatttcagaaaaattaagtgctcatgaaggtaatcctcttggaccagaagacagtaccaggtacagaagtctggttggagcattgcagtatttgactctgactagaccagatttatcattttcagtaaataaggtgtgccagtatttgcatgcaccaaccactaagcattgggcggcggctaagaggattttgagatatttgaaacatacagttaagcttgggctaaaaattagcaagtctaattctcttcttgtaagtgctttctctgatgcagattgggcaggatgtttggatgatcggcgttctactgggggttttgctgtttttatagggcctaatcttgtgtcctggagtgcacgtaagcaagctactgtatccagatctattacagaagcagaatataaggctttggctaatgctactgcagagattatgtggatacaaaccttacttcatgaactgggaattcaggtacccaaaattgctaaggtatggtgtgataatattggtgcaaagtatatgacagctaatcctgtttttcatgctcgcaccaagcatatcgaggtagattatcactttgttcgtgagcgggttgcaagaaaacttttacaagtggaatatatatctaccaaagatcaagttgctgatggcttcaccaagacactgtcagtcagacagttagagatgtttagaaacaatctaaaccttacaggttcagattga

SEQ ID NO: 14726 - DNA, 3096 bp, Oryza sativa
  Clone ID: TFbOSC400622j.C1.o17.fg
atggcgagcttttctatggcggcggcaatctccaaccctctgtttggcctccaaatctcggagaagctaaccaaacagaatcatcctctctgggctgcacagatcctcaccaccttgcgaggtgcgcagctggaggagcacatcgtcagcacgaccgcagctccggcggctgaaattgaaaaagaagacggcgacaaggacaagaagaccaagattgtcatccccaaccctgagtacaagacatggtttgttcaggaccagcaagtgctcggattcatcttctcctctctatcaagggaggtgctgcaacaagtggccggcgctaggacggcggcccaggcatggaacatgattgatgacatgttctcgtgcaagtcgaaggcgggtacaatcaatgtactcctcgccttaaccaccacacagaagggacctatgtctatcagcgaatatattgcgaagatgaggtccctcgccgacgagatggcggctacagggaagccgctggatgaggaggagctggtggcgtacatcatcaacgggctggattcagaattcgacgccgcggttgaaggactgatggccacggcaaggattgctccagtttcaatttctcatgtttattcacagctcttgagttatgaaaacaggattcggattcggcaagcttatctcaccacttcggcaaatgcggcaaaccgaggtggtggtcgtggtggacgcggcagcagcactggaaacagaggtggcagacgcggcggcttcggtcgtggcggtcgcggccgcggcgcccctagcggcgcaagtcagggacgcgggcgaggcaatgatactcgccccgtgtgccaagtgtgtcacaagcgagggcatgttgcaagcgactgctggcatcgttatgatgactcatatgttcctgatgagaagcttggcggtgctgcaacatacgcctacggtgttgataccaactggtatgttgacactggggcgacggatcacattaccgggcagctagacaaattgacaaccaaggagagatacaagggaacagatcaaattcacactgcaagtggcgaaggtatgagtattaaacatgttggtcatgctattgttcctactcctagtcgccccttgcatcttaaaaatgttttacatgttcctgaagcggcgaaaaatctagtatctgttcataaacttgttgcagataattatgcttttcttgaaattcatggcaaatattttttgattaaggacaaggccacgaggaggacaattcttgaaggtccctgtcgacgaggcctgtacccacttccagccagattgtctttgagacaggccttcgttgcgacgccatcttttgagagaatctcccagaaatgtgaattcagatataccgggggcatttggccgggtggtgcgcagcagtcacatcagccaggatcatctgcgccgtctgagtctgcacagctatctgaggtaatgcgacctaaaacaaggttacaaagtggtattagaaaagagaaaatatacactgatgggacagttagatacagttgttttacatcttctggagaaccacaaactttgcatgaggctttaggtgataaaaattggaaagaagcaatggatagtgaatatcaggctcttatgaaaaacaaaacctggcaccgagttccttctaagaaagggcagaatataatagattgtaagtgggtctataaggtcaaacgaaaggccgatggcagtctagatcgatataaggctagacttgtggcaaaggggttcaaacagagatatggtatagattatgaggacaccttccgtcctgtagttaaggctgctactatcagaactattttgtccatagcaatctctagaggttggacccttcgtcagctagatgtacagaatgcctttcttcatggggttctagaggaagatgtctttatgaggcagccaccaggttatgaacagaaagatggctatgtgtgcaaactagataaggccttatatggtttaaagcaggctcccagggcatggtattccaggttaagtactaagctgcatgagttaggttttaaatcatctaagtcagatacatctttgttcttttacagtaagggagatgttactatatttatgttggtatatgtggatgacattatagtagccagctcatctattgttgccactaatgctttgcttaagaatcttaatcaagaatttgcactcaaggatctaggaagactgcattacttcctaggcattgaagtgaaagaagtaaatgatggcatagttttgacacaagagaaatatgctatggatgtgttaaagagagtgaatatgagtgactgtaaagcagtcaatactcctttgtctatttcagaaaaattaagtgctcatgaaggtaatcctcttggaccagaagacagtaccaggtacagaagtctggttggagcattgcagtatttgactctgactagaccagatttatcattttcagtaaataaggtgtgccagtatttgcatgcagcaaccactaagcattgggtggcggctaagaggattttgagatatttgaaacatacagttaagcttgggctaaaaattagcaagtctaattctcttcttgtaagtgctttctctgatgcagattgggcaggatgtttggatgatcggcgttctactgggggttttgctgtttttatagggcctaatcttgtgtcatggagtgcacgtaagcaggctactgtatccagatctagtacagaagcagaatataaggctttggctaatgctactgcagagattatgtggatacaaaccttacttcatgaactgggaattcaggtacccaaaattgctaaggtatggtgtgataatattggtgcaaagtatatgacagctaatcctgtttttcatgctcgcaccaagcatatcgaggtagattatcactttgttcgtgagcgggttgcaagaaaacttttacaagtggaatatatatctaccaaagatcaagttgctgatggcttcaccaagacactgtcagtcagacagttagagatgtttagaaacaatctaaaccttacaggttcagattga

SEQ ID NO: 14727 - DNA, 1501 bp, Oryza sativa
  Clone ID: TFbOSC401245j.C1.o3.gm
aggtggcggacgcggcggcttcggtcgtggcggtcacggccgtggcgcccctagcggcgcaagtcagggacgcgggcgaggcaatgatactcgccccgtgtgccaagtgtgtcacaagcgagggcatgttgcaagcgactgctggcatcgttatgatgactcatatgttcctgatgagaagcttggcggtgctgcaacatacgcctacggtgttgataccaactggtatgttgatactggggcgacggatcacattaccgggcagctagacaaattgacaaccaaggagagatacaagggaacagatcaaattcacactgcaagtggcgaaggtacgagtattaaacatgttggtcatgctattgttcctactcctagtcaccccttgcatcttaaaaatgttttacatgttcctgaagcggcgaaaaatctagtatctgttcataaacttgttgcagataattatgcttttcttgaaattcatggcaaatattttttgattaaggacaaggccacgaggaggacaattcttgaaggtccctgtcgacgaggcctgtacccacttccagccagatcgtctttgagacaggccttcgttgcgacgccatcttttgtgagggtatatgtatctcgtgatgtcacctttgatgaacaagtgtttccctttgctaatcttcatccaaatgctggcgcccgtcttcgagctgaaatttctttgcttcctcctactctaatcaatgagaaaacatctgatcaagggggagaggaacatcatgatcatctgtttaatatctctatgccaaatgctactgatatttcatgtgcagaatctcccagaaatgtgaattcagatataccgggggcatttggccgggtacatggagcaaatggcgacttggcgggagaatccgcctcagattcagcgtcggtccaggcgcagctgcagcggcaggcctccggatctgcgacgcagggggagtcggagcagcagcgctcgggcatccaaccagcgcgcgccacgtcgcctgctgcatcgcctactgctgctcctccatcgcctgcccgtgctgtcgcgtcttcgtcaggtggtgcgcagcagtcacatcagccaggatcatctgcgccgtctgagtctgcacagctatctgagaatgccttccttcatggggttctagaggaagatgtctttatgaggcagccaccaggttatgaacagaaagatggctatgtgtgcaaactagataaggccttatatggtttaaagcaggctcccagggcatgtaagggagatgttgctatgtttatgttggtatatgtggatgacattatagtagccagctcatctattgatgccactaatgctttgcttaagaatcttaatcaagaatttgcactcaaggatctaggaagactgcattacttcctaggcattgaagtgaaagaaattgggcaggatgtttggatgatcggcattctactgggggttttgctgtttttatag

SEQ ID NO: 14728 - DNA, 2964 bp, Oryza sativa
  Clone ID: TFbOSC403212j.C1.o1.fg
atggcgagctcttctatggcggcggcaatccccaaccctctgtttggcctccaaatctcggagaagctaaccaaacagaatcatcctctctgggctgcacagatcctcaccaccttgcgaggtgcgcagctggaggagcacatcgtcagcacgaccgcagctccggcggctgaaattgaaaaagaagacggcgacaaggacaagaagaccaagattgtcatccccaaccctgagtacaagacatggtttgttcaggaccagcaagtgctcggattcatcttctcctctctatcaagggaggtgctgcaacaagtggccggcgctaggacggcggcccaggcatggaacatgattgatgacatgttctcgtgcaagtcgaaggcgggtacaatcaatgtactcctcgccttaaccaccacacaaaagggacctatgtctatcagcgaatatatcgcgaagatgaggtccctcgccgacgaaatggcggctgcagggaagccgctggatgaggaggagctggtggcgtacatcatcaacgggctggattcagaattcgacgccgcggttgaaggactgatggccacggcaaggattgctccagtttcaatttctcatgtttattcacagctcttgagttatgaaaacaggattcggattcggcaagcttatctcaccacttcggcaaatgcggcaaaccgaggtggtggtcgtggtggacgcggcagcagcactggaaacagaggtggcggacgcggcggcttcggtcgtggcggtcgcggccgtggcgcccctagcggcgcaagtcagggacgcgggcgaggcaatgatactcgccccgtgtgccaagtgtgtcacaagcgagggcatgttgcaagcgactgctggcatcgttatgatgactcatatgttcctgatgagaagcttggcggtgctgcaacatacgctacgctagacaaattgacaaccaaggagagatacaagggaacagatcaaattcacactgcaagtggcgaaggtatgagtattaaacatgttggtcatgctattgttcctactcctagtcgccccttgcatcttaaaaatgttttacatgttcctgaagcggcgaaaaatctagtatctgttcataaacttgttgcagataattatgcttttcttgaaattcatggcaaatattttttgattaaggacaaggccacgaggaggacaattcttgaaggtccctgtcgacgaggcctgtacccacttccagccagatcgtctttgagacaggccttcgttgcgacgccatcttttgtgaggtggcatgggcgtcttggtcatccctccaagccaattgttcttagaattctcagtcaaaataaattgccttgtcttagtaattctgtcaatgagtctgtgtgtgatgcctgtcaacaagcaaagtgtcatcaattaccttttcctagatcaactagtgtgtcaaataatcctttggaacttatccattccgatgtgtgggggcctgcctctgagtctgtaggtgcaaagaaatactatgtcagtttcattgatgattatagtaaattcgtttggatctactttcttaagcataaatctgaggtgtttcagaagtttcatgaatttcagaaacttgttgaatggcaatttgatcgcaaaattctttcgatgcaaactgattggggaggcgaatatcttaagctgcacactttctttaatgaaatagggatctcccatcatgtctcttgccctcacacacatcaacaaaatggagctgtagagcgcaaacatcgccacatagtagaagttggtctatctcttttagctcatgcctccatgcctttgaaattctgggatgaagactttttagctgctacttatctcattaatcgccttcctaatataccgggggcatttggcccggtacatggagcaaatggcgacttggcgggagaatccgcctcagattcatcgtcggtccaggcgcagctgcagcggcaggcctccggatctgcgacgcagggggagtcggagcagcagcgctcgggcatccaaccagcgcgcgccacgttgcctgctgcatcgcctactgctgctcctccatcgcctgcccgtgctgttgcgtcttcgtcaggtggtgcgcagcagtcacatcagccaggatcgtctgcgccgtctgagtctgcacagctatctgaggtaatgcgacctaaaacaaggttacaaagtggtattagaaaagagaaaatatacactgatgggacagttagatacagttgttttacatcttctggagaaccacaaactttgcatgaggctttaggtgataaaaattggaaagaagcaatggatagtgaatatcaggctcttatgaaaaacaaaacctggcacctagttccttctaagaaagggcagaatataatagattgtaagtgggtctataaggtcaaacaaaaggccgatggcagtctagatcgatataaggctagacttgtggcaaaggggttcaaacagagatatggtatagattatgaggacaccttcagtcctgtagttaaggctgctactatcagaactattttgtccatagcaatctctagaggttggacccttcgtcagctagatgtacagaatgccttccttcatggggttctagaggaagatgtctttatgaggcagccaccaggttatgaacagaaagatggctatgtgtgcaaactagataaggccttatatggtttaaagcaggctcccagggcatggtattccaggttaagtactaagctgcatgagttaggttttaaatcatctaagtcagatacatctttgttcttttacaaaaaattaagtgctcatgaaggtaatcctcttggaccagaagacagtaccaggtacagaagtctggttggagcattgcagtatttgactctgactagaccagatttatcattttcagtaaataag

SEQ ID NO: 14729 - DNA, 2775 bp, Oryza sativa
  Clone ID: TFbOSC416267j.C1.o3.np
atggcgagttcttcctcagcggtggtgatctccaacccattgttcgggatccaaatcttggagaaattcaccaagcaaaatcactccctctggtctgcacaaatccttaccaccctacggggtgcgcagctagaagggtacatcaccggcacagctgaagctccggcggccgagtgtgagaaagaagatggcgacaagaaagtcaagaccaccatctccaatccagaatacatcaagtggttcacccaggaccaacaggtgctggggttcctcttctcctccctgtcacgggaggtcctgcagcaggtggctggcgcaaagacggcggcccaagcatggagcatgatcaacgacatgttcacctgcaagtccaaagctggtgccatcaacgttctccttgcactaacgacaactcagaagggacccatttccatctccgagtacatcgccaagatgcgatctcttggcgacgagatggcgggtgcagggaagcctcttgacgatgaagagctgatagcgtacatcatcaacggcctcaactccgacttcgacgcaacagttgaaggattgatggcaacagcaagaatcgcacccctttcaatttctcatgtgtattctcaactcttgagttatgaaaacaggattcggattcgtcaagcctacctcaccacgtcggcgaacgctgcaaatcgcggtggtcgtggtggccgtggtggaaatcgtggcgggcgcagcagcgcacctcacggcggccgtggtggtggccgtgggaacacaggcggtgccaatcctgggcgagggcgtggcaatgacactcgcccggtgtgccaagtctgtcacaaaagaggtcatgttgcaagtgactgctggcatcgctacgatgagaactacggccccgacgagaagctgggtggtgcggccacatatgcctatggtgtcgacacaaactggtatgttgacactagggcaacagatcacatcacagggcagctggacaagctgaccacaagggagaagtacaaaggaacagatctgatccacacggtcagtggcgaaggggcaaagaaatattatgtcagttttattgatgattacaacaaatttgtttggatctatttccttaagcacaaatatgaggttttccagaaatttcataagtttcaaaaactttttgaaagacaatttgataggaaaattcttgctatgcaaaccgattggggaggtgaatatgtcaacaatctccacaaggggttcaagtgcctagatgtgtcttccggcagggtgtatgtttctcatgatgtcacgttcgatgaacaagtttttccctttgcaacacttcatccaaatgccggtgcccgtcttagagctgaaatctccttgcttccttctaatcttatgaataacacattggatcaagggggagaggaacagtatgatcaaatgtttaatattcatgtaccaaatgctactgatgatgcttgtatagctgtagaatcttatgataggaacagcgcagaaaactgcaatggaaatgaaagatcaggcgagtgtggctgctacgcacagccgggtgcacggagcgccggcggtttcggcgggagaatccccctcggcaggggactagcagcagcgctctcctgcgcgtccgacgcgttcgccgatgggaggccagtcagaagctggcacgtcgcctgccgtcaactctccccgctagcccagcagcatcatcacgtgcccagagcaggacgtgcagcagtcccatccacctggatcatctgtgcaaatggaggccgcacaacaggatatagttgctttacatcttctggggaaccacaaactttggatgaggctctaggggataaacattggaaagaggcaatggatagtgaatatcatgctgttatgaaaaataaaacttggcatctagtacctcccaagagaggtttaaatgtgatagattgtaagtgggtatataaaattaagaggaaagctgatggcagtctagacagatataaggctagacttgtagcaaaagggttcaaacaaagatatggtatagactatgaagatacctttagtcctatagtcaaggctgctactatcaggaccatactgtctatagctgtctctagaggatggacactgcgtcagctagatgtgcagaatgctttctttcatggaattttagaagaggaattttacatgaggcaactacctggttatgaacaagatgatattataatagctagctcatctaacagtgccactgacaccttgttgaagaatcttaatcaagagtttgcactgaaggatctaggtgagttacattacttcctaggaattgagttaagtgctcatgaagggacacctcttggaccagtggatagtacaaggtatagaaaccttgttggtgctttgcaatatctgactctgactagaccggatctatctttttcagtgaacaaagtatgtcagtatttgcatgctccaacaacagaacattgggctgttgccaagaggattctgagatatctaaagcatacagttaagcttggtttaaagattagtaaatctaactccttgcttgttagtgcgttttctgatgcagattgggcaggatgtttggatgacaggctatcaactggaggctttgctgtgtttataggacccaatcttgtgtcatggagtgcacgtaagcaagctactgtgtctagttcaagtacagaagcagaatataaggcattggctaatgcaactgctaagattatgtggata

SEQ ID NO: 14730 - DNA, 3024 bp, Oryza sativa
  Clone ID: TFbOSC900055j.C1.o8.gm
atgcacataccagcgggtgttgtagctctaaagaagagagaatttagagcactcaaccagggatctcgttcggtcaccgagtacctccatgatttcaaccgtttagctcgttatgctccggaagatgttcgcactgatgaagagcgtcaggagaagttcttggagggactgaatgatgagttgtcttatgccttgatgtctacggatttccgggatttccagcagttggtggacaaggcgattcgccaggaagacaagtataaccggatggagcagaagaagcgcagggctgcccaattcaaggcacaacagggcagtaaccagaggctgcgtctcgttgtgggacctcaagctccaccgtaccctcaaggaggatcttcatcagttgtccgcccccaacgccagttctacaacaacaatactggtaatcgtggcaatgacaaccgcaacatggttgctcgtcatgtagcaactccagttcagaaccagcccgtcaggaaggaacagggaagcaagccaggggtgtgcctcaattgtggtgatccaggacattatgatgataagtgtcctaagcctcggcgcgtgaagaacgttccagccccgaacaactccaatgctccagcaccaaaggcacgtgttaatcatgttgcagcagcagaagctcagagtgcaccagatgtggttttggctaatgagttagctgaggtgaagagacaggtggatgatttgcttcagaaaggatacatcagaccctgtacttcgccatggggagcaccagtcatctttgtggagaagaaagatcatactcagagaatgtgcgtggattatcgagcgttgaatgaggtcactatcaagaataagtatcctctacccagaattgatgacctgtttgatcaattggaaggtgctacagttttctccaagatagatctccgttctggatatcatcaacttcgaatccgtgaggaagatataccaaagaccgccttcacaactcggtatggtttgttcgaatgtaccgttatgtcatttggacttactaatgccccagcctttttcatgaatctgatgaacaaggtgtttatggaatatctggataagtttgtcgtggtgtttattgatgacattcttatttactccaagacgaaggaagaacatgaagagcatcttcgtctagctttagagaaactacgtgagcatcagctttatgccaagttcagtaaatgtgaattttggttgtccgaagtgaagtttcttggtcatgtcatctcgtctggaggagtggcagtagatccaagcaatgtggagtcagtgttaagttggaagcaacccaagacggtttcagaaattcgtagtttccttggacttgcagggtattaccgcaggtttattgagaacttttcaaagatcgccagaccaatgactcgtctgcttcagaaggaagtgaagtacaagtggacggaggattattatgatatggagatccactatcacccggggaaagcaaatgttgtagccgatgctcttagaaggaaaagctactgtaatatgtcagaaggtcgacgtttaccttgggagttatgccaagaatttgaaaaattgaacttgggaatagtcagcaatggttttgtggccgctttagaagctaaacctactctgtttgatcaagtcagagaagctcaagtgaatgatcctgacatactagaaatcaaaaagaacatgagaagaggaaaagccatcggttttgtagaagatgagcaaggaactgtgtggttaggagaaagaatttgtgtcccagataataaggagttgaaggatactatcatgaaagaagctcatgaaactttgtattccattcaccctggaagcactaagatgtaccaagacttaaagcaacaattctggtgggctagtatgcgacgtgagatagcagaatatgtggctctatgtgatgtatgtcagcgggtcaaggcggaacaccagaagccagccggtctgttacaaccattgaagattccagagtggaagtgggaagaaataggaatggattttataaccggtctacccagaacgtcggcaggacatgattctatttggatagtggttgataggttgacaaaagtcgctcatttcataccggtcaaaacaacctacacggggaataagcttgcagagttatacatggccagagtgttgaagaaatgtttacgtgtacctacggaggaagcagatcctgatcgtatagagcttcaagaagatttaacttatgctgagaagccagtcagaatcttggaagtgcgcacggaggtgaggaagctcggccgcatctccttcgtcgccgccggtcgccgtagctcgctgccgacggtgtcctccaatcacccggccgaccgccctagctccggcgaggtcgccaacccgagtcggccggtcatggatgacgtcatgctgacccgcgctgccgtgcctgtgccgctgctgccgctgccatgtgctgtgcttgctgctccgccactgcaccgctgctcgctgcgccgctactgccactgctgtgccgctgcattgccgcgccggctgccgccttgctgtgctggccgtttcgccttgcctcgccacgccaccacgccgcttagccgctgtgctgtgcgctgccttgtcgcaccactgctgcacgctgccgccatgtcgcgcaccaccatcgcattgtcgccactgccgccgtgccgctgtgtctctccctgccacagccatgccgctgctgcagtgtgtcgccgctccgccaccacgccgcttgccgccaagcgcaaccgcgccgctgccctagcatcgccactgccgtgccgcaccaccaagctgtgccgtcacttggccgagccgtgctgcagcctggcactacttgccggctcagccgagccattgctaccgctcggtagtcgccttgccgagtcgcggttgagtcgctgccgctgccgcgtgtcgaaacatgatttcggcaatataaaaggggtagcgcacaagacctaa

SEQ ID NO: 14731 - DNA, 4020 bp, Oryza sativa
  Clone ID: TFbOSC401126j.C1.o15.fg
atggcatcgaaggagaatagatccgaggctatggtttcgggggctgacgggataaaccaaggcgaaaacttggatccaattggtgagggcttggatgatcatcatggcaacctagatcagggtttgtcgagcgccatggtgcttttcaaaaagaagctaactgatggtgaagaggaagatgacgatgtcttggatgtggaccttggtgaagaggtggaggagatgaaatctaagtggctgatcattgctcgcttctactcaggacaaagagaaagactcggttctttgggggataatagattcttggttgagtttgcttgcgaagctgactacaaccgagttgtgtatgggggcccttggaaacataagggtgatgctcttcttgttgtcccgtatgatggccttgctagaccttctgaaatctgtattgaatcgctccctctgtggttacggatatacgatcttcctgagattatgatgactactggtttcgctaggagtttgggtggaaagatcggggaggtactggaggtaggaggagctatacacgacttcctgcgggttaaagttgcttttccgctatcctctcctttaaaacctctgttgaggatttggattaaggataaaggtgttatgtcttttccagtgaagtatgaaaatgtgccttttttctgtttctcgtgtggacgaattggtcatgcagagcgggaatgcccggaggtgggatcgtctagcgctcaggtgcgctttgggaaggagcttcgagcttcaccgttaaagaggaaacttcagagttttgctccctcttcaatctctaccccaaaagctgccaaggtgctgaattttagtggtgcccaacgggagaaggttcttactgcctctagttcttctaaagcttctgtgcttagtaatccaaagttgaacagcggtggcgcgactatgttcttggttggggagaaagcggatcaggaagagaaggcggccagtgttgaggcagaagcctcgttgtatccattgccgaagggaatcaccgcagctctagaggaaggtgtctctcagatgaagatgcagttagacgatggtgagctgaacttggcagctcgggggccatgcagtagagagcgagtgtccatgagttcagattatgggctgtcgggggaggaaacaccgcaacatagtgccgggattgtctctggtgtggtgaaccaagatgtaaagtcccctggcgggcaatccaaaaagaagcaatgggtgccaactagggagactgatcgtgcagttaaagctaagagcctatccataggcagggatattggcaaaccaaggaagataactgtcagattatcagcagatgcagtagaagcaaggaactgtatgcagattcgggaacagctaccctggtgggcgctcacggcgagccccaccaggaacaatgaatgctctagcctggaactggtccgtcttgtgcggatgtacagcccgaggctggtgtttctctcagcaaccagacaagatcaggagagagttcagggtctcagatggaggctaggtttgaagaattgcctggccttgaaaggagaaggatcaggtggtggagtggcacttatctgggatgaaactttatctgttcatcttttgtctatgagctgcaggtccgaccactgtcctatactgcttcgggtggagagagagaaataccgacctgtcaaatgtttccgctatgaaatcatgtgggaacgagaggattctttgggggaggctattaagctggcctgggagcaggaaggtaccgctttgaatcttggggagtggagtgtcagggtttttggttctgtgtcgcaggagataaaggagatcaaagctaaggtggaggaactatcaagtttggatccaattaaccatgacggtgagattaggaagttgtatgcccgcttagatgagctgttgtatagggaagaaatgatgtggctccaacgatcgcgggtgtcttggttaaaggagggagaccgcaacacaaagttttttcaccgccaggcagcttggagagcgaagaagaataagatcaattgtcttaaagatgaggatagtagatatgtcgagaacaaaggagatatggaaaagttaacgagggatttctttcaaaagttatatgcaagagatgagggagtggatcctggtgagttagtggacttgtttgatgtccgggttgatgcaactgaaggcctctcgacgattctgaaccatgaagtggttgctgggcgacttgaggaactgaaagtttgtcgaagggcgccgggggtttcccatttactctttgctgatgatagcctgttgtttgtcaaagcatgcccgcagcaggttgaatctgctaccttcgagagtaattatttgggtctccctactctagaggggagaatgacggcagacaaatttaaaacaatcaaggaacgcttgatcaaaagactgaatagctgggcagaaaagttcatgtcgtcgggagcgaaggatattcttatcaagttcgtggcgcaggcaatacctacctatgtgatgggggttttcaaactttcggtgtcatcctgcgaagcttacactaaactggtgagagacttttggtggggtgacgaggaggataagaggaaggtacattggacagcctgggataatttggttctccctaagtgcatgggtggactcggatttagagatgtcagaattttcaatcaggcgctactggggagacaagcctggagattaattcagttcccggagagtctatgtgctcgcattctaaaggccaaatactttccaaactgcgatctgattgatgcagtgttcccagctgatacatcgcagacatggaaaggaattgaacatggaccgcaacttttaaaggaaggactgatctggcgcattgctgatggcaagagggtcaaattctggaaggaccgttggatcccaagggagtcctcttttagggtgtcaggtatgaaaagtcgatgtcggctccgatgggcatcacaattcatcatccctgaggggaattgttgggacgaacagctaatcaggcgggtctgtcatccttttgatgccgatgaaatgttaaagattaagttgccccaatttcctactgatgattttctggcatggcactttgagaagtatggaatgtacacagttaggagtggataccgtgctgctctgatgaagcaaatcaatacggactgtgtctcttttagctcggctaactctgactggcttctgattctgcttgatagactaagccctgaagagcgagcaaagctcctccttgtcctgtggagctcctggttcttaaggaatgacagcttgtttggttcaggttcatcgactgtccatggctctgtcttgttcttgcagagcctgtgggaatccattagtaccacaaaggtcaatcctgttactgatataaaagggaaaggcccccagatgggtactaaatctgctactacggttgcccggagtagtcccagtgatttggtgcgctgggaagcaccgccgcaaggatgggctaaaattaatgttgatggagctttcgtgcagcaaatcggagaagcaggtactggaattgtcatccgtgatcatgtgggtgatgtcctcctgacttcatggaatgggatccgaagctgtcagtcgcctgaggaagctgaagctcaagcgtgcagggatgggctacggctagcagcagactggattcagatgccggtgatcctagaatcagattgtgcgaatgtggtggctagccttacgtcgggagctaagaacagatcgcctttgtggcaggtcttccaggaaatcaagtcgattcttccacttcttcctgcttttaagtttaataggattaataggggagctaacgaagttgctcattgccttagccagttggctaggcgcctgaagcaatcttcggtgtggcgtatctgtgcgcctgagtgtgttaaggagagcttagccaaagactgtatccctcctaatctttaa

SEQ ID NO: 14732 - DNA, 4182 bp, Oryza sativa
  Clone ID: TFbOSC401339j.C1.o46.fg
atggccggcacttcttcatcctccaacacctcaaccggtggctactccttgatgggttgcattaaagatattccgaccctaaaaggagataactacgcagaatggaaaagaaaactcgaccttgcttttatcttaggagaggtggactgggtgttgactaccccatgtcctatagaacctgctgaacttgtcagaggtgaaaatgagtcagatgctgactggcaaaagagacagagggacaatgctcctctcgtcatgtcgtatgacattgaacaaaagaaatggtccttagccaacaagaaatgtttggctgtggtaaagaatacgattgagcctaccatattgggctcgatcccagagtgtgacgctgtctcagagtaccttgaaagaataaagagtcagtttactggctcttcaaagacttatgctacacagctgatcaagcagcttgtgacagaaaggtaccatggaggtggtgttagagaccacatacttagaatgagcaacatggcttccaagttgaagccaatggatttgggcataacagatgactttctggtccatctggttatggcctcattgccaaagcagtttgacaattttattgtcaactacaacataagtccagagaaatggaactttgagaagctcattgctaattgtgtgcaagaggaggagagaatcaaagaatcaaatggtggttcaataaactatgttaaagataagaaaaagaaccacaagtctcccacctcaaaaggtaaacagtctcagcatctgcctcagcaacaacagttcgctgttgagaaagatcaatgtctccactgcaagaagacaggacactacaagaaagattgttctgactttttgaaaatgatcatggcaatgaaaggtgagaacattattacatttgtaaatgaatctcattatgttggttactctagatccacatggtggattgattctggagcaactattcatgcttgtaattgtttaaaggcattccgttcgacgaggactacgcaaagaagagaaagcaccattagagttgccaatggagttgaagaaaaagttgaagctgttggagatcttcctctagagctcgcgaatggcttcatacttttacttcgagatgtcttttatgttccttctttgcaaagaaacttaataagtgtatcaaagttggattttgatggatatgattgccgctttggaagtggcaaatgtgaactatggcataataatgcatgtattggtcttgctgtgttgcgagacgagctttatttgttatctctttctgagaatgtgaatgttgtgtcctcgttgacaaaagaaaacaagaaaagaaagcgaactcccgatgtctcatcgaaattatggcactgtcgtttgggccatatttcgagggggagaattgagagactagttaagaatgaaattcttcctccattggagttctcagacttagaacaatgcatagaatgcattaaaggaaaatttgtaaagagcatcaaaaagggtgcaaaacgaagcgcaggaattttagagatcattcatacagatatttgtggtccatttcctgtgaaaagtgtggatggctatgactcgttcataacattcacagatgattactcccgctatggttatatttatccaattaaagagcgatcagaagcactggataaatttaagatattcaaagctgaagttgaaaatcagcatgatataaagattaaagtagtaagatctgaccgtgggggggagtactatggtcgacatacgccttatgggcaagtccctggaccttttgcaaggttcttgctagagaatggaatagtagcccagtattcaacaccgggcgaacctcaacagaatggggtagctgaaaggcgcaaccgtacccttatggatatggtgcgcagcatgatgagctactccacactaccactcggtttatggatggaggcattaaaaaccgccattcatattctcaacagagttccaagcaaatcggtgcccaaaacaccgtatgagctatggacaggaagagtaccctcgctaactcacctccgtgtgtgggggagtcctacagaggccaaagtatttaacccaaatattgggaagttggaccccaaaacagtcagctgccattttattggctatcctgaaagatcaaaaggctatcgtttctactgtccaaacagttatacaaagtttgtagaaacgagacacgccgtcttcttggaagatgaaatgattagggggagctcggtagttcgagaaattgatcttgaggagaggcgggtgtctgtacccgctccgtcgactcaggaacctttcttctctctacctgctgatgttgtgcctgcaatgcctgtcattgaggtaccagcacctgttgttacccctcctgtggcaacaatgaatgagagtgaggaacctgttatacaggattcaacagaaatggttgccacaccagaggaggagctacaacagcctcaaatagataatgtgccagtacaggagactcatcaagagcctcaggtacaggatgtgccaaatgtgcaggcccctagaaggtctgaaagagtcagaagatcggctatccgtgatgactataaagtttataatatagaagagtcgcatatggaggatgatcccacctcatatgaagaggccatgagaagcgctcgctcatctgaatggttggaagccatgaaagatgaaatgaaatcaatgaaactaaacgatgtttgggatttagaagaaattcctaaaggagccaaaacagtaggctgtaaatgggtctacaaaaccaaatatgactccagagggaatatagaaaagtttaaagcgcgacttgtggcaaaaggcttcacgcaacgagaagggattgattacaatgagacattttctccagtctcttgtaaagattccttcaggattataatggcactagtggcacattatgatttggaattacatcagatggatgtaaaaacggcatttctaaatggagatttggaggaaaaagtatacatggcgcaaccgaaaggttttgtcatgaaaggaaacgaaaatatgggatgtcgtctaaagagatccatttatggattaaagcaagcttcgagacagtggtacttgaagtttgatgggacaataaagaaatttgggtttcaagagaatgtcgaggacaactgtatttattcaaagtttaagaatgggagatttattttcctaattctgtatgtggatgacattctactggctagtagtgatgtcagtctactgcaggaaacaaagaaattcttgtcctcaaactttgacatgaaagacctcggtgaggcttcatatgttttgggcatagagattcaccgagatagaacaaaaaaggtgttgaagaaattcaacatgtacagatgcagtgctacacctgctcctataatgaaaggcgaaaagtatggggcatcgcaatgtcccagaaatcagtatgagctcaatgaaatgaaaacaaagccatatgcgtcagctgtaggaagcctacagtgcgcgcaagtgtgcacacgacctgacttggcatttgttaccgggttacttggcagatttcagagtaatccaggcctagagcactggaaattggtaaagaaagtcttgcgttatttgcaaggaacaaaaggcctcatgctgtcttacagaagatcagaatcactccagatagtggggtactcagattctgactttgcaaaagataatacaaagtcaacatcgggatacgtgtttaccctggcaggaggagctatttcatggaaaagctcaaaacagactatcactgcagggtctactatgtatgccgagtttatagcatgctatgaggcaacggggcaggtgaactggctaaagaagttcatacccggtttaaaggtggttgacagtattgagaaaccactaaagttatactgcgacaacgaacccgcagtaatgtacgctcacaacaatcagtcaagtggtgttgccaaacacattgacataaagtactatgttgtgaaggacaaagtccgggatcaaacaatcagtctcgagcacattaaaacagaaaggatgctcgcggatccgctcacgaaaggcctaccacccaacgtgttcaaggaacatgtagccggcatgggtttaagggaagccttatga

SEQ ID NO: 14733 - DNA, 2973 bp, Oryza sativa
  Clone ID: TFbOSC401835j.C1.o5.gm
atggtgaagacaaggaatggttctcgtgtctccaacgacgccagtggcagcgaagagcagatcagtggagcacgtgccagcgatgcatctaacagcagttcatctccaccgcccaagaacccaacgatcgctcagcagcagcagcagcagaacctgcgatttggtcctccacctccccagtccaaactgctagattttctccgtgtcaagccacccactttctcaagcaccaccaacccaatcgaggccaacgattggcttcatgctattgagaagaagctgaatcttttgcagtgcaacgaccaagagaaggttgctcttgctacacaccagctgcaaggtcctgcttttgtttggtgggacaactacatggtgaccggtccagctgggacagagagggagttccgttctctgcaacaaggaaccagaacagttatagagtatttgcatgagttcaaccgcctcgcgcgctacgcccctgaggacgtgcgcactgatgccgagaggctggagaagtttttgtctggtcttgatgatgaattgactaaccagttgatctcccgagattatgaggacttccagaagctggggaacagtcagaagtctcgcttcatgacgggacatcagggtggaccttccaccatgattatccggcagcaccgtccctaccacccggttcagccagctcagccaacgcagccagaacagcctaagaggtttggagaaaagcccgaactgtgcttcaattgtaacgagctcggacacatggttggttcatgcccgaagccaagacgttctggactcaagttcgttcaagcccgtgtcaatcatgcgtctgcagaggtggcgcagtcagcaccagaggttatattgggcacatttcccatcaactcgacaccggcagtaatattgtttgattctggtgtaactcattccttcatttccaagcgttttgctggtgcacatgggttatctttagtgaagcttaagataccaatgcgagtttatactcctagaggtggcatgaccagaactcactattgcccatccgtgatagttgaaatccaagggttgatttttccagccaacctcattcttctcgaatccaaggacttcgatgtcatacttggaatggattggttgacaaggcacataggagtgattgattgcgctagccgcaccatcaagttgaccaatgcgaaaggagaagtggtaaccttccagtctctagtaccgcagaagcaagggatcagtctgaaccagtctactggtgaagaacaagaagaagcagtggagaaaaccactaagaagttggaggatattcctatcgtcagagagtatccagaggtttttccagatgacctgacaaccattccaccaaaaagggatattgagttccgaattgacttggtacctagaactgcaccgatccacaagaggccgtacagaatgggagccaacgagttggcggatgtcaagaagcaagttgatgaacagttacaaaagggatacatctgtctgagcacgtcgccttggggtgctccggttatctttgtggagaagaaagacaaaaccaagaggatgtgcgttgactaccgcgcactcaatgaggtcactattaagaacaagtaccctttgccaaggatttatgatctgtttgatcagtttaaaggagctacggtgttctctaagatagacctgcgatcaggctatcaccagttgaggatccgtgaagaggatattccaaagacagcattcatcacttggtacgggttgttcaaatgcatagttatgtctttcggactcactaatgcacctgccttcttcatgaatttgatgaataaggtgtttattgaatttctggacaagtttgtcgtagttttcaccgatgacatacttatctactctaagtccgaggaagaacatgagcagcatcttcggctggtacttgaaaagttaaaggagcaccagctatatgccaagttcagcaagtgtgacttctggcttaagaaagttcagtttcttggtcatgtcgtaagtgctcaaggagtggctgtggatccagcaaatgtggagtcagttaccaagtggaccccaccgaggacagtctctcagattcggagtttcttaggacttgcgggctattacagccgattcattgagaacttctctaaaattgctatgccaatgacacagctcttgaagaaggaagaaaagtttatctggtctgctgaatgcaacaggagttttgaagaactcaaacgacggttggtatctgcacctgttttgattctgcctgatcagacgaaagatttccaggtttattgtgatgcatctcgccaggggctaggatgcaactacccgacccacgatctggaattggccgcagttgttcatgctttaaagatctggcggcactatctcatcggtaaccgttgtgaggattatgatatgggaatacactaccatcccggcaaggccaatgtggttgcagatgccttgagcaggaagagttactgcaacgtcgcatggatagaggaactatgttgtgagaagctcatcaaactcagtatgccattcatcctggcagtaccaaaatgtaccaagacctcaaacaaaagttctggtgggggtgaagttgcttaccagcttgagcttccctccagcatgcttggcatccataatgtgttccacgtttctcagttgaagaaatgtttgagagttcctgaggaacagacaagtccttattacatcgaaattcaggaagatctgacatatgtggagaagccgactcgtatcctcgaaaccagtgtgccccacctgttggtcgtctcctacctccggcagttagagccggagccccaaccgcccgcgccaccgcctttcccgcctatccgcgcccccactccgcccgcacctcgcgcccacgtcgccgctctttccccgcgtctactgccccccgcgcgcgcatga

SEQ ID NO: 14734 - DNA, 933 bp, Oryza sativa
  Clone ID: TFbOSC27006j.C1.o1.fg
atggctgacaagttttcaaccaaaccacatgttttcaatggtgtcgattttccttattgtgtcacatctaaaaatggcaatgagatctggaacgctttgcgtaattttcatcaacgtacttccaacattaaagaattacgtaaagatattttcaaaaaggattacataaaattagagaagaaatctgaagaagctttagatgattatcttgctagattcaataagattttgagtaatcttcgatctgtggattcttcttatgatgttaattactctcaatttgaagtttctcgccactttttgaatggacttgatatgtcaatttgggagatgaaagtaacttcgattcaagaatcagttgatatgttttgcttgactttggattctctttacacaaaactcaaaacccatgagatgaatattctttctcaaaaggttgattctaagtcaagtgctttggtttcttcattggatcttggtgcttcttcatcgaactctgtctctctttattccattaatgccttgtccgatgatcaactcgaatcattcgaggaggaggatttggctttggctattaacaagttgtctcgagctatgaacaatgttaggttgaagaaaagaggaggtcgaattcgatgttttgaatgtggggagcttgatcacattcgctcacattgtcccaagttggggagagacaagaaagatgacaatggagtcaagaccaaggacaacaagcccgttacaacattcaagggaagaagatccaaggaggctctcaagaaggtgctaaatcaagtctatgctgcttttgaaccggcaagcaatggtgatattaaaagtgatgaagataaggacaaggaagagtacatctctgatttttgcttcatggctcatggtgaatctgagtcagaaattgaagataatgagttttaa

SEQ ID NO: 14735 - DNA, 3856 bp, Oryza sativa
  Clone ID: TFbOSC400675j.C1.o35.np
atgccttggactggttgcatgccgttgggaaaaagttggacaccgtccaatgcaatgatgaggagaaagttatcttcacaacccatcaactgcaagggcccgcatcactatggtgggaccacttccaggctacgcagccagaaggacagccaatcacctgggcccgcttcaccgccgctttccgaaggacccatgtgccagctggagtcatggcccttaagaagagggaattttgggaattgaagcaaggcaaccgctctgttatggagcatttgcatgagttcaataacctggcccggtacgccccggaggatgttcgtgaagatgaagaaaagcaggaaaagtttctggcaggaatggaccctgaactttctgtgcgtctggtctctggggattaccctgatttccagcgcctggtggacaagagcatccgcctagaggccaagcacaaggaactggagtcacacaaacgtcgcttggcgaatttccgtaatcaacagggggctaaccaaaggatccgctacaccaatccctatccaaggggatcctcctcacagcagcagcagcagcaacctcaccccgcgccacgacctcaatttgtggtacgcgtcccatagtcgcagcaacagcagaatcagcaagggaaccgtgcaccccgtccccttgcaccggccgtgcagcctggtcaaggtcgcagggatgttcaaggtcagcagcgtctatgcttcaactgcttcgagcccaggcacttcgctgataaatgcccgaagccgaggagccagcaaggccaagcgcctccccgccctaacaacggtggtaaggatgccacccggggtcgtgtgaaccacatcactgcagagaatgtgctgacaactccagacgtcatcgttggtatgttcttcattcattccatccccgctaccattttgtttgactctggagcctcccactcgtttatatctgtgcaatttgtgggaagaaatcaactgggggtagaaaggctaggaactctctgctcatcaccacccctggaggggctatgacagcaaagtattatagcccggtcgtacctatagagatccagggaattccttttcccttggatctgatccttctagacaccaaggacttggatgtgatcctcaagatgaattggttgacccaattccaaggagtagtggattgtgcaagacgtactgtcaccgtgtaccagaagcctgatcaaccagttgttttctttgcgcacccgactcccaccggcagctcagtacttcatcaactaggactgtcagaaatacccgttgtcagtgagttcggtatgccgcccaagcgggagattgagttcaggatagatcttgctccaggaaccactcccctgtacaagcgaccctaccgtatggcagcaaatgaattggccaaagtcaagaagcagttggaagagttgaaagagaaggggtatatacggccgagcacttccccctggggtgctcccgtgacttttgtagaaaagaaagacaagacaaagaggatgtgcgttgactaccgagctctcaatgaagtcactatcaaaaacaagtaccctcttccccagatcgatgatctgttcgatcagcttaaaggtgccactgtcttttccaagattgatcttcgttccggatatcaccagttgcgtatccgcgaagaagatatccctaagaccgcattcaccacgcggtacgggctgtatgaattcacggtgatgtcgttcggtctgaccaacgctcctgccttcttcatgaatttaatgaacaaggtgttcatggaatacctggataagttcgttgtggtctttattgacgacatactggtctactcacagtcagaggaagaccatcagcagcatctccgtctggtgttgtaaaagctccgggaacattagttgtatgccaagctcagcaagtgtgaattctggttgtccgaagtcaagttcttagggcatgtgatatctgctaaaggagttgccgtggatcctgaaacagtaacagccgtcaccgatttgaagcaacccaagtcgttgctgaagaaggaagaaaaatttgtgtggagtccgcagtgtgagagagcatttcaaactctcaaagaaaggttggtttcctcgctagtgttaatcttaccggatactcgcaaggatttcctggtgtattgtgacgcttcgcgccaaggattggggtgtgtattaatgcaagaaggtcatgtggtagcttatgcttcacgccagctacgaccccatgaaggcaactatcctacccatgattttggagttgaccgctgtggtccatgctctgaaaatctggcggcgttatctcattggaaatcactgcgaaatatacaccgatcataagagtttgaaatacatcttcacccagccggatctgaatcttcggctaagaagatggttagagctcatcaaagactatgatgtgggaatccactatcaccctagtaaggccaacgtggtcgccgacgcgctgagtcgaaagggccattgcagtactctttgcgtccgtggcattccaccagaacttaatcaacagttggaagctctgaacctaagtgtagttagccatggattcttggctgcactagaagcaaagcccaccttgcttgatcaaatacgcgaggctcagaagaattatccggatatgcatgggatcctcaagaatatgaagcagggtaaagccgctggcttcatggaagatgaacacggaaccttatggaacggaaatacgaagatgtacttagacatgaaagagaaatattggtgggttagtatgaagcgggaaatcaccgagttcgtggccctttgtgaggtgtgccagcatgtcaaagcagagcaccaacgaccggccggactgctccaacctctacaggtaccagaatggaaatgggatgaaattgggatggatttcatcaccggacttccaaaaactcaaggcggatatgattctatatgggtagtcgtggatcgactaaccaaggtggctcggttcattcctgtgaagaccacctatggagggaacaaattagatgaactttacttcgctaggatcacctgggataagagtctcccctatgcggagttctcctacaataacagctaccgagccagcatacaaatggcaccctatgaagcgttgtatggacgcaaatgccggactccgctgttgtgggaccaagttggggaaagccaagtgttcgggaccgatattctgagagaagctgaagctaaagtcagaaccattcgggataacctaaaggtggcacagtctcggcagaaaagttatgcagataaccgacgccgcgatctggaattcgcagtgcacgactttgtgtatcttcaggtcacgccactacagggagtgcataggtttcagacaaaggggaagctcgcacctaggtatgtggggcctttccgcatcattgctcgacgcagagaagttgcttaccagttggagctgcccgcatccttgggcaatgtgcacgatgtgttccacgtgttgcagctcaagaaatgtcttcgagtgccgtccgagcaggccgattcagtgcagattgaagttcgcgaagacttgacctacgtggagaagcctgtgaagattctggacactatggagtgcaggacttggaatcgggtaatccgtttttgcaaggtcctgtggagcaaccacgccaaggaagaagctacttaggagcatgaagacgagctaaaggcagcccatcccgacctcttcgtcagttcttctgaatctcagggtcgagattccgtttaagggcggtaggtttgtcacgtcccaaaacgaccctaaaatataacctt

SEQ ID NO: 14736 - DNA, 3153 bp, Oryza sativa
  Clone ID: TFbOSC400676j.C1.o11.gm
atggtgaagacaaggaacgatccccgtgactccaacgatgccagtggcagcgaagagcagaccgatggagctcataccagtggtgcatctagcagcagtccatctccaccgcccgagaacccaatggtcactcagatgatgacaatgatgatgcaacagatgcaacaacattaccatcagatgttgcagcaggcgcaacagaaccaacagtttggtcccccaccatcccacttgtccaaactgttagactttctccgcatcaagccacccactttctcaagcaccaccaacccaatggaggccaacgaccggctccgtgctattgagaagaagctgaaccttttgcaatgcaacgaccaggagaaggttgctttttctacacatcagttgcaagggcctgcttctgcctgcctcacggtccacggtggaccaggtgcacccgggctcacaccggccgacgccgtgggccccacgcgtcagccgcaccagagggcgcgggcggctgacggccgggccccacgcggcagccgctcggtgcgcccgaaggcggccacggcggcgcggccggcgggaggcggcgcgcccgcgccccctatggtcgccggcggcggccataggcacggtggagcggccgccgagagaagggagggaaagggggaaacgaggcggcggtccacggctcaccctaggtcgacggcgacgacgaaaaggcggccggagcggaggaaggcggcggcgcggctcgggtcgacggggacggcggcgctccagcggtcgacgagcgaaacggagaggtggacgaggtcggcgaggatgcggcgaagccgaaggaggcggcgccgaggtgggaggtggtccggggcgacgacggcggcggaccggagctcggcggcgacggcggagagagagagcgacggcgcgagctcgattctggcgaggagaaagggcggcgagaggcggaaacgaatggaggaggtgcggggaggggtcgttttgggacgtgacaagttccgtgcactccagcaaggaaccatgtcagttacagagtacatgcacgagttcaaccgccttgcgcgctacgctcccgaggacgtgcgcaccgatgctgagaagcaagagaggtttttgtttggtcttgatgatgaattgaccaaccagctgatctccggagtctatgatgattttgagaagcttgtggacaaggctatccgtcaggaagaacaacgtaacaaaatggaccgaaaaagaaaggcagctcagatcagctttcctcaggggaacaatcagaagcctcgcttcatgacgggacagttaggtgagccttccaccctgatcgtccgtcagcaccgtccttaccactcgagtaacttcaacaacgactacaatagtggctgtcacggcagcagtaagcagcacaaccacaactcgactccacccccattaatggcaccaactcagtcagatccgccagctatgtcagctcagtcagaacaactcaagaaggagtctgcaggaaagccaagaccctgcttcaactgtggcaagcacggccactttgctggcaagtatccgaagccgaagcgcgctggacctaggttcgtccaggcctgcgtcaatcatgcgtctgcagaggaggcacaggcagcaccagaggtcgtgctgggcacgtttccagtgaattcatttccggcaacagtactttttgattcgggtgcctcgcattctttcatttccaagagaattgctgggacacatggattatcggtagtggaacttaaaatactgatgcgggttcatacccctggaaatgacatgaacaccacacactactgcccctcagtgaccatagagatcaaaaggtcaccgttcctatccaacctcatccttctcgaatccaaagacctagatgtcattctcggaatggattggttgaccagacacaagggggtgattgactgcgcaagccgcaccatcaccctaaccaacgacaaaggggagaagatcaccttccgttctccagtgccacagaagtccgtagcaagtctgaatcaggctactatcgaggatcagacagaaatagcggagaaaaatcccaagaaattggaggatatacctatagtacaagagtatcctgaggtgttcctagaagacctcactacaatgccaccgaagagagaaatcgagttccggattgatctggcacccggaactgctgcaatctacaaaaggtcgtacagaatggcagctaatgagctagcagaggtcaagaagcaggttgatgaacagctgcagaaagggtacatccaaccgagtatttcaccttggggtgctccggttatctttgtggagaagaaagacaagaccaagaggatgtgcgttgattatcacgcccttaatgaggtcacaatcaagaacaaatatcccttgcccagaattgatgacctgtttgatcagttaaaaggggctaaggtgttttccaagatagacctgcgatcaggctatcaccagttgagaattcgggaagaggatattcccaagacagccttcactactcggtatgggttgtttgagtgcacggttatgtcatttggactcaccaatgcaccggctttcttcatgaacttgatgaacaaagtgtttatggagtttcttgacaagtttgtcgtggtgttcattgacgacatacttatttattcaaaatcagaagaggaacatgagcaacatctccgtctggtactcgagaaattgaaggagcaccagttatatgccaagttcagtaagtgtgacttctggttgtcggaagtcaaatttctgggtcacgtcattactgctcaaggtgtggcagtggatccatcaaatgtggaacccatgacacaattgctaaagaaagatgaaaaattcaagtggtcagttgagtgcaatcaaagttttgaagaactcaagaagaagttagtatctgcaccagttctgattctgccggatcagacgaaagactttcaggtctactgtgatgcatctcgtcaagggctgggattggttcatgctctgaaaatctggcggcactatcttattggcaaccgctgtgaagtctacactgatcacaagagtctgaagtacatcttcacgcagcctgacttgaatatccgacagtga

SEQ ID NO: 14737 - DNA, 3750 bp, Oryza sativa
  Clone ID: TFbOSC409253j.C1.o1.fg
atgtcagttacagagtacatgcacgagttcaaccgccttgcgcgctacgctcccgaggacgtgcgcaccgatgctgagaagcaagagaggtttttgtttggtcttgatgatgaattgaccaaccagctgatctccggagtctatgatgattttgagaagcttgtggacaaggctatccgtcaggaagaacaacgtaacaaaatggaccgaaaaagaaaggcagctcagatcagctttcctcaggggaacaatcagaagcctcgcttcatgacgggacagttaggtgagccttccaccctgatcgtccgtcagcaccgtccttaccactcgagtaacttcaacaacgactacaatagtggctgtcacggcagcagtaagcagcacaaccacaactcgactccacccccattaatggcaccaactcagtcagatccgccagctatgtcagctcagtcagaacaactcaagaaggagtctgcaggaaagccaagaccctgcttcaactgtggcaagcacggccactttgctggcaagtatccgaagccgaagcgcgctggacctaggttcgtccaggcctgcgtcaatcatgcgtctgcagaggaggcacaggcagcaccagaggtcgtgctgggcacgtttccagtgaattcatttccggcaacagtactttttgattcgggtgcctcgcattctttcatttccaagagaattgctgggacacatggattatcggtagtggaacttaaaatactgatgcgggttcatacccctggaaatgacatgaacaccacacactactgcccctcagtgaccatagagatcaaaaggtcaccgttcctatccaacctcatccttctcgaatccaaagacctagatgtcattctcggaatggattggttgaccagacacaagggggtgattgactgcgcaagccgcaccatcaccctaaccaacgacaaaggggagaagatcaccttccgttctccagtgccacagaagtccgtagcaagtctgaatcaggctactatcgaggatcagacagaaatagcggagaaaaatcccaagaaattggaggatatacctatagtacaagagtatcctgaggtgttcctagaagacctcactacaatgccaccgaagagagaaatcgagttccggattgatctggcacccggaactgctgcaatctacaaaaggtcgtacagaatggcagctaatgagctagcagaggtcaagaagcaggttgatgaacagctgcagaaagggtacatccaaccgagtatttcaccttggggtgctccggttatctttgtggagaagaaagacaagaccaagaggatgtgcgttgattatcacgcccttaatgaggtcacaatcaagaacaaatatcccttgcccagaattgatgacctgtttgatcagttaaaaggggctaaggtgttttccaagatagacctgcgatcaggctatcaccagttgagaattcgggaagaggatattcccaagacagccttcactactcggtatgggttgtttgagtgcacggttatgtcatttggactcaccaatgcaccggctttcttcatgaacttgatgaacaaagtgtttatggagtttcttgacaagtttgtcgtggtgttcattgacgacatacttatttattcaaaatcagaagaggaacatgagcaacatctccgtctggtactcgagaaattgaaggagcaccagttatatgccaagttcagtaagtgtgacttctggttgtcggaagtcaaatttctgggtcacgtcattactgctcaaggtgtggcagtggatccatcaaatgtggagtcagttacaaagtggaccccaccaaagacagtttctcagattcggagttttcttggacttgcgggctattaccgtcggttcatcgaaaatttctctaagattgccagacccatgacacaattgctaaagaaagatgaaaaattcaagtggtcagttgagtgcaatcaaagttttgaagaactcaagaagaagttagtatctgcaccagttctgattctgccggatcagacgaaagactttcaggtctactgtgatgcatctcgtcaagggctgggatgtgtgctgatgcaggaaggcagagtggtcgcatatgcttcgcgacagttgcgtccacatgagagcaattatcctactcatgatcttgagttggcagcagtggttcatgctctgaaaatctggcggcactatcttattggcaaccgctgtgaagtctacactgatcacaagagtctgaaatggctggagttaattaaagattatgacatagggatacactatcatgcaggcaaagcaaatgtggtagcagatgcttttagcagaaagagccattgcaatacagtatataccgaaggcatgtgtgacaaattgcaacaagatctagagcacctaaatttgggcatcgtggaacacgggtacgtagctgctctagaggcacgccctacgctcgtggatcaagtcagagatgctcaggtaaatgatcctgaaatagctgagctgaaaaagaatatgaggattggaaaagcccgagattttcatgaggatgggcatggcacaatctggttgggagaaagattgtgtgtacctgacgacaaagaactgaaggatctgatactcactgaagctcatcaaactcagtattcaattcatcccggtagtactaaaatgtaccaggacctcaaagaaaaattctggtgggctagcatgagaagagaaatagctgaattcgtcgcactctgcgatgtttgccagagggtaaaggcagaacatcaaaggcccgcaggattgttacaacctcttcagatcccggaatggaaatgggaagagattggaatggatttcataacaggtttgcccaggacatcatcgaggcacgattcaatctgggtagtcgtggatcgactcaccaaagttgctcatttcattccagtgcacactacctatacggggaaaaggttggcagagttgtacttagcaaggatcatgtgtttgcatggggtacctaagaagatagtatctgatcgagggagtcagttcacttcaaaattttggcagaagttgcaagaagaattggggactcatttgaatttcagcatagcttatcatccacaaactaatggtcagaccgagcgagtcaatcaaatattggaagatatgttgagagcttgtgcacttgactttggcggagcttgggataaaagtctgccttatgcggaattctcttacaacaacagttatcaggccagtctgcaaatggcaccgtttgaagcattgtccggatggaagtgccgcacttcgctcttctgggatcaaacaggtgagcgccaactgtttgggacagaggtgctaaccgaggcagaggaaaaagtcaggaccatcagggaaagattgagaatcgcccagtctcggcagaagagttatgctgacaaccgccgaagggagcttatttttgaagcaggggattatgtgtaccttcgtatcactccgcttcggggagtccaccgcttccagactaaaggaaagttggcaccacgctttgtgggaccatacaggatcctggaacgcagaggtgaagttgcttaccaccttgagcttccatctaatatggctggtatccacgatgtgtttcatgtatctcaactgaagaagtgtttgagagtacctgaggaacaagctagctcagagcacatagacatttag

SEQ ID NO: 14738 - DNA, 2016 bp, Oryza sativa
  Clone ID: TFbOSC412908j.C1.o19.fg
atggctaacaagaccgtccgtgaattcgttgctctctccgctgacaatgtggccattgggccgcagatcaacatgggagacgtggatttcgatccgaagtccagcctcatcatgatggcgcaggctagcccgttctgcagcaagcctaatgaggatgccaatgcttatctgcaacagttcctggagatctgcaacacgtacaccatgaagggagtcagtccatatgccgtcaggctgcggctgtttccgttttctctccttggggaagcgaaactgtggttctatgccaaccgtcctacaatcaacacctgggacaagtgttctacggcattcctatcgaagtttttcctgatgggcaaaaccaacgcccttcgcggaaggatttcgagtttccagcatacaagggatgagtccattcctgaggcgtgggaacaacttcaggaatatgtggccgcctgtcctcatcatgggatggacgactggcttatcttgcagaacttctacaatggactcactcccatgtctcgtgaccacctggacgcggcagctggaggagccttcttctcaaagacgcgaggtatacacaccgtcaaggaaacggaaatacttgttgccaagctggacctcttcatgaagcggttggacgaccacgaaaaaaggccacaaggtaccatcaaagccttggactcacacatcacgtgtgaagactgcggcagcatgggtcactctgggaatgattgtccggaaacccgtgaagaggtgatgtatatgggcaacaacaataacaacgagtatcgtccacaaggaggtcaggggtggaaccagccactcccatactatcaaggagctacattagtacctacaaatgaatctgggaggatcccagggcagcccgaatcctccgttgaaaatgtaaaggtaatcacaatgaggggacgtaagtccactcgggatccgccatatcctaaccctgcagggactagcagtatcaccaaggaagcgccatatagtaattcggctgatgaaaaggttcagccagagaagactatgccgcaggagtaccgcgacacccgtttgctgccgtttcctcaaaggaacaagaaaccgtcagtggacgagcagtttgctcgttttgttgaagtaatccagaaaatccacatcaacgtgccattgttggacgctatgcaagtgccaacatacgcacgttatctcaatgatatcctcaacaacaagagaccgttcccgacaacggaggtggtcaagctgacggagcattgcagcaacgtcatacttcacaagttcctagaaaagaagaaggatccggggtgtcctacgatcacctgctcgatcgggacacagcaattcgaccaagccctttgtgatcttggagcgagtgtcagcgtcatgccaaaggacgtctttgacaagctcaacttcacggtgttggcagcaacaccgatgcgcctgcaactagccgactcgtcagtccgttacccagccgggatagcggaggatgtgccggtcaagattcgggatttcttcttcctggtcgatttcgtagtgctggacatggacacggagaaggaaacaccgctcatcttggggcgtccgttccttagcactgcagaagacaacaatgacatgggaatggggagtatccgtttccgtatcaacgggaagcaagagaagtttgagtttcagccaaggaccaaacaatgctcgatggtcaggatcaactacgggccaaaccaacagaatattcaaatggtcgaagtggagccacccaagacggacagcctggtgaagttcatgcggaatttcctggaaaaggaaacaacgtttcccaggaaccgttattggaagacgccagtaaaatctagtacaccggccaagaagctagagcagctggctcagaggaagccatctccctcaccgaaaccaaagagggtgtggaaggaaaaaccaaagacgcccactccatcacctccggagacaggtggaaaatctgcaaactga

SEQ ID NO: 14739 - DNA, 3366 bp, Oryza sativa
  Clone ID: TFbOSC6630j.C1.o3.fg
atggcggcatcgggctctgtctcctgccggctggaggatgtgacattgcatgagttcaataacctggcccggtacgccccggaggatgttcgtgaagatgaagaaaagcaggaaaagtttctggcaggaatggaccctgaactttctgtgcgtctggtctctggggattaccctgatttccagcgcctgtcgcagcaacagcagaatcagcaagggaaccgtgcaccccgtccccttgcaccggccgtgcagcctggtcaaggtcgcagggatgttcaaggtcagcagcgtctatgcttcaactgcttcgagcccaggcacttcgctgataaatgcccgaagccgaggagccagcaaggccaagcgcctccccgccctaacaacggtggtaaggatgccacccggggtcgtgtgaaccacatcactgcagagaatgtgctgacaactccagacgtcatcgttggggctatgacagcaaagtattatagcccggtcgtacctatagagatccagggaattccttttcccttggatctgatccttctagacaccaaggacttggatgtgatcctcaagatgaattggttgacccaattccaaggagtagtggattgtgcaagacgtactgtcaccgtgtaccagaagcctgatcaaccagttgttttctttgcgcacccgactcccaccggcagctcagtacttcatcaactaggactgtcagaaatacccgttgtcagtgagttcggtatgccgcccaagcgggagattgagttcaggatagatcttgctccaggaaccactcccctgtacaagcgaccctaccgtatggcagcaaatgaattggccaaagtcaagaagcagttggaagagttgaaagagaaggggtatatacggccgagcacttccccctggggtgctcccgtgacttttgtagaaaagaaagacaagacaaagaggatgtgcgttgactaccgagctctcaatgaagtcactatcaaaaacaagtaccctcttccccagatcgatgatctgttcgatcagcttaaaggtgccactgtcttttccaagattgatcttcgttccggatatcaccagttgcgtatccgcgaagaagatatccctaagaccgcattcaccacgcggtacgggctgtatgaattcacggtgatgtcgttcggtctgaccaacgctcctgccttcttcatgaatttaatgaacaaggtgttcatggaatacctggataagttcgttgtggtctttattgacgacatactggtctactcacagtcagaggaagaccatcagcagcatctccgtctgctcagcaagtgtgaattctggttgtccgaagtcaagttcttagggcatgtgatatctgctaaaggagttgccgtggatcctgaaacagtaacagccgtcaccgatttgaagcaacccaagtcggtcacccaagtccgcagtttcttgggtttggcagggtactatcggagattcatcaagaatttctccaaaatttccaggcccatgacgcagttgctgaagaaggaagaaaaatttgtgtggagtccgcagtgtgagagagcatttcaaactctcaaagaaagctacgaccccatgaaggcaactatcctacccatgattttggagttgaccgctgtggtccatgctctgaaaatctggcggcgttatctcattggaaatcactgcgaaatatacaccgatcataagagtttgaaatacatcttcacccagccggatctgaatcttcggctaagaagatggttagagctcatcaaagactatgatgtgggaatccactatcaccctagtaaggccaacgtggtcgccgacgcgctgagtcgaaagggccattgcagtactctttgcgtccgtggcattccaccagaacttaatcaacagttggaagctctgaacctaagtgtagttagccatggattcttggctgcactagaagcaaagcccaccttgcttgatcaaatacgcgaggctcagaagaattatccggatatgcatgggatcctcaagaatatgaagcagggtaaagccgctggcttcatggaagatgaacacggaaccttatggaacggaaatcgtgtatgcgttccggacaacaaggaatttaaacaattgatacttcagggagctcatgaaagtccttattccatccaccctggcagtacgaagatgtacttagacatgaaagagaaatattggtgggttagtatgaagcgggaaatcaccgagttcgtggccctttgtgaggtgtgccagcatgtcaaagcagagcaccaacgaccggccggactgctccaacctctacaggtaccagaatggaaatgggatgaaattgggatggatttcatcaccggacttccaaaaactcaaggcggatatgattctatatgggtagtcgtggatcgactaaccaaggtggctcggttcattcctgtgaagaccacctatggagggaacaaattagatgaactttacttcgctaggatcgtgagtctccatggcgttcctaagaaaattgtatctgataggggaagccaattcacctctcacttctggaagaagctccaagaagagctgggtacccgattgaatttcagcaccacttatcacccgcaggcagatggacagaccgagcgtctgaatcaggtcctagaagacatgctccgcgcctgtgttctagattttgggaagacctgggataagagtctcccctatgcggagttctcctacaataacagctaccgagccagcatacaaatggcaccctatgaagcgttgtatggacgcaaatgccggactccgctgttgtgggaccaagttggggaaagccaagtgttcgggaccgatattctgagagaagctgaagctaaagtcagaaccattcgggataacctaaaggtggcacagtctcggcagaaaagttatgcagataaccgacgccgcgatctggaattcgcagtgcacgactttgtgtatcttcaggtcacgccactacagggagtgcataggtttcagacaaaggggaagctcgcacctaggtatgtggggcctttccgcatcattgctcgacgcagagaagttgcttaccagttggagctgcccgcatccttgggcaatgtgcacgatgtgttccacgtgttgcagctcaagaaatgtcttcgagtgccgtccgagcaggccgattcagtgcagattgaagttcgcgaagacttgacctacgtggagaagcctgtgaagattctggacactatggagtgcaggacttggaatcgggtaatccgtttttgcaaggtcctgtggagcaaccacgccaaggaagaagctacttag

SEQ ID NO: 14740 - DNA, 3900 bp, Oryza sativa
  unsure (1)..(3900): unsure at all n locations
  Clone ID: TFbOSC7844j.C1.o2.fg
atggcggcgacggaggagcggcccggancgaaggnagcggncggcgcggctcgggtcgacggggtcgacggcgttcggcgggtcggcgacggaaacggagaggtggacgaggttggcgaggatgcggcgaacccgaagaaggcggcgccgagggtcgttttgggacgtgacaagttccgtgcactccagcaaggaaccatgtcagttacagagtacatgcacgagttcaaccgccttgcgcgctacgctcccgaggacgtgcgcaccgatgctgagaagcaagagaggtttttgtttggtcttgatgatgaattgaccaaccagctgatctccggagtctatgatgattttgagaagcttgtggacaaggctatccgtcaggaagaacaacgtaacaaaatggaccgaaaaagaaaggcagctcagatcagctttcctcaggggaacaatcagaagcctcgcttcatgacgggacagttaggtgagccttccaccctgatcgtccgtcagcaccgtccttaccactcgagtaacttcaacaacgactacaatagtggctgtcacggcagcagtaagcagcacaaccacaactcgactccacccccattaatggcaccaactcagtcagatccgccagctatgtcagctcagtcagaacaactcaagaaggagtctgcaggaaagccaagaccctgcttcaactgtggcaagcacggccactttgctggcaagtatccgaagccgaagcgcgctggacctaggttcgtccaggcctgcgtcaatcatgcgtctgcagaggaggcacaggcagcaccagaggtcgtgctgggcacgtttccagtgaattcatttccggcaacagtactttttgattcgggtgcctcgcattctttcatttccaagagaattgctgggacacatggattatcggtagtggaacttaaaatactgatgcgggttcatacccctggaaatgacatgaacaccacacactactgcccctcagtgaccatagagatcaaaaggtcaccgttcctatccaacctcatccttctcgaatccaaagacctagatgtcattctcggaatggattggttgaccagacacaagggggtgattgactgcgcaagccgcaccatcaccctaaccaacgacaaaggggagaagatcaccttccgttctccagtgccacagaagtccgtagcaagtctgaatcaggctactatcgaggatcagacagaaatagcggagaaaaatcccaagaaattggaggatatacctatagtacaagagtatcctgaggtgttcctagaagacctcactacaatgccaccgaagagagaaatcgagttccggattgatctggcacccggaactgctgcaatctacaaaaggtcgtacagaatggcagctaatgagctagcagaggtcaagaagcaggttgatgaacagctgcagaaagggtacatccaaccgagtatttcaccttggggtgctccggttatctttgtggagaagaaagacaagaccaagaggatgtgcgttgattatcacgcccttaatgaggtcacaatcaagaacaaatatcccttgcccagaattgatgacctgtttgatcagttaaaaggggctaaggtgttttccaagatagacctgcgatcaggctatcaccagttgagaattcgggaagaggatattcccaagacagccttcactactcggtatgggttgtttgagtgcacggttatgtcatttggactcaccaatgcaccggctttcttcatgaacttgatgaacaaagtgtttatggagtttcttgacaagtttgtcgtggtgttcattgacgacatacttatttattcaaaatcagaagaggaacatgagcaacatctccgtctggtactcgagaaattgaaggagcaccagttatatgccaagttcagtaagtgtgacttctggttgtcggaagtcaaatttctgggtcacgtcattactgctcaaggtgtggcagtggatccatcaaatgtggagtcagttacaaagtggaccccaccaaagacagtttctcagattcggagttttcttggacttgcgggctattaccgtcggttcatcgaaaatttctctaagattgccagacccatgacacaattgctaaagaaagatgaaaaattcaagtggtcagttgagtgcaatcaaagttttgaagaactcaagaagaagttagtatctgcaccagttctgattctgccggatcagacgaaagactttcaggaaggcagagtggtcgcatatgcttcgcgacagttgcgtccacatgagagcaattatcctactcatgatcttgagttggcagcagtggttcatgctctgaaaatctggcggcactatcttattggcaaccgctgtgaagtctacactgatcacaagagtctgaaatggctggagttaattaaagattatgacatagggatacactatcatgcaggcaaagcaaatgtggtagcagatgcttttagcagaaagagccattgcaatacagtatataccgaaggcatgtgtgacaaattgcaacaagatctagagcacctaaatttgggcatcgtggaacacgggtacgtagctgctctagaggcacgccctacgctcgtggatcaagtcagagatgctcaggtaaatgatcctgaaatagctgagctgaaaaagaatatgaggattggaaaagcccgagattttcatgaggatgggcatggcacaatctggttgggagaaagattgtgtgtacctgacgacaaagaactgaaggatctgatactcactgaagctcatcaaactcagtattcaattcatcccggtagtactaaaatgtaccaggacctcaaagaaaaattctggtgggctagcatgagaagagaaatagctgaattcgtcgcactctgcgatgtttgccagagggtaaaggcagaacatcaaaggcccgcaggattgttacaacctcttcagatcccggaatggaaatgggaagagattggaatggatttcataacaggtttgcccaggacatcatcgaggcacgattcaatctgggtagtcgtggatcgactcaccaaagttgctcatttcattccagtgcacactacctatacggggaaaaggttggcagagttgtacttagcaaggatcatgtgtttgcatggggtacctaagaagatagtatctgatcgagggagtcagttcacttcaaaattttggcagaagttgcaagaagaattggggactcatttgaatttcagcatagcttatcatccacaaactaatggtcagaccgagcgagtcaatcaaatattggaagatatgttgagagcttgtgcacttgactttggcggagcttgggataaaagtctgccttatgcggaattctcttacaacaacagttatcaggccagtctgcaaatggcaccgtttgaagcattgtccggatggaagtgccgcacttcgctcttctgggatcaaacaggtgagcgccaactgtttgggacagaggtgctaaccgaggcagaggaaaaagtcaggaccatcagggaaagattgagaatcgcccagtctcggcagaagagttatgctgacaaccgccgaagggagcttatttttgaagcaggggattatgtgtaccttcgtatcactccgcttcggggagtccaccgcttccagactaaaggaaagttggcaccacgctttgtgggaccatacaggatcctggaacgcagaggtgaagttgcttaccaccttgagcttccatctaatatggctggtatccacgatgtgtttcatgtatctcaactgaagaagtgtttgagagtacctgaggaacaagctagctcagagcacatagacatttag

SEQ ID NO: 14741 - DNA, 304 bp, Oryza sativa
  Clone ID: TFbOSC24811j.C1.o2.np
tcaccacttctagcaccaacacctaacacaacaggaggatgtctagagttatgagcataaggatcaaaacctaaaccacagttatttgtgctaacctttgattgatcctagatcgtaaagggcctttcccaccccaaaagctagccattgaggtgaggggctcccccacttatatcttaggtcctttacccttccacaaccaatgttggactattcaacaatctcccccttcacacattggtgtccctcagcccttcaccgccccttcaccgtatccgggccccaccggcccatggtccatcag

SEQ ID NO: 14742 - DNA, 2706 bp, Oryza sativa
  Clone ID: TFbOSC400261j.C1.o3.fg
atgacaggtttcgacttgccggaaaattttcaagaaaatccagaagtcttcttccgaagcgtaaagccgcgggttgttcccccgcagaagactcttccgacaaagaagccagccgtaccagcgccaccaactttcaagactatggctgacaagaccctccgcgagttcgctgctccctcctctgagaacgtggccactgggccgcaactcaacatgggagacgtggactttgacctgaaatccagcctcattacgatggcgcaggctagcccattctgcggcaagcctaacgaggatgctaatgcacatatgcaatggttcctggagatctgcagcacgtacaccgtaaagggcgtcagtcctgacgtcgtcaggctgcggctgtttccgttttccctcctcgggaaagcgaagcagtggttttatgccaatcgtgccgtgatcaatacctgggacaaatgctcgatagtattcttgtcgaagttctttccgatgggcaagacaaatgcccttcgtgggagaatttcgagcttccagcagacacgtgatgagtccattccagaggcatgggaacgtctgcaggaattggacgaacacgagaagaagccccaaggcaccgtcaaggccttggactcacacgttacgtgtgaagtctgtggcaacacgggtcactctgggaacgactgcccgaaaacccatgaggaggtgatgtacatgggtaacaacaacaataacaacaatgggtatcacccacaaggagccaaaactaccgacgcactcaacaaaaagatggctgccaatgacaagatcttagaaaatataaatgtgaaactagatggctttgcttccgcatttcaaaaccagttgagtttcaataagatgattgaaacccagttggcgcaacttgccgctctagtacttgcaaatgaaactggaaggatcccggggcaacccaaaccctccattgaaaatgttaaggtgatcacgacgaggggaggacatcctcaacaacaagcgaccactaccaacaaccgaggtggtcaagctgacggaggaatgcagcaacgtgatcctccacaaactcccggagaagaagaaggatccgaaggatccgagaaattcgacctggcgctctgcgatcttggggcaagtgtaagtgtcatgcccaaggatgtctttgacaagctcaacttcacggtgttgacaccaacaccgatgcgccttcaattggctgactcatcggttcactacctagctgggatagcggaagacgtaccggtcaagatacgagattgctttatcccggtcgacttcgtggtgctagacatagacactggcaaggagacaccgctcatcctggggcgtccgttcctgagcactgcggaagcaaacattgatgtcggaacgggaagtatccgtttccgcatcaacgggaaggaggagaagttcgagttccagccaaggacggaacaatgctccatgttccgaataaagatgaggtcccgttattggaaaacgccggtaaaacccaagacaccggccaagaaggaagaaaagctggctcagaagaagccgccgcccataccaagaacaaagaagagcttgactcaggcttctcatcaaccggtggcaaatccaccttgtgtctttgaattactgtacccgaacgagtcagaacaaatgaatctacaagcctaccacatgctgaaggaccgggagttcggccacaccagggcgtatgatccagaacttctaagaaaaacaggtgatcttagacccattcggggagatgagttgattatcatgtttgccaaggttaggaagactaaagttgctcctgttaaatatatgattaggcaatggttagaaagtattaagtataatgcccctgttgagtgcacttccttgatcacccgcatagcgaacggacatggagttatcaccactgatcaaatcgagtatatcttcactgtccatccctatgtggatgaaacatatttaatgcaagggcatatacttaagcatggagccgatggctctttgatatactttttcccctgtacaaatgaaatcccgttacccaatgcggggtatcatttgtacaactgtcaggaactaaccattcccctgcagaccatagaagaatctcgtgcaggtacatcctacagggaaacacgcaacaaaccaaggcaaaaacacgaggagtcatcatcatcaacacccatgcagatgtacgaggcggactgggaaccaacgggggatgcacccggttggacccaagcaccacgacacaacacaggaggtatgccatgtttgatccctaccaagctccacatactaaaccttagagtaggaatcaacaaggttactttgggcaaggtaaagcaatgtctcgcgggaatcaggtgtaaggaaataccaacacgtactgtcggccggcgacggcggcgacacgaggagaatctccacgctcggcttggcgatgaggtgggaaggagggggaacttgatctacgccggcagcgatgaccagtcgaggcagagagccaagacgcagcagctgaggtccgcggatgaagctgctcggtgggaaatcccgaggtgcgggaggaagaagcagcggctggcgacagggtcgcagacacagaggtcggagggcgccgcctgccgccggccaccgctgtcgtcgtcgctcacccgcgcgtga

SEQ ID NO: 14743 - DNA, 4362 bp, Oryza sativa
  Clone ID: TFbOSC400993j.C1.o54.gm
atggtgaagacaaggaatgatccccatgactccaacgacgccagtggcagcgaagagcagaccgatggagctcatgtcagtggtgcatctggcagcagatcatctccaccgcccgaaaacccaacagtcactcaaatgatgacaatgatgatgcaacagatgcagcaacattaccatcagatgttgcagcaggcgcaacagaaccagcagtttggtcctccaccatcacacgtgtccaaactgttagactttcttcgtatccagccacccactttctcaagcaccaccaacccaatggaggccaatgactggctccgtgctattgagaagaagctgaacctactgcaatgcaacgaccaagagaaagttgcttttgctacacaccagttgcaaggtcccgcttctgcctggtgggataactacgtggcgacccgtctagatgcaacggaggttacttgggcagagttttgtcaaagcttcaggaaggcacagattcctgaagggattatggcacaacagaagagagagttccgtgcgctccagcaaggaaccatgtcagttacagagtacttgcatgagttcaaccgccttgcgcgctacgctcctgaggacgtgcgcaccgatgctgagaagcaggagaagtttttgtttgggctcgacgatgaattgaccaaccagctaatctccggagtttatgaggactttgagaagcttgtggacaaggctatccgccaggaagagcaacgcaacaaaatggaccgaaaaagaaaggcagctcagatcagctttcctcaggggaacaatcagaagcctcgcctcatgacgggacagctaggtgggccttccaccctgatcgtctgtcagcaccgtccctatcacccgagtaacttcgacaacgactacaacggtggcagtcacaacaacaaacaacccaagaagggggctgtaggaaagccaggaccctgcttcaactgtggcaagcacggccactttgttggcaagtgtccgaagctgaatcgcactggacccaggttcatccaggcccgcgccaatcatgtgtctgcagaggaagcacaggcagcaccagaggtcgtgttgggcacgtttccagtgaactcatatccagcaacagttctctttgattcaggtgcctcgcattctttcatttccaaaagatttgctgggacacatggattatcggtagtggaacttaaaataccgatgaaggttcatacccctggaaatgatatgaggacagcacactactgcccctcggtgactatagagatcaaaagatcaccgtttctatccaacctcatccttctcgaatctaaagacctggatgtcattcttggaatggattggttgaccagaaacaagggagtgattgactgcgcaagccgcaccatcaccctaaccaacgacaaaggggagaagatcaccttccgttccccagcgtcgcagaagtccgtagcgagtctgaatcaggctgctattgagggtcagacagaaacagtggagaaaagtcccaggaagttggaggatattcctatagtacaagagtatcctgaggtgttcccagaagacctcactacaatgccaccgaagagaaaaatcgagttccggatcgatttggcacccggaactgctccaatttacaagaggccgtacagaatggcagctaatgagctagcagaggtcaagaagcaggttgacgaacagctgcagaaagggtacatccgaccgagtacttcaccttggggtgctccggttatctttgtggagaagaaagacaagaccaagaggatgtgcgtggattatcgcgcccttaatgaggtcacaatcaagaacaaatatccgttgccaagaattgatgacctgtttgatcagctaaaaggagctaaggtgttttccaagatagacctgcgatcaggctatcatcagttgagaattcgggaagaggatattcccaagacagccttcaccactcggtatgggttgtttgagtgcacggttatgtcctttggactcaccaatgcaccggctttcttcatgaacttgatgaacaaagtgtttatggagtttcttgacaagtttgtcgtggtattcattgacgacatacttatttattcaaaatcagaagaggaacatgagcaacatcttcgtctggtacttgagaaattgaaggagcaccagttatatgccaagtttagcaagtgtgacttctggttatcggaggtcaaatttctgggtcacgtcatttctgctcaaggcgtggcagtggatccatcaaatgtggaatcagttacaaagtggaccccaccaaagacagtttctcagatccggagttttcttggacttgcgggttattaccgtcggttcatcgaaaatttctctaagattgccaggcccatgacacagttgctaaagaaagatgaaaaattcaaatggtcagctgagtgcaaccaaagttttgaagaactcaagaagaagttagtctctgcaccagttctaattctgccagatcagacgaaagacttccaggtctactgtgatgcatctcgccaaggattgggattggttcatgctctgaaaatctggcggcactatcttattggcaaccgctgtgaagtttacactgatcataagagcctgaagtacatcttcacccagcccgacttaaatctccggcaacgaagatggctggagttgattaaagattatgacatggggatacactatcatccaggcaaagcaaatgtggtagcagatgctctgagcagaaagagctattgcaatgcagtatgtaccgaaggcatgtgtgacaaattgcagcaagatcttgagcacctaaatttgggcatcgtagaacacgggtacgtagctgccctagaggcccggcctacgctcgtggatcaagtcagagcagctcaagtaaatgatcctgaaatagctgagctgaaaaagaatatgagggttggaaaagctcgagatttccatgaggatgagaatggcacaatctggttgggagaaagattgtgtgtgcctgacgacaaagaactgaaggatctcatactcacagaagctcatcaaactcagtattcaattcatcccggcagtactaaaatgtaccaggacctcaaagagaaattctggtggggcccacctgtcggccccttcttccacctcccgctgccgctccctaagccggccgccgccgaaaccgccaccgacgccgccgggtcgccgccgcaccccgccatcggcgccgccgcgtccgccatcccgaggtccacctcgtccgctgttctcccgtccaattccatcgccggagctcgcatctcctcgcactccgagttgaagtccttcccagttgaagatgtctcgaagaggttggtttcgtcgctgccgtcaaggattgcctgtggaatggagtcgcccgctgcaggagtcaacttagaaattctggttcgtgaatttctgggcgtgacaaggcgcgcgcggccacgggcatggcgcggcagcgaggaggcagtccctgcggcggggcggcacggcaccgcgaggacgatgacgagcggcagggcgtcaatgaggtttgaagagctcgcggttggaaagataatggatccgaactttccataccagtcgccgtcgttcaccttgggtgatttcgaccccaactacatgtcggggtttgacggaggcgacagcttcggaaggattttccggaaccgcgagcggaagtgtttcgacacacaccggctcgaagagatcgagaacctccggcaaattttatctgctcgttcttctggtggtacaggtcacctcaagcgccatgcggagtcgtgtgccaagaagcaaggaatacaactccggcagcagcaacttatgctaaacccagacggtgaccacatcgatgctgttcgtcaagcaatcgcgtggttaactgcttctaacccgcggattgctgcatggaagaggttttgcattgcggccggaagttcgccagcggagaccccctcctatccccactacagcgacgccatccaccacgaagcacaagatttcaacgtcctcgggtggtggaatgaccacaagataacatatcctgtgctttcaaaactagcacgggatgtgttgacggtgcccgtgtcgacggtgtcctccgaatcggccttcagtctatgcggccgaatcatcgaagaccggaggacgactctgcgcagcgaccacgtcgaaatgctactaagcgttaaagactgggagcttgctcgacaacatgcccaatacactgcggacaaccaagaattggccgcccacttcgagcaactctacctggatccagaccaaccccagtag

SEQ ID NO: 14744 - DNA, 3420 bp, Oryza sativa
  Clone ID: TFbOSC401472j.C1.o6.fg
atgcagcatgagattatatgtggttgtatctgtaagcgaaacaatgatgaacggataatgaaagttataggtgaagtgaataaatttgaaaatgagactgtacagggtgataaggcatgcagattcagtaaatgctatggtagaatgtgggagaggataagggataagagtaaggtggaatcgaagagtatcataagtaattatacgggggtctatcggtgcatcaacgctaggtcatgcgcatggtccctagggcgtgacgacaagcaccgtttcaccattagttcggtttgtggaaccccaattgggttagccttctcggcaaggtcaactggacaatgcacgattggtaaccagaggagacatggtgcatgcaccatgctggaccttccacatgtgatcaattccatcgcgtctgatcatagcgacgttgctcagtttgttgcaggtgatatgatggatttcaacctcaaagcagatgccgtcctgcttaagtctgtgctacatgattggagtgatgaggactgcataaagatactaaaatgttgcaaggaagcaattattccttctaaagatgcaggaggaaagatcatcattatagatgttgtagttggatcttcttctgaagcaatatgccaaggaacccaacatttggttgatctgaatatttcggttctaacaccagggaaggaaagggacgaggaagagtggttcaagatgttcactaagtacaagattagcccagtgttaggttttcgatccattatcaaaattactgttgaagtggttttggagataattgattttcaggtgtgtcgggaccgatcagaccgggcggtggttgccggtgactcgatgcctcgggagagtatttgcggtgatggaccgggagtcggcttggtgagagaagtaataaagttgtcatctactttgagagttcttcgatgtgtgtttcatcgggtgcggcggtccgaccggcgactcaacgatggtccgaccggcgacaagcggtggtcagaccggcggtatacgggcggtcagaccggcggtggcgacagcaagcggcagctgatcttggaggtcaaaccggagattgaatctcggtcagaccgacggcaaccaggtggtcagaccggtgcatctacttcggtcagaccacgatccatcgattttgaggctcgcaatattcttttgagtgggatttctcgttcggattatgatcgtgttgctcatcttcaaactgctcatgagatttggattgctttgagaaattttcatcaaggtacaaataacattaaagaacttcgtcgtgatcttttcaaaaaggagtacattaaatttgaaatgaaacttggagaagctttggatgactatctttctaggtttaataaaattttgagtgatcttagatctgttgattcttcttatgatgctaattatccacaatctgagatttctcgtcactttttgaatggttttgacatgtctatttgggagatgaaagttacatctattcaggagtctgttaacatgtctactttgactttggattcgctttacactaaactgaaaactcatgagatgaatattctttctcgtaaaggtgattctaagtatagtgctttggtttcgtctacaacttctttggatgttgatgcttcttcatcgaagtcttctgttcttgctttatttaatgccatgttcgacgatcaacttgaacagttcgaggaggacttggttttgctatctaacaaattttctcgagctatgaataatgttaggaacaggaaaagaggtggaccgaatcgttgttttaagtgtggtgcacttgatcatcttcgctcgcattgtcctaagcttgggagaggcaagaaggaagatgatgtaagagtcaaagaagatgacttgaacaagaagaagaacatgaaggagaaggagaagaagaagcattgcatgcagtggctaattcaagaattaataaaagtttttgatgaaccggaagatgaagatgagagcaaaggtaagcaagttgttgatctagcttttattgctcgtaatgcaagttctggtgttgatgaatctgatgatgataatgaagaaaagcttagttatgatcaattagaatatgctgcttataaatttgctaagaaacttcaaacatgttctattgtgcttgatgagaaggatcatactattgagattcttaatgctgaaattgctagattaaaatctttgattcctaatgctaataattgtcaatcttgtgaagttttattttctgaaattaatgctttgcgagatgtcaattctattagttgcaagaaattggaatttgagattgaaaaatctaaaaggttggagtcttcttttgctcttggatttgctttacatgctcgtgttgttgatgagttgattttgacaaagaacgttttggaaaaatacaaagttgctttttgtgcaagttctttggtcaatgtttcatgtgcaaataaggcaaaacaaaacaatggtgctttgatttctcaatattgttcaaagtgtggtttgaatgagttgaagttgaaagatgctttagagcgtgttaatcacatggaagaaattgttaaacaagatgaggtgttttcttgctcaacttgtagaaaacaaaaaggtcttttggatgcatgcaaaaattgtgttgttcttacacaagaggtttcttatttgaaaagttctttggaaagattttctgatggtaaaaagaacctcaatatgattcttgatcaatccaaagttagcacgcacaaccgtggtttaggttttgattcttatgatcatcatactagacatcctcctactgttttgggtgttgctaggagaggttttaattcgaggagcacggttagaccgacattgtccagtcggtcagaccggccagcggtcaaaccgcaggtgaacgggcggtcagaccaattaccaggccaggtcatatcgcagtctcagcggcggtcagaccagcctcggggcaagttatcgcataattcaaatcagacttttgtgaagcgtcaagagaataaaaaatatgaaaaaaatgaataccgaatccttggaaacagtcttgacgacaatgacgtattcgatagagaagtaataaagttgtcatctactttgagagttcttcgatttgtgtttcatcgggtgctgcggtccaaccggcgacccaacggcggtccgaccggcgacaagcggcgatcagactggcggcatacgggcggtcagaccggcggcggcgacagcaagtggcagctgatctcggaggtcggaccggagattgaatctcggtcagaccgacggcaactaggcggttacaccggtgcatctacttcggtactaattcttggaaatgtttggcaaattgctattctactgatattgaggtga

SEQ ID NO: 14745 - DNA, 1692 bp, Oryza sativa
  Clone ID: TFbOSC405120j.C1.o12.fg
atggctaacaagactctccgcgagttcgctgctccttcggctgacaatgtggccattgggccgcaggtcaacataggggacttggatttcgacttgaagtcaagcctcatcacgatggcgcaggctagcccgttctgtggcaagcctaatgaggatgtcaatgctcatctgcaacagttcctggagatctgtagcacgtacaccatcaagggcgtcagtcctgacgccgtcaggctacgactgtttccgttctcccttctcgggagagcgaagcagtggttctatgcctaccgtgctgctaacttctacaatgggctcaccccgatgtcccgcgatcacctagacgcggtagctggaggagctttcttctctaaaacggttcaaggagccgttgatctagtagagaagatggtctccaatatgggttggagcgaggaacgactccagacccgtcagcgaggcatgcacaccgtcaaggagaccgagttacatgctgccaagctggacctcctcatgaagtgtttggacgaccacgagaaacagccacaaggcaccgtcaaggccttggactcacacgttacgtgtgaggtctgcggcaacacgggtcattctgggaatgattgcccaaaaacccgtgaggaggcgatgtacatgggcaacaacaacgggtatcgtccacaaggaggtcaagggtggaaccaaccacgcccatattatcaaggaggcaacaacaacgaaacccagctagctcagttagcatctttagtccctgcaaatgaaactgggaggattccaaggcagaccgactcctccgttgaaaatgttaaggcgatcacgacgaggggaggaactaatgggatatcaaaagaagcgccatctaatgactcgactgacaaagaggttcagcgagaaaagacagtgcctcaggagtactgcgacacacggttgctgccattccctcaacggagtagaaaacctaatccagaagatccacatcaacgtgccattgttggacgctatgcaagtgccaacatatgcccgttatctcaaagacatactcaacaacgagagaccactcccaacaacggaggtggtcaagctgacggagcaatgcagcaacgtaatactccacaagctcccggagaagaagatctggggtgccctacgatcaactgctcgatcggggcacaacagttcgagcaggccttgtgcgacctaggagccagtgtcagcgtcatgcccaaggacgtcttcgacaagctcaacttcacggtgttggcactgagacggatgcgccttcaactggctgattcgtcagtccgttacctggcagggatagcggaggatttgccagtcaagatacaggatttcttcatccttgttgacttcgtagtgctagatatggacacggagaaggagacgccgctcatcctagggcatccgttccttagcaccgcgagagccaacattgacgtgggaacaggaagtattcgtttccatatcaacgggaaggaggaaaagtttgagtttcaaccaaggacggaacagtgctccatggtcagaatcaagtacgggccaaacctgcagaatattcaagtggtcgaagtggagccacccaaaacggatagcttggtgaaattcatgcagaatttcctggagaaggaaacaacgatgcccaggaaccgttattga

SEQ ID NO: 14746 - DNA, 4500 bp, Oryza sativa
  Clone ID: TFbOSC900356j.C1.o3.fg
atggctactcccgctaggttttcaactaagcctcatgttttcgatggaacggattttactcattggtgtagtaggatgcagtcttacattatggctaaagattatgatatttggagaaaagtttctcatgcttatgtgattcctgaagttattaatactgctgctgaaaaaactgcttttgaacaaaattgcaaagctcgcaacatttttttgagtgggatttctcgttctcattatgatcgtgttgcacatcttgaaactgctcatgagatttggaatgctttgaagaattttcatcaaggaacaaataacattaaagagcttcgtcgagatctttttaaaaaggagtacattaagtttgagatgaaacatggagaagctttagatgactatctttctaggtttaataaaattttgagtgatcttagatctgttgattcttcttatgatgttaattatccacaatctgagatttcttgtcactttttgaatggtctcgacatgtctatttgggagatgaaagttacatctattcaggagtctgttaacatgaacaggaaaagaggtggtccaaatcgttgctttgaatgtggttcaattgatcatcttcgttcgcattgtcctaagcttgggagaggcaaaagagaaggcaaagatggtgagaagaccaacaacaacaagcccaacaactacaagtcgaagggttctaaccaagggaggaagatggagaatcttaggaaggcttttcaacaagtttgcgccgctttcgagccactaagtgatgtagatggtgaaagtggagatgatgacaagggaaagaacgtctccgatgtttgcttcatggcgcgtggtgaatctgacacagagtatgaagacaatgaggtgagtgcttttgaggaagctattaatattttgagtgcaaaaaataaaaagtgtgagaagatgtataaaaaacaggagtttatcattaaatctcttaaatctgaaattgatagattaaaatctcttattcctaatgatgatgattgtgaaaattgtgaggttttaatgaatgagatttcaaaaattagagatgttaatgctgcacatgatttgaaaaatagaccttctcttgcttgtagttttgctctgcacacacgcactttggatgagttgtttttaactaaaaagttgttgcaaaaatatcaaattgctttttatgctagtttgatgtttaacatgatttctgctaaaaagttaaaacaacatcatgatgttttggattgctcaacatgtaatttgaataacatgaaactaaaagatgctttaggtcatgttgagtacatggaagatgttgtgaaaaacaatgaagtgctttcttgccccaaatgtcggaaaagcaaaggtgtaatggtagattgtgaaaattgtgttaatttggaaaaagaggtttcttatttgaaaaattctttgctaagattttctgatggtgttggtgctagaagtggtgagattttgattaaacctgatacaaataaaactgtgtttaaatctgctggtatcatgtctactatgagtgcatcttcttcaaaatccaatgttgtgcatgcaaaacctcctgtttctgcttgtgttgctaaatcttctagctctaacaatgtgtctaaacaacgtgaaaaatatacttgttctttttgtggaaaagatggacatattgttgatttttgtttcagattagctcataaacagaaaaaggagagagagattgcttttgcaaaatcaaagtggcaaaaatctggttttccctcgaagaaaccggtcagaccgcagtgggtcccgcggtcagactggcgaccggtcagaccggctgaacagcctcgatcagaccgggcaccggtcagaccggcggtacagaggcggtcagaccggcccccggctttggtggcaaggaaggagaacgtgtggattgtggattccggttgttcgtggcacatgaccggtgataaagattggttctcctccctcaaaaaggcatccaagactgaatcaattgtctttgctgatgcttctactagtgtcgttgtcgctacaggtatggttaaggatgaagcttttcaacactttcgtggtttgtttcttcgattggagcttgaatttcctggtttgagaagaattcgaagtgataatggtggagagtttaaaaatgcttcatttgaacaattttgcaacgaaagaggtcttgaacatgaattttcttctccttgtgttcctcaacaaaacggtgttgttgaaaggaaaaatcgtgttttggttgagatggctagaacaatgttggatgaatacaaaactcctagaaaattttgggctgaggctattaacattgcttgttatatttcaaatcgagttttcttgcgatctaaacttggaaaaacttcttatgaacttcgatttggtcatcaacccaaagtttcacatttgcgtgttttcggttgcaagtgctttgtcttgaaatctggaaatttggataagtttgaggcacgccctaccgatggattgtttcttggttaccccgcacacactcgtggctatcgtgtacttattttagggactaacaagattgttgagacttgcgaagtttcttttgatgacgctagtccaggtactagacccgatatttcaggtacactgtcacaggttcagggggaggatggtcgtatttttgaagacgagagcgactacgacgacaacgatgaggttggctcggccggtcagaccgggcgccaggccagtcagaccgccggcacacctccggtcagaccggctcatgaggagcggtcagaccggccaggttcgtcgggttcgggtactgttgatgctgatcaagatggtcctccagagaattcaacttcgaacagtactgatacagaacgtggatcaacttcagaagtcgctgctcctttgcacattcaacgacgacatccgccggaacaaattattggtaatataggtgagcggactacaaggtcaaaggtaacggctcatgatgtttgtgcaaattctgcatttgttgcttcttttgaacccaaagatgtgtcacatgcattaactgatgaatcgtgtattaacgccatgcatgaagaacttgaaaattttgagagaaataaagtttggactttagttgaaccaccttctggacataatgtcattggaaccaagtgggttttcaaaaataaacaaaatgaggatggtttgattgtgagaaataaagctagacttgttgctaaaggttttactcaagttgagggtttggattttgatgaaacttttgctcctgtttctagaattgaggcaattagacttttgttggcttttgctgcttcaaaaggttttaaattgtatcaaatggatgtgaaaagtgcttttctaaatggttttatacaggaggaagtttatgtcaaacaaccaccaggttttgaaaatcctgattttcccaaccatgtttttaaattgtctaaagctttgtatggtttaaaacaagctcctagggcatggtatgatagacttaagaactttttgcttgcgaaaggttttacaatgggtaatgttgataaaatgctttttgttcttaagcatggtgataatcaacttttcgttcagatatatgtggatgatatcatctttggttgttcgactcacgctttggttgtagattttgctgagactatgcgcagggaatttgagatgagcatgatgggtgagttatcgtactttttgggattgcaaattaagcaaacacctcaaggtacttttgtgcatcaaacgaagtatacgaaggatcttttgagacggttcaagatggagaattgcaagtcaatttcaataccaattggttctacagctgtgctggatcctgatgaagatggtgaagctgttgatcaaaaggaatatagaagtatgattggatctttattgtatctaactgcttctaggccagacatacaatttgttgtgtgtttgtgtgcacgctttcaagcttctcctcgtgcttcacatcgtcaagcggtcaagcgaataatgaggtatttgaatcatacacttgagtttggaatttggtattctacttcatcttctatatgcttaagtggatattccgatgctgattttggaggttgtagaattgataggaaaagtactagtggaacatgtcattttcttggtacatcattgattgcatggtcttctaggaaacaatctagtgttgctcaatcaactgctgaatctgaatatgttgctgctgctagttgttgttcacagattctttggcttttatcaactttgaaagattatggtcttacttttgagaaagtacctctattttgtgataatactagtgctatcaatattgctaagaatcctgttcaacactcacgcacaaaacacattgatattcgttttcactttttgaggaatcatgttgagaaaggagatattgagttgcagtttttggacacaaagttgtaa

SEQ ID NO: 14747 - DNA, 3723 bp, Oryza sativa
  Clone ID: TFbOSC11344j.C1.o8.fg
atggctaataagactctccgcgagttcgctgctccctctgctgacaatgtggccattgggccgcaggtcaacataggggacgtggatttcgacttgaagtccagcctcatcacgattgcgcaggcaaacccgttctgtggtgagcctaatgaggggtccaatgctgatctgcaacagttcctggagatctgtagcacgtacaacatcaagggcgtcaatcccgacaccgtcaggctgcgactgtttccgttctcccttctcgggagagcgaagcagtggttctatgtgatgaggacatcaacaccaacgatacatccacacttccacaattacaacttcatgttgcttgttcatcttgttcttgctggttctcgattgcttgcaggaacaaataccctcgtagttgggctgatcgtgcatccgtcgagattcacgaccacctctggagttggggtaacgattgctaaggcgcaacatccccggatagttgtagtcggatcgccaacgtcactccatccaatcgacttatccctctcatcgaaagatcgagacaccctcgagcacatcaggtggtatcagagcccaagttgctcgtttttctttgactcattacacagcccacccatagctccaccggttcgactaacacttgacagggattcagctaccaaggcatcaatacaccttctccagaggttcgtccaagtccgacggttgccatcacctcctgtttggcatgatgagaattggttagtgagggaccgcacacaagggctcgaggaggatgtttgtatcaccaatgaaaagcttggtcatgttgaacgcacgcaaattgattccaacaccaagcttaccaccttggaagcttctgttgcgacggtgaacaccagtcttgatggtattgtgtggcgtcttgatgagatggcccgagcatcccaccatggtagtgagatggatgaccatgactacgttggtgattctgaggatgatgcggaccagcgacgacatcgcttcaatcgccgtggtgtggctcatcgtcggccacgccgtgaggtacgaaataatgatgattcatttggtaagattaaattcactattcctgcttttgatggtaagtatgaccctgatgcctatctttcatgggagttagtagtagatcaaaagtttgcttgccatgatgttcctgaggataagagggttagggctgccaccagtgaatttactgattttgcttctgtttggtggtgtgaataccgtcgtactcatataaatgctttgccacctacttgggatgatttgaaacaaattatgcgtgctagatttgtaccttcatattatgcacgtgacatgttaaataagctgcagcaattgaaacatggtggtactagtgtggaagaatattaccaagcgctgcaaatgggtagaactccatggacggctcggagtggcgctgcccccaccgatcgttcatcagtttcgacatcgacatctgcaccctccaacagcaacagcaacaaagcgtggccaacaccttctacggcccgctctcgtgcttcagaggttgcagaaaagcccaccaagagtgcctcctctgttgcttccacgggtagaacaagagatgttcagtgccaccgatgcaagggctttaggcacatgcaacgtgactgccctagcaagcatgttttggtagtcaaggctgatggtgagtactcgtctgctagtgatttcgatgaagatacacttacattgcttgtagctaacaacatagctagcgaggatgagaaacacatcggggctgatgtagcggaccaatatgagagccttattgtgcaacgtgtcttgagtgcacaaatgggcaaagcggagcagaaccagcggcataacctttttcagacgaagtgtgtcgtccacaagcgttcctggtgcacaatcatcgatggggccaccgggactaaaaatctggggatactatacgatacaaacgcagagggaagcagccagtactggaacgaagaagaggggaacgaggatccaaaccagtacttgaacgaggaggggaacgtggagagcgatgcggaggggaacgaggagggaaacgatgaggaggagtctactggaagtcatccctctgctggacagaagagggcacacggacaacgaggtgccgcaaagaagatagagggtcggcacatcgtaactgaggtggacgaagacggccgacctagtgccctagcagaagcagccaagaattttgtacaccacagcagttgggttgtgagggacaacgtgcctgtcagcacggtgtactggcgcagaacaagggcacgcagggataatgacagctttgtcccggactcagaaaaagagatgctgtggaccacaatgctcgagacgttcacgctacccgcaggtacgaagaacatagtgaaacagtggactctgaagaaaatagcagaacagttccagagcttcaagggagatctctacaagaaatacatcttgaagggactaacaccgaacttcgacgtattccaaaagctaagggatcattgggacgagttcgttgcttacaagacagggcaacaagggcaagcgatgatggccagaaacaaagaaaatgccgccaagaagaagtaccatcaccacttggggtcaggcggatatagcgtcgcaatgccgaagtgggaggagatggaggcaagtttgattgagaggggtatcgaaccggccaccgctaaatggccggatcgatcgaagttctggtactatgctcacggtggaacgcttaagccagttgatggctcccttgtcttcagtgatcagatacgcgacgctgccagtcgactaacggacgcggtggaagcctcttctcagggcacattccgacccgacagagagaaggaagagctgtcactcgccctacagattcccgagcatccaggacgaacacgagggaaaggcgtgattccgtggaagattggatttaaggaggacatccacacgtataggagtcggatgaggagcaagagagataccgaggcgaagattgcagatcttgagtacagggtatcgagctacgagctcagcatgcaagagaagatggcaaggaaggtggcgtcgggaatggccatcccaacggacccttccgggacttaccactgcaggccgattccagcaggatactcgagggtcgaagttgagctggtagaagccgcgtacaaggacctcgagttggactacccaggaggagacggtgagacgcatctacgagacacaagacacgccattatactatggtgcaagcggtacatcatcctccctgggcgacaagcggcatctcatgcaccatctcctctggctccgccatctcctcctgcaccatctcctccggttcctccgccacgtcctcctgcaccatctcctccggctcctctgcctcctccgcctcctccacctccaccgtgtctgcctgcaccacccaagacaaggtctcgccaagctccaccgcctgcccgcacaagggcaacgaagaaggcgaaagttgatgccaccaaaaacaaggagccaccgtacgattgtagtcaagaggagcttgatgcttatgtggcaggagaagtgaagaggcaacttgagcctcggagtcctgaaaagaagatacctattgacccgagcgtgaagaactacttcaagggaatgtccgcaacaaacaaggaggccttatag

SEQ ID NO: 14748 - DNA, 393 bp, Oryza sativa
  Clone ID: TFbOSC900326j.C1.o16.gm
atggcgagttgcgccacaccctccatcacattcttcttcaactcttcatactcgtcactgaaaagcctcgtcgctattcctctcttcggcaaacttggcctccaactcatcgcgcgagagcagcagctactgctacctttccttaccatgacgttggtgtatgaagcatctttggcagggcaatgtcgttgcaaggaaagggagcagcagctgctgctcacgcgcgccgagtggaaggccaagtttgaagagaggaagagcaatgaggcctatggtagcaatgccaagaagtaccatagcagattcgataagtcaaagattgattgccgaaagtgtggcaaatttggacacttcaccaacgagtgcgaagagtcgaagaagaaagtgatgtag

SEQ ID NO: 14749 - DNA, 1404 bp, Oryza sativa
  Clone ID: TFbOSC400718j.C1.o26.fg
atggtgaggatcgggactatgttcagggaggaacataggtctagtgcggtcaggataccatgtgaaaaggtgactagagtcaggattcttggaggtcaacttcggtcaacggtggggaccgggactaaactcagggagaagttgaggtccaaatggtcaaggataccgggtgacgaagttgaatacaagatggcacacggtggatggacaccgtgtgtgagagatcttcgcaacgggttttatgaggtccgtggcttggactgggaggagcagcagtggctcggttggatggcaggccgagtcggcccaggcggccaggagaccgagtgcgagctggcgaaggatcggcggcagggaggcgatctaaccggcggcgtgcgagcggtccgaccggcggcgacaggactacgtcgagatttccatcgatttgaggctcgcaatattttattgagtgggatttctcgttcggattttgatcgtgcttcacattttcaaactgctcatgagatttggaacgctttgaaaaattttcatcaagaaacttcaaatattaaagaacttcgtcgtgatctttttaaaaaggagtacattaagtttgagatgaaacctggagaagctttggatgactatctttctagattcaacaaaattttgagtgatcttagatcggttgattctgcttatgacaaaaattactctcaatctgaagtttctcgtcactttttgaatggtcttgacatgtctatttgggagatgaaatttacatcaattcaggagtctgtcgatatgtctactttgattttggattcactttacacaaaactgaaaacacatgagatgaatattctttctcgtaaaattgattctaattctagtgctttggtttcttcctcgacttctttggatgttggtgcttcttcatcaaattctactgttcttgctttgattaatgccatgtccgatgagtacaggaaaagaggtggaccaaatcgttgttttgaatgtggttctacggatcactttcgttcacgatgtcctaagcttgggagaggcaagaaggaagatgatggtagagttttggagaatgaagttgacaagaagaagatcacgaaggagaagaagaagaattgcatgcagtggctaatccaagaattaataagaacttttgatgaatcggaggatgaagatgagagcaaaggtaagcaagttgttgatctagcttttattgctcgtaatgcaagttctgatgttgatgaatctgatagtaatagtgaagaaaagcttagttatgatcaattagaatatgctgctttcaaatttgctaaaaaacttcaaacatgttctaatatgcttgatgagaaggatcacactattgagattctaaatgctgaattgatagattaa

SEQ ID NO: 14750 - DNA, 3102 bp, Oryza sativa
  Clone ID: TFbOSC414570j.C1.o19.fg
atgactaatgttaggtacaggaaaagaggtggaccaaatcgttgctttgaatgtggttctacagatcactttcgttcgcgatgtcctaagcttgggagagcaaggagggaagataatggtgatgagaagaccaatgacaagaagccgaagggtactttcaaagggaggaagatcaaggagactctcaataaggcttttgatcaagtctacgctgcgtttaagccactaagcgatgtagatggtgatagtagagatgaagataagggaaagaacatctccagtgtttgcttcatggcgtgtggtgaatcggattcagggtgtgaagacaatgagttaaaacaaccacatgatgttttggattgctcaacatgcacattaaacaagattaaactaaaagatgttttaggtcgtgttgagtacatggaagatgttgtgaaaaacaatgaagtgctttcttgccccaaatatcgtaaaagcaaaggtgtcatggtagattgtgaaaattgtgctaatttggaaaaagaggtttcttatttgaaaagttctttgcaaagattttatgaagattggctcataaacaaaaaaggagagagaaattgcttttacaaaattaaagtggcaaaaatctggttttccctcgaggaaaccggtctgaccgcagtgggtcccgcggtcagaccggctactgagcggcggtcagactggcttcggtcagaccgacgtactgaggcttcgacttctgcttgtgtgtacgctttggtggcaaggaaggagaacgtgtggatcgtggattccggttgttcgcggcacatgaccggtgataaaaattggttctcctccctcaaaaaggcatctaagactgaatcgattatctttggtgatgcttctacgagtgttgttctcgctaaaggtttggttaagaaaactggaagtaaagtttttgattcttgtggtgattctgtgctgaatatttctcgctatggaagagtgtttaaagctgattttgataatcatgtttcacctgcgataacatgtttggttgctaagtttgataaagatgtgatgttttggcatcgtagacttggacatgttggttttgatcatctcactaggctaagtggtttggatcttgttcgtggtttgcctaaacttaagaaagatcttgatttggtttgtacaccgtgtcgtcatgctaagatggttgcttcttcacatgctcctattgtttttgtgatggtggatgcactgggacagctattacatatggacattgttgatccagctagagtgcaatctgttggaggaaagtggtatgtgttggttattgttgacgatttttcttcatattcttgggttttcttcatggcaactaaggacgaagcttttcaacactttcgtggtttgtttcttcgattggatcttgaatttcctggttctttgaaaagaatccgaagtgataatggtggtgagtttaaaaatgcttcatttgaacaattttgcaacgaaagaggtcttgaacacgaattttcttctcctcgtgttccgcaacaaaatggtgtttttgaaagaaagaatcatgttttggttgagatggctagaacgatgttggatgagtatcacactcctagaaaattttgggcggaggcggctaacaccgcatgctatatttcaaatcgggttttcttgaggtcaaaacttggaaaaacttcttatgagcttcgatttggatgtcaacccaaagtttcacattttgcgtgtttttggtgcaaatgctttgtcttgaaatctggaaatttggacaagtttgaggcacgttctatcgatataatgtttcttggttaccctacacattctcatggctatcatgtacttattttggagactaacaaaattgttgagacttgcgaagtttcttttgatgaggctagtccaggtactagactcgatattacaggtacattgtcacaggttcagggggaggatagttgtatttttgaagacgatagcgacgacgatgacgacaaggtcggctcggccggtcagaccgggcgccaggccggtcagaccgcaagcacacctccgggcagaccgcctcaggacgagcggtcaaaccggccagggtcgtcaggttcgggttctgttgacgctgatcgagattgtcctccagaggctacaacttcgaccagtactggtacagaacgtgaaacaactttagaagtcgctgctactttgcatattcaacgacgacatccaccggaacaaataattggtaatctaagtgagcggaccactaggtctaagataacgactcatgatgtttgtgcaaattctgcatttgttgcttcttttgaacccaaagatgtgtcacatgcattaattgatgaatcatggattaacgccatgcatgaagaacttgaaaattttaagagaaataaagtttggactttagttgaatcaccttctggacataatattattggaaccaagtgggttttcaaaaataaacaaaatgaggatggtttgattgtgagaaataaagctagacttgttgctcaaggttttacccaggtggagggtttggattttggtgaaacttttgatcctgttgctagaattgaggcaattagacttttgttggcttttgctgcttcaaaaggttttaaattgtatcaaatggatgtgaaaagtgattttctaaatggttttatacaggaggaaatttatgtggaagatatcatctttagttgttcaactcacgctttggttgtggagtttgctgagactgtgcccaaggaatttgagatgagcatgatggcttctcctggtgcttcacatcgtcaagcggtcaagcgaataatgaggaaacaatctagtgttgctcaatcaattgctgaatctgaatatgttgctgctgctaattgttgttcacagattctttggcttatttcaactttgaaagattatgatcttacttttgagaaagtacctctcttttgtgataatactagtgctattaacattgctaaaaatcctgttcaacactcacgcacaaagcacattgatattcgttttcactttttgagggatcatattgagaaatga

SEQ ID NO: 14751 - DNA, 1570 bp, Oryza sativa
  Clone ID: TFbOSC15262j.C1.o2.np
atgcggaccccacatgtcaacctaaaggaccgcggtagaccgactaacgactgccgacgccgatacacgggtaccggggccgacaaccgcacaacgggcacgggggacaccgaaaggacgaggacagggcagcgagggagagggaaccttaccaccacgcgacgaggcgtgggaacgacaacgacgaacgggcgcggcggaggcagacgggcgcaacggagacgaacggcgaggggacggcttcggcggcgatccttgggcgaaggcgagacgcggccggcacgaggcttgacgacgcggagccgaggacgaacacgaggacggggctgcagcgatcttgacgaagcgaggacgacgaacgagaacggcttgacggagggacgaacgccacgacgatcgggaacgacgagaggacgaggacgacgacgaccggggccggcgaggaggctacgagggcagccggcgaggagacgacgagggcagccggcaacggctgcacggaggcgaggacggcgtggaacacgccgcagcgatgacgatgacggaggcggcgccgcaagacgacgagccgggcgaccgatgggacgtcgacgacgagaacgatcggagacgacgatgaaacgatgatggcaggccggcgtggaacacgccgctgcgatgttggtgaaggtggtggtgcagcggggcgacgagccgacgaggaggaaggagaggccggcgcggagacgacggcgttccggcgaaattcgggcgaggaggaggtgatgccggggaagaaggcgatgccgcggtgtcgaaggaggagacggcggcgtcgatcggcgcaccggcgatgaacagcagccggctggagggagtacagtggcaccaatgccactggttgccggcgggggcaccgttccggcgagtttccggcgaggagacgagccgagggaggcgacgacacggccggacgatgctccggtgaggagggagaggcggctggaggccggccggcgtcggagagggagaaggagaaggcggggagaggtggatgggggagagagccggccacgggaggagcgggaacggcgacgggaatggcggccggcggcaaaggaaggcggccggacttggcgcggccgttccgaacggttggatccggggcggatttggaggaggaaacgagctagggttccacgggagtgagaggagccgggcgggaggaggaagacgacgcccgcctgacgcgcgggccccacgcggtcgggcggcggcgtcagcgcgcgcacgcgcgcggcacgtgcgggaggggagcggctcgggggctggggcggcttgggccggcggccggcccaggaagagaggagggagaggcggcctgggccgggcaggccgggaggggaggggaagagagaggcagcccgggagggagagggaagagggaggtgggccgaggggaagggggcccaagaggaggagggagagaaaaaagggaggagaggaggacttcggactgggcttggcccaaaggaggaagaggagggacttttaggttttctttttattgaactttgataattgtttttgt

SEQ ID NO: 14752 - DNA, 4101 bp, Oryza sativa
  Clone ID: TFbOSC413084j.C1.o4.gm
atgaccaggagaagtgctaacacaggtgatggcaaccaacctgaaggcagcaaccacaaccatcagggcaacccacctccacctcctcctccgcctccaccaccactaccagacaccaacgccattctcacccaaatcctcgcccagcaggccaacatgatgactgctttcctccaccacctccaaaatccgccacaacttaatgctccaccaccacccccacaacactctaaactcgccgagtttctccgcatccgcccacctaccttctctagctccaacaaccccgtggatgcgttggattggttgcatgccgtggggaaaaagctagacactgtgcagtgcagcgatgaggagaaagtcatcttcgccgcccaccagctgcagggacccgcatctctatggtgggaccatttccaggctacgcagccagagggacagcctattacatgggctcgcttcaccgccgctttccgaagaacccatgtgcccgccggagtcgtggcccttaagaaaagggaattccgagagttgaagcaaggcaaccgcttcgtgatggagtatttgcacgagttcaacaacctggcccgttacgctccggaggatgtgcgggaagatgaggagaagcaagagaagttcctggcaggaatggaccctgagctgtccgtccgtctagtctccggggattatccggatttccaacgtctggtggacaagagcatccgcttggaagccaagcacaaggaactggagtcgcacaagcgccgcttggcaaatttccgcaaccaacggggtgctaaccaaagggtccgctacaccaatccctatccagggggatcctcctcgcagcagcaacaacagcagcagcaacctcgctccgcgcctcgacctcaattcgtggtgcgcgtcccacagccgcagcagcagcagaatcaacaagggactcgtgcgccccgtcctcctacgccaactatgcaacctggtcaaggccgcagggacgctcaaggtccgcagcgtctgtgcttcaactgcttcaagcccgggcactttgcggataaatacccgaagccaaggcgtcagcaaggccaagcgcctccccgccccaacaacggtggtaaggacgtcattcggggtcgtgtgaaccatgtgacggccgaggacgtgctgacaactccagacgtcatcgttgaacttcatcagatagaactgtcagaaattcccatcgtcagagagttcggagacgtgtttccggaagaactacctggtatgccgcccaagcgagagattgagttccggatagatcttgctccaggaaccactcctctgtacaagcgaccctaccgtatggcagcaaatgaactggccgaagtcaagaaacagttggaagagttgaaagaaaaggggtacatacgtccgagtacttccccctggggtgctcctgtgatttttgtggagaagaaagacaagacgaagaggatgtgcgttgactacagagctctcaatgaagtcaccataaaaaacaagtaccctcttccccggattgacgatctgttcgatcagcttaaaggtgccactgtattttccaagattgatcttcgttccggatatcaccaattacgtattcgtgaagaagatattccgaagaccgcattcactacgcgatacggactgtatgaattcacggtgatgtcattcggtttaaccaatgctcctgccttcttcatgaacttaatgaacaaagtgttcatggaatacttggataaatttgttatggtgttcattgatgacattctgatatactcacaatcagaggaagaccatcagcaccatctccgtctggtgttgggaaagttgcgggaacatcaattgtatgccaaacttagcaagtgtgagttctggttgtccgaagtcgaattcttagggcacgtgatatctgctaaaggagttgctgtggaccccgaaacagtgaccgccgtcactgattggaagcaacccaagaccgtcactcaagtccgcagtttcttaggtttggcaggatactaccggaggtttatcgagaacttctccaaaatcgctcgacccatgacacagttgttgaagaaagaagagaaatttgtgtggagcccgcaatgcgagaaggcgttccaaactctcaaagaaaagctggtttcctcgccggtgttaatcttgccggatactcacaaggacttcatggtgtattgtgatgcttcgcgccaaggattggggtgcgtgctcatgcaggacggtcatgtggtggcctatgcctcacgccagctacggcctcatgaaggcaattaccctacccatgatttggagttagccgcggtggttcatgctctaaaaatctggcggcactatctcattgggaatcgctatgaaatatatactgatcacaagagtttgaaatacatcttcactcagtcggacctgaatcttcggcaaaggagatggttagaactcatcaaggattatgatgtgggaattcactatcatcctggtaaggccaacgtggttgccgacgctctaagtcgaaaaagccattgcaacactcttaacgtccgtggcattccacccgaacttaatcaacagatggaagccctgaacctaagcatagttggtcgcggattcttggctacgttggaagccaagcccaccttgctcgatcaaatccgcgaggctcagaagaatgatccagacctgcatggactcctcaagaatatgaaacagggtaaagccgctggtttcacagaggatgaacacggaaccctatggaacggaaaccgagtatgcgttccagataacagagaacttaaacagttgatacttcaggaagctcacgaaagtccttattccatccaccctggcagtacgaagatgtacctagacttgaaggagaaatactggtgggttagtatgaagcgggaaattgcagagttcgtggccctttgtgatgtgtgccagcgtgtcaaggcagagcaccaacgaccggccggacttctccaacctctccaagtacctgaatggaaatgggatgaaattgggatggatttcatcaccggacttccaaagacccaaggtggatatgattctatatgggtagttgtggatcgattaaccaagacagatgggcagaccgagcgtctaaatcagatcctagaagatatgcttcgcgcatgtgtcctagatttcgggaagacctgggataagagtctcccctatgccgagttctcctacaataacagttatcaagccagcatacaaatggcaccttacgaagcgttgtatgggcgcaaatgccggacaccgctcctgtgggaccaagttggggaaagccaagtgttcgggactgatatcctgagagaagctgaagcgaaagtcagaaccattagggataatctaaaggtggcacagtcccggcagaaaagttatgcagataaccgtcgccgtgacctggaattcgcagtggatgattttgtgtaccttcgggtcacgccattgcggggtgtacacaggtttcagacaaaggggaagctcgcacctcggtatgtgggtcctttccgtatcgttgctcgacgcggagaagtcgcttaccagttggagctgcccgcctccttgggcaacgtgcatgatgtgttccatgtgtcgcaactcaagaaatgccttcgagtgccatccgagcaggccgactcagagcaaattgaagttcgcgaagacttgacctacgtggagaggccagtgaagatcctggacaccatggagcgcaggaccaggaaccgggtaatccgtttttgcaaggtccaatggagcaaccacgccgaggaagaagctacctgggagcgcgaagacgagctgaaggcagcccatcccgacctcttcgccagtccgccgccgtcctcgccccggacctcctcccgcttcggcatcgcctccttcggcttcgccgcgttctcgccgaccttgtccactcctccgtttcgcccgccgaccgccggagcaccgccgtcctcgtcgacccgagccgcgccgccgcctctctccgcttcggtcgccgttcccgtcatcgccgtcgacccggggtga

SEQ ID NO: 14753 - DNA, 1458 bp, Oryza sativa
  Clone ID: TFbOSC900380j.C1.o25.np
ggacctaaggcatcgaatctcagagccaacacatccaccacagtttagaactcagcaaggtggacaacaaaagcccagtttcagttccggacagcatagtggtcctactactatgatcgtttgtcagcacaggccctaccaaccaggaaatttcggctagaacagtagtgggagcaacaatggtggaaatcagaacaaccgtaatccagctccgcgcccgctgatggcacagtctcaagcttcgtagcccacccaacagaagaaggaagcaggaggaaagcctctcatttgtttcaattgcaatgaacccgtgcatttcgctgataagtgtccaaagccaaagcgcaatgggcccaagatcgttcaagctcgtgtcaatcacatatctacggaggaagctcaagcagcaccagaagtggttttgggtacgttccctgtgaacttatttcctgctacagtattatttgattctagcgctacacattcatttatatccaagaaatttgttggtggtacatgggttaagaaaagtggaacttagtgctccaatgaaagttaatacaccgggtaatagcacaagattggttagtttttgtccctctatgatgatagaaatccaaggatcaccttttttagccaatcttatccttctggagtgcaaagacctagatgtcatactaggaatggattggttgtcaaggcataaaggagttattgattgcgcaagttgcactgtcaccttggttgatgagaaaggggaagtggtaataattcagttcccaatgactcagaagaaaggagtagtcttgaatcaaatggaaggtgaaaaacaggatgaagtcgagaaagatgttcagaagttggaaaacattcccgtagtctgtgagtatcctgaagtttttccggaggatttaacgactatgccacccaagagagatatagagtttcgtatcgatttggtaccaggtacagctccgatctataagagaccgtacaggatggcagccaaggaaatggcagaagttaagaaacaagttgatgagcaattgtagaaagaatacattcgtccaagcacgtcgccttgggtgctccagtaatttttgttgagaagaaagacaagactaagaggatgtgtgctgattacagagcactcaatgaagttacaatcaagaataagtatcccttgccgaggatagatgatctgtttgatcagttgaaaggagcaactgtgttttcaaagatagacctgcgatcaggttaccatcagttgaggattcgagagtaagatattcctaagacagcttttacgacttgttatgggttgttcgagtgcacagtgatgtcttttggacttactaatgcacccgtgttcttcatgaatttgatgaataatgtgttcatggaatatctagataagtttgtggtgattttcatagatgatattttggtttattcaaa

SEQ ID NO: 14754 - DNA, 2151 bp, Oryza sativa
  Clone ID: TFbOSC22997j.C1.o2.fg
atgcacaccgtcaaggagacggagttacttgctgccaagctggatctcctcatgaaacgcttggacgaccacgagaaacggccacaaggcaccgttaaggccttggaatctcacgtcacgtgtgaggtctgcggcggcacgggtcattctgggaatgaatgcccggaaacctgtgaggaggtgatgtacatgggcaagaacaactggtatcgtccacaaggagctaaaaccactgatgcgctaagcaaaaagcttgctgccaatgataagatcttagaaaacataaatgtgaatctagatggctttgcttccgcatttcaaaaccagctgagctttaataagatgatagaaacccagttagctcagttggcatctttagtccctgcaaatgaatctaggaggattccggggcaacccgactcctccattgaaaatgttaaggcgatcacaacgaggggagttatccaaaagatccacatcaacgtgccgttgttggacgctatgcaagtgccaacatatgcccgttatctcaaggacatactcaacaacaagagaccactcccaacaacggaggtggccaagctgacggaacattgcagcaacatcatactccacaagctcccggagaagaagaaagatccggggtgtcccacgatcacctgctcgatcggggcacaacaaatcgaccaggccttgtgcgaccttggagccagcgtcagcgtcatgcccaaagacatctttgacaagctcaacttcacgtccgtccgttacccggcagggataacggaggatttgccagacaaaatacaggatttcttcatcccggttgattttgtggtgctggacatggacacggggaagaagacgccgctcatcttggggcgtccattccttagcaccgcaggagccaacattgacgtgggaacggggagtatccgtttccatatcaacgggaaggaggaagagtttgagtttcaaccaaggacggaacaatgctccatggtcagaatcaagtacggaccgaacccgcagaatattcaagtggtcgaattggagccacccaagacggatagcctggtaaagttcatgcagaacttcctggaaaaggaaacaacaatgaacaggaaccgttattggaggatgccggtaaaatcacctataccggccaagaagttagagcaaccggctcagaagaagccgtctaccgcaccaaaatcaaataaggtaaattgtatgaggaggcgactgtctcgtctgttcaaggggtcaggctctccatcaagtcatcatggcgagtctagcactcgttcatcagcggatgtttcgatggaagacgccgacgctccgcgacaactcctgagtgacactgacctcgaccttgtcagtgatcgggagagacaagcctactacatgcgaagcgaccgggagtatgctcacacgcgagaatactcaccggagttgctgaaaaagatagaaatagaagatgatattttttttcgctttttccgtaaggagttcacgctcacatggaaaggcttgagtacacttcttggttttcacgattcctgtaaaatcgatctccagaaaggaatttctgggttcgagaaaaataggttttgggaagatatttttggtgctccaatttgcaagaaacctagaacaaatgatatccataatcctacacttaggctcatgcacaaatggattgctatgactttgtttcctagaagtgatctgagacccattaggggagatgaattaattatcatgtttgccatgatttatgaggcaggttgggcaccaactggggatgcacccggatggacccaagctctacgctatagcatggactctcaacttgggcaagcgccagtgaggaccggtggcatgcgcctcatgacatccactggggagacaatcaaccttccagatcaagtggacttgggtgaaatcactaggagaatggacacccttgatgtgcagacgggggagatccaatacaacctcacggaacacatagctcaaacgcaagaatggcaacaatctgctgatgctcagttcaccaacatcaacaacatgatgcagcaacagcatgatgaccttcaggcgtactttcgctttcaggggttcaatccttatcaaggaccctga

SEQ ID NO: 14755 - DNA, 5415 bp, Oryza sativa
  Clone ID: TFbOSC13173j.C1.o9.fg
atggctccgtccccttccctcagccccgacacccacccccgccataggcgatttcgctcctcgccggagcatctcgtcggcgtcttccaagcctcgctagcatccccaaccctcgaaaccttccccatcccggttccccgccacaaccctcctctctcagcccaaaccccctcgccaaaatcccctttctccacccacccagatccaccagaaaccattcaaatctccggcattgattcctctactgcagcttcgatttgtctttcccctcgattggactcaaggttcgtcacactgcgtcctcaagatcccagcaaatcctccacgctccaagatctgccagccacagcgccgcttggagcactccgcctttactctgaggtcctggccgctcctgctcccatacccctagctgctagttccaagtcccaacaggagctgtctccgcccaaaatccggtccctcgccggccgccttaacttccctgcagcgcaaccctgctcttccgtcactgagcgccttaacccagtcaacctgacggatccagatgtgggttcccaaggagcagctcccaaagatcttcgtatcctcaagagtggacgcaaggttcagatgccagctcaaatcctttctgcagtgcagcatccgagaggtagccttgatgtctctggttcagagtggcaagaagtcaaagcaaatcgatggaggaggagccctgctcactctcccgatagcaccaaccaatttcaattgcagttaagccgagcgaggttcctcaagcatatggaaggtaaatgctttcgttgtcttcggtcagatcatcgagttattgaatgcagagagccccttcgctgctggttctgtatgggcattggtcattgtgcttcctcgtgcctaaagagaaaatcctttaaatccacagctacctcgcagccgctcccccaaacctccgttgaatctttccctcctctcgccccaattcgtttcccccctaagttgctcccgcgatctgctctttcctccccttcctccatggatgacctctctgctcgtccctctcaagagcctgtggttatttcggccacgggggagattgagcgactgaggcagaaattctctgctcgctctattgttgcctggcaggttggccatcagggctccaatgtggatcccaatgtgtttgcagatgatgttcattcggccttccgcatcagacgctcagacattcaaattacgaagttccaccccgaagacttcttcatcacctgttccagccagaatgatagagatgccatcctgaggcagccccggcttgccaccaagtcggggagggtttatctcttctgcccgtgggaggaaggccttcacggcgttccggcgcgcttcagatacagagcaagagtgtgcattgaggggatcccaatgcatgctcgaacagaagaaacggcagccaagatcattggaagaaagtgctccatcaactatgtcgaagagtactctcgccgccagaactacaaccgcaccttcgacatttggatttggactgacgcaccaaagttcatcccgcgttcctccactttctctatcactaatgctgatgaagaagggctccccacagacatttctcttctagaccttgaacctcaccacaaccctccgcctgacgagccaaaggaagggtggacctacgacatcctcgttcacatcgacaccctagaagaccttcacagcaaggtggcccgcgcgtacgactggcagtacggcgcagagactgatgaagggagcctgatcccaaaagaggtccagatgatgaagacgaagacagagagcagcgctcccaggggtagcgtaggagccgttccctttggagccgtgtctgtggacggtcgtaaagtcgtagccgtgtctgtggaagagatcaacaagtttacaaccaagacacgtgcggacgccagcatgttcgagcgccctccgctggcagcagctgctcctaccgttctcgctcgccaagtgcagtacgaccgcccccggctgtctagaagaggtacaagatccccccgcattcagtcgtctccacaagtcccttcgccttgcaagagcgcaattccacgccgcagcggcagccctgatgagggggcaaatgccttggccactcttttttctccatcctcatccttggttgtacagcctgaaccggtgattttttcgcagggacaggtcgctgtgctggagttgctggagaagcatcttgaccccatgctccatgaggccacaatccagcattctctgtactcaccagacacctcatcgccaaggatcgcctcccccgtcttcatcccttccagtacccagctgggttctggcgctgctgacggggtcctaggcgctgccaagaacctccaggagttcgcggcaagcctctcaactcccatccagccggcgatccttcctactcctgatgtgagctcccgtcgcccttgccgcaataaggtgacccttcactcccctcaaaggcatagtgaacgcctagcacgcaagcgcagattcgggaccaagattgaacatttcgcacaagaaattcttgcaaaaaactttggctttttaaacgatcaaactcgttttgatgaaaacatcgaaaaactttatgtgcagcatttcaagaagcctatatcccctgcctcgatgaagattatcacaaccttggtcgagaagggtggatgcgaaggcattcacctgaagactgccaagaagaaggcggcggtggtgccaatttgtcttcttgttttcattatgtctcaacacaatgtacacctgttcaactggaatgtgagagggctaaatgcccaggccaaacaagatgtagttaaagcctttgttcataaagttggtgcttctattgtgtgtttgcaagaaaccaaattagcaacagttactgacagaaacatcttaagtatcctaggtcaaaactttgtccaatcttatgctttcctgccggccagtggaactagaggtgggattattcttgcctgcaatgcaaaccttttttctttgtcagaagctgtacagggacaattttctctgtcagcaacaatcacaatgtttgaggagggcctccaatggtcaataacggtggtatacagccctcaattggaagctgacaaaatagccttcctagcagaaattgaagccatgtcctcgtttatgaagccggcttggcttctaattggagacttcaatctaatttataaagtttctgacaaaaataatgatcgcctaaataggagaatgatgcagcgtttcaaagggctaattgacaagattgaggtaaaagaacttcatctcccaggccggcgcttcacctgggcaggagcgggccaaaacccaactcaaacaaaaattgaccgtgcctttgtcatacctgactgggatatcatgttttcaaacgcctctttgcaacctctctcttcgtcgacctcggatcatgcggcactctttttaataggaaatgaaatgaggggtaaacccccaaattccagatttgaagctttctggttaaaaattccagggtttttagaagttgttgaagattcttggaaccgccctctcctagctgcaaatccgcttgccatcctgtacatcaaactaaaacggctagctcgagacctcaagagatggaatcggcaaaatgttggagacatcaagcttcagttagcagtggcaaatgaggttgtttttcaactggatgttgcacaggaaacaaggcccttatcggatgatgaatgtgttcttcgcagcaacctaaaagctagaatcctaggtttggctgtcctaaacaagattcaaattcgtcaacgatcaagactaacatggctaaaggaaggcgatgttaattcaaaatttttccatatcaaagaaaactcccgaaggcgaaagaatttcattcaaactctccagactcaaaatggcatagcagtttcggctcaggaaaaggctgacactctttttcgtttcttctcagacagacttggcactccatcacaaaggcaatcctgtctcaattgggctaccctaaatttcccttctttcgacctagatgatcaagaggatgatattacagaagaggaactcaaacatcctgtgttctccgtgccgtcagaaaaggccccaggaccggatggttacattggagcttttttcaaacatgcttgggaaataatcaaagaagatctgctgctagctgcaaaatcgttcatggccctaaatacaaatcaacttaaaaagttgaacacagcttacatctgcctcctcccaaaaaaaagaaggagcggctggactaaattgcttgcaaataggcttgctccccgactaaatgaattagtctctcaaaaccaaagtgctttcgtcaggaaaagggcaattcacgacaatttcctcttcgtgcagaatttagtgcatattctgcatagaaatcacaaagaagcgcttttcctaaaggtgcacatcacaaaagcgttcgatacagtgggttggccttacctgttagaagtcctccagaggaaagtggacttcttaccgctcattgaaaagattggatcgcgtctcccaggttggaaaggtcgatacttcacatctgaaggtaggagaatcctggtgcaatcagttttaagtgcaatgccgacctttcatctatctgcccttcaagcccccaaatgggtaatcaagagaatagatcgtttccataggtcatttttatggaaaggtgaggatcctagcaaaacaaacccagggagtagcttagtaaattggagtacagtttgcaaaccgaaatttttaggcggccttgggatactggagttggagaaattccctcgcgctctgcgacttcgatggttatggttcaaatggaaagaggaaaataagccatggattggaatggacataccctgtgataactgtgacatgagactttttcaagctgccacaacaatctctcttggcaacggtgaaaaaacagctttttggcaggacaagtggctgcaaagttcatgtccaaaagatattgcacccatgtgtttcaacctagctaagcgcaagcagagatcggtcaaaacggagcttacaaataattcttggcttctctctttccggaatataacgtcgatagaggaaatcaatgaagtcgttcagcttggagaaaactctcacggctcaaaacctcctgcgccgcaacctcctgcgccgccattggccttgcaattggatttgcagtttgtgtggagatcgcctttgaagacaccaaccatcttttcaatgggtgttctttcttcaggaaagtttggagctcgatatgtcaatggcaaaatatccaaggaacccaacctccagatgacattgcagcttggtggatcgacctag

SEQ ID NO: 14756 - DNA, 2337 bp, Oryza sativa
  Clone ID: TFbOSC400773j.C1.o74.fg
atggagagtgagagaccagatgcatctgcagaagatagaagattagaagacctgcgcaaacgagaggagagatgctgctcgtacagaagtcaggagattgcacagaagaagaaacattttgatgagcttgcagcaagagaagaaatacagtcgtacgtaatgcaattgtttatttgtttaggaatggcaaactttagagtatattatggcgacggagaaattatatcgaacaaaatgggtgttgacttgagcaactttagtcagtgcacactgtatcacccaaatcgggacaatcttagaatgcccgaagtgtggtactggttgacatgctcattctcattggacccacaagtctatagtgttaatgtcagtctgttatggagtcgttcggccacggacatccaatggcaactgaaagaagtaaccggaagtcaatcatggaagaattggttgcaaggttgcagacgccgaggatacgagatggccatgttggtgcaggcttgtccaaggagggctcgaccaaacagttcgttcggtcagtccgatatgcagggagaggcatgtgctcaatcgagtgcatttcatgtggaagtctcccggcataatgaagacaatatcagcattgacatgcagagccttcatattgaacaagttgaacaaacggtggttgcgatgccgagcacggtgcaacaagatggttcgggtgaagccgatgaaggggaagagataaatgctatagtggacgagattgagagggttgataggaatgctcgtgaggatgaagctaacttggcttgggaggaggatgaggaggaagatgatgaagagtacgaagtccaacctgttccagcatcatggaaccgtgaagatcttggatatatcagagagaacgagcttcatgactcaatatggttctatggtgatggcccaatcaacaagggcgcaatgttttcgacgaagtctgcatttcaggatgcagttaagtcgtggtcctttaagatgcagaggcagttcaaagttctcaaatcaagcccgaccgtctacaccgtgttgtgtgagacggaagggtgcaattttagggttcatgggcatgtgccaaagtacgagtcgtacaggctcgtgtcgagagagggcacaactgcagtagagactggtgaatggtacactattagctaccacaaagcgtggagggcaaagcaaaaggcgacggagaaaaggtatggatcattcgaggtggcatatgacacattgccgcagatcctagatatcctgaaacagagaaatcatggtacctatgttgctgtccaagacagggattctatgcgacctccgaatttccatgtaatggaaagggcattcttttcattcggagcctgtattcacgcatttcaatggtctagacccgttctatgcgtgcacggtacttttcttaccagaaagtaccgtgggtctattctgatagctgttggtgccgatgcgagcaaccatataataccggttgcattcgcttttgttgagagcgagaactacgacagttggttgtggttcttgcagcatgtcaaatggggtgtggtgcaaagcagatcgaatgtctgcattattcatgatagaaatgctgggttgcttaaggcaatcaaggagctcaaagaggatgagaacggagcatactactggccggatttgcatagtcgatggtgcatgcgtcacatgggcgcaaactttttcaaacagttccatagcaaaaggctaatgcaaatgttcaagcggctgtgtatgcaaaaccagcgacagaagttcgaagatctttggaggcagctggatgaagcaacatcagcacatgttaagtcaaaaaaggattccaagaaaaatgaccaaccagccccggaggccttagaaccaatggacggtcttattacttccaacgggttggacagcacagcatacgtctctcctttctacttgaaggatagagtgttgcaagcttggtccgcagatatactaggctatcgggcacatgagaacctcatacgaaccggtggagacgatactgtgtgggttcctgacttacatctgttaaagggtggtaaaggccgacgacaaacaagacgtttaagaaatgacatggatgagtccgaagctggtggccccattaggagatgtgaaacttgtctgcagtatggtcacaggactagagattgcacgaacaacaacgatggtacctcgtcgacagctcagcaaggccaacaaacatgggaatcatcacgtgctacaagggctaggaggacaagaaggggcacgggttcctcccgcaacacaccggaaggcaccaccctttga

SEQ ID NO: 14757 - DNA, 5214 bp, Oryza sativa
  Clone ID: TFbOSC900041j.C1.o11.fg
atggctccgtccccttccctcagccccgacacccacccccgccataggcgatttcgctcctcgccggagcatctcgtcggcgtcttccaagcctcgctagcatccccaaccctcgaaaccttccccatcccggttccccgccacaaccctcctctctcagcccaaaccccctcgccaaaatcccctttctccacccacccagatccaccagaaaccattcaaatctccggcattgattcctctactgcagcttcgatttgtctttcccctcgattggactcaaggttcgtcacactgcgtcctcaagatcccagcaaatcctccacgctccaagatctgccagccacagcgccgcttggagcactccgcctttactctgaggtcctggccgctcctgctcccatacccctagctgctagttccaagtcccaacaggagctgtctccgcccaaaatccggtccctcgccggccgccttaacttccctgcagcgcaaccctgctcttccgtcactgagcgccttaacccagtcaacctgacggatccagatgtgggttcccaaggagcagctcccaaagatcttcgtatcctcaagagtggacgcaaggttcagatgccagctcaaatcctttctgcagtgcagcatccgagaggtagccttgatgtctctggttcagagtggcaagaagtcaaagcaaatcgatggaggaggagccctgctcactctcccgatagcaccaaccaatttcaattgcagttaagccgagcgaggttcctcaagcatatggaaggtaaatgctttcgttgtcttcggtcagatcatcgagttattgaatgcagagagccccttcgctgctggttctgtatgggcattggtcattgtgcttcctcgtgcctaaagagaaaatcctttaaatccacagctacctcgcagccgctcccccaaacctccgttgaatctttccctcctctcgccccaattcgtttcccccctaagttgctcccgcgatctgctctttcctccccttcctccatggatgacctctctgctcgtccctctcaagagcctgtggttatttcggccacgggggagattgagcgactgaggcagaaattctctgctcgctctattgttgcctggcaggttggccatcagggctccaatgtggatcccaatgtgtttgcagatgatgttcattcggccttccgcatcagacgctcagacattcaaattacgaagttccaccccgaagacttcttcatcacctgttccagccagaatgatagagatgccatcctgaggcagccccggcttgccaccaagtcggggagggtttatctcttctgcccgtgggaggaaggccttcacggcgttccggcgcgcttcagatacagagcaagagtgtgcattgaggggatcccaatgcatgctcgaacagaagaaacggcagccaagatcattggaagaaagtgctccatcaactatgtcgaagagtactctcgccgccagaactacaaccgcaccttcgacatttggatttggactgacgcaccaaagttcatcccgcgttcctccactttctctatcactaatgctgatgaagaagggctccccacagacatttctcttctagaccttgaacctcaccacaaccctccgcctgacgagccaaaggaagggtggacctacgacatcctcgttcacatcgacaccctagaagaccttcacagcaaggtggcccgcgcgtacgactggcagtacggcgcagagactgatgaagggagcctgatcccaaaagaggtccagatgatgaagacgaagacagagagcagcgctcccaggggtagcgtaggagccgttccctttggagccgtgtctgtggacggtcgtaaagtcgtagccgtgtctgtggaagagatcaacaagtttacaaccaagacacgtgcggacgccagcatgttcgagcgccctccgctggcagcagctgctcctaccgttctcgctcgccaaggacaggtcgctgtgctggagttgctggagaagcatcttgaccccatgctccatgaggccacaatccagcattctctgtactcaccagacacctcatcgccaaggatcgcctcccccgtcttcatcccttccagtacccagctgggttctggcgctgctgacggggtcctaggcgctgccaagaacctccaggagttcgcggcaagcctctcaactcccatccagccggcgatccttcctactcctgatgtgagctcccgtcgcccttgccgcaataaggtgacccttcactcccctcaaaggcatagtgaacgcctagcacgcaagcgcagattcgggaccaagattgaacatttcgcacaagaaattcttgcaaaaaactttggctttttaaacgatcaaactcgttttgatgaaaacatcgaaaaactttatgtgcagcatttcaagaagcctatatcccctgcctcgatgaagattatcacaaccttggtcgagaagggtggatgcgaaggcattcacctgaagactgccaagaagaaggcggcggtggtgccaatttgtcttcttgttttcattatgtctcaacacaatgtacacctgttcaactggaatgtgagagggctaaatgcccaggccaaacaagatgtagttaaagcctttgttcataaagttggtgcttctattgtgtgtttgcaagaaaccaaattagcaacagttactgacagaaacatcttaagtatcctaggtcaaaactttgtccaatcttatgctttcctgccggccagtggaactagaggtgggattattcttgcctgcaatgcaaaccttttttctttgtcagaagctgtacagggacaattttctctgtcagcaacaatcacaatgtttgaggagggcctccaatggtcaataacggtggtatacagccctcaattggaagctgacaaaatagccttcctagcagaaattgaagccatgtcctcgtttatgaagccggcttggcttctaattggagacttcaatctaatttataaagtttctgacaaaaataatgatcgcctaaataggagaatgatgcagcgtttcaaagggctaattgacaagattgaggtaaaagaacttcatctcccaggccggcgcttcacctgggcaggagcgggccaaaacccaactcaaacaaaaattgaccgtgcctttgtcatacctgactgggatatcatgttttcaaacgcctctttgcaacctctctcttcgtcgacctcggatcatgcggcactctttttaataggaaatgaaatgaggggtaaacccccaaattccagatttgaagctttctggttaaaaattccagggtttttagaagttgttgaagattcttggaaccgccctctcctagctgcaaatccgcttgccatcctgtacatcaaactaaaacggctagctcgagacctcaagagatggaatcggcaaaatgttggagacatcaagcttcagttagcagtggcaaatgaggttgtttttcaactggatgttgcacaggaaacaaggcccttatcggatgatgaatgtgttcttcgcagcaacctaaaagctagaatcctaggtttggctgtcctaaacaagattcaaattcgtcaacgatcaagactaacatggctaaaggaaggcgatgttaattcaaaatttttccatatcaaagaaaactcccgaaggcgaaagaatttcattcaaactctccagactcaaaatggcatagcagtttcggctcaggaaaaggctgacactctttttcgtttcttctcagacagacttggcactccatcacaaaggcaatcctgtctcaattgggctaccctaaatttcccttctttcgacctagatgatcaagaggatgatattacagaagaggaactcaaacatcctgtgttctccgtgccgtcagaaaaggccccaggaccggatggttacattggagcttttttcaaacatgcttgggaaataatcaaagaagatctgctgctagctgcaaaatcgttcatggccctaaatacaaatcaacttaaaaagttgaacacagcttacatctgcctcctcccaaaaaaaagaaggagcggctggactaaattgcttgcaaataggcttgctccccgactaaatgaattagtctctcaaaaccaaagtgctttcgtcaggaaaagggcaattcacgacaatttcctcttcgtgcagaatttagtgcatattctgcatagaaatcacaaagaagcgcttttcctaaaggtgcacatcacaaaagcgttcgatacagtgggttggccttacctgttagaagtcctccagaggaaagtggacttcttaccgctcattgaaaagattggatcgcgtctcccaggttggaaaggtcgatacttcacatctgaaggtaggagaatcctggtgcaatcagttttaagtgcaatgccgacctttcatctatctgcccttcaagcccccaaatgggtaatcaagagaatagatcgtttccataggtcatttttatggaaaggtgaggatcctagcaaaacaaacccagggagtagcttagtaaattggagtacagtttgcaaaccgaaatttttaggcggccttgggatactggagttggagaaattccctcgcgctctgcgacttcgatggttatggttcaaatggaaagaggaaaataagccatggattggaatggacataccctgtgataactgtgacatgagactttttcaagctgccacaacaatctctcttggcaacggtgaaaaaacagctttttggcaggacaagtggctgcaaagttcatgtccaaaagatattgcacccatgtgtttcaacctagctaagcgcaagcagagatcggtcaaaacggagcttacaaataattcttggcttctctctttccggaatataacgtcgatagaggaaatcaatgaagtcgttcagcttggagaaaactctcacggctcaaaacctcctgcgccgcaacctcctgcgccgccattggccttgcaattggatttgcagtttgtgtggagatcgcctttgaagacaccaaccatcttttcaatgggtgttctttcttcaggaaagtttggagctcgatatgtcaatggcaaaatatccaaggaacccaacctccagatgacattgcagcttggtggatcgacctag

SEQ ID NO: 14758 - DNA, 788 bp, Oryza sativa
  unsure (1)..(788): unsure at all n locations
  Clone ID: TFbOSC6545j.C1.o1.np
agggacccatgtccataagtgagttcattgccaagatgcgatcctttgactatgagatgacggggcaaggaaagctccttacgatgaagagctgatagcgtacatcatcaacggcttcgactcagactttgactcatcggttataggattgatgccagcgacaagaattgctcctctcttaatctctcatgtgtattcccaacttttgagctatgaaaacaggatcagtattcgccaaacttacctccgtatttcggcaaacgctgcaaatcgtggcggtcgtggtggtcgcggtggaaatcgcggtcggtgctcctcccgccggtcgcagtgccggccgtggtggcgcagtcggggccaacactgggcgagggcgcggtaaggacacccacccggtgtgtcgagcgtgccataaaggaggtcacattgcaagtgactgctggcaccgctatgatgagaagtacgtctccgacgagaagctaggcgacgcggccacatatgcgtatggtgttgacaccaattggtatgtggacaccggggcaacagatcacatcacagggcagctagataaacgtgactacatggagaagtacaagggaacagatcagatccacactgctagtggcgaaggtatgaatatttaacatattggtcataccattgttcctacccctagtagtcccttacctcttaaaaatataattcatggtccccaagcaatcaaagaatttagtctctgttcatacactcatagggtgcagaaatgatcgcagtcactnnttcccagg

SEQ ID NO: 14759 - DNA, 969 bp, Oryza sativa
  Clone ID: TFbOSC900148j.C1.o4.fg
atggcgaagcagtggttctacgcgaaccgggcgacagtcaacacatgggacaagtgctccactgcgttcctctcaaagttcttcccgatgggcaagaccaacgcccttcgtggaaggatctcaagctttcagcagacaagggatgaatcaattcctgaagcatgggaacgtccgcaggaatacgtggctgtctgtcctcatcatgggatggatgactgcctcatcctgcagagtttctataatggactcacttcctcgtccagggatcacttggacgctgctgctgtaggagccttcttttcaaagacggtccgtgcggccgtcaatcttactgagaagatggtgtcgaacatgggttggagcgaagaacgactccagacccgacagtgtggcatgcataccgtcaaggagacggaaatgctggccgcaaagctagatctcctaatgaagaggatcgacgatcaggagaaggccaaaccgctggtcgctttcaaagcgctggactcgcacctcacctgcgaggtatgcgggaacacaggtcactcggggaatgactgccccgagacccgtgaagaagccatgttcatggggaacaatggctatcggccgcaaggaggccaggggtggaaccagccccggccatactatcaaggaggcaacaacggcaacaacaataataacggtaacttcaatcagccctccttgaaggacttagtctttgcgcaagctaaaactacggatgctataaacaaaaagactgccttaaatgataaagtcctagagaacataaatgttaagctagaagtcttcgcttctgctttccaaaaccagctgagttttaacaaaatgataaagactcagttggcgcagcttgctgctctggggttttatttggctttggcatctcttgctcactatgtttggtggtctcactcaagtgtttctcactctctcgctgttgtctcttaa

SEQ ID NO: 14760 - DNA, 4215 bp, Oryza sativa
  Clone ID: TFbOSC900399j.C1.o1.np
atggccgatcacccacccaaccatcgcggagaaggcatggatgattttgtggcagagttggctcgcatgacactggtggtgggctaccccaacgcgccagagtactcaactgttccgccgctcagtggtgagtttcctcaccgggttcgtctggaggttcatggctatgtgggtacctgcctcgctaacatggtggttgaggcatctggaggcaccgcagatcacgcctgtcaggaggcggcatacctgatgatggctagactacgtgagcgccacaactacatcttctgcaacacagcgtaccgtttccaccctcgtcgagcaagtggcgatgatatcagcactttctgtccgacagccggcgagaacgacaccaccttaggtcatatgtgtgccgtgatgaggggaatggacaagatgcactcggatgacgggaagctcatgaggatcatagctctgaaggatgagatcgcacgcctgaagaaggagaatgctcagttgaagggcctccccattcccggaggagtccggatccgcaacatgccccgcaagtcaacgactgcacccgtgcgcattcagcttgcgcccaggaacccacctccgcccgcagctcctgcagctcctccagttctgcccgcagttcccgcagctcgagcagctctagctccagtcccagctcctgccccagtgtcagctcccgcgtccgctctctccttcgctccagcatcagccgtcaggggcccagccagtggcaacgggggttggttgcctgctactcccagtggcagccgcaaccacatcagcagcagttcgagtggctcagagctgggccagattccaggagcagctcagagggacctggcctcttccttcagatggtctacaccaggaatggtagccgtacagcaggcgagggcagcaacggcgaagaatgcactgacggtgtgcatcccaacagcgactccagcaatggtccgctaccgctccccgagaatccggctctggcccaagtaatggctcatcagactcaagatgatggcagccatgatgcagcagatgcaccagaggatgcagcagcaagccgagcagcagcagcagcagtttggtccccctccccctcagtccaaactgccggagtttctacgcgtcaggccacccaccttctctagcaccaccaaccctatggaggcgaatgactggctccatgccatagagaagaagctaaatctcctgcagtgcaatgatcaggagaaggtcgcctttgccacacaccagctccagggtcccgcgtcagcttggtgggacaatcacatggctacccgcccgccaggcacggaagtcacttgggcagagttctgtcgcagcttcaggaaggcgcaggtgccagacggggttgtggcacagaagaagagggagttccgggcactccaccagggcaacaggacagtgactgagtatctccatgagttcaatcatctagcgcgatatgcaccggaggatgtccgcactgacgccgagaagcaggagaagttcctagcaggcctggatgacgagctaaccaaccagttaatctctggagactatgccgactttgagaagctggttgacaaagcaatccatcaggaggatcagcgcaacaaaatggacaggaagagaaaggcagcgcaattccagtccaaccaaggaagccaccaacgaccgcgcttcactcccggacagcagggtggacctaccactatgattgtccgccagcaccgcccgttcaactcaagcggtttccaccagggcgccagtggcagccagaaccaccagggaggtcagccccaaccgcaatgcagctccgcgcccaccaatggcaccagcacagtcagctccatccacccaagccaagaaggagactggaacaaagccagggtcctgctacaactgaggcgagcatggccactttgctaacaaatgcccgaagccaaggcgtcccgggccaaggtttgtccaggctcgtgtcaaccacgcgtccgcagaggaggcgcaagcagcaccagaggtcgtactgggtacgtttcctgttaactcaatccctgcaacagtactttttgattctggtgcaacgcattcgttcatttcaaggaagtttgttgggatacacgggttaataagagaagaacttagcacaccaatgcaggttcataccccagggaatagctccacttcggttcaattcagcccctctataacaatagaaattcaaagatcaccatttctagccaacctcattcttctcgaatccaaggacctagatgttattcttagaatggattggctgaccaagtttaagggtgtcattgattgtgtgaatcgcacagtcaccttgaccaatgagaagggagaaaccatggtgtacaagtcaccagtctcaccgaagcaaggaatctccttaaattagcatgaggtggaaaaccctgtggccaccgacgagaagagttcgcggaaattggaagatatccccgtagtctgcaagtatccagaagtgttccccgaagacctcactaccatgccacccaagagagagattgaattccggattgatttggcaccaggaaccgctccaatttacaagagaccgtaccgaatggcagccaacgagctagcagaggtcaagaagcaggtggatgagcagctgcagaaaggatacattcgaacaagtacttcaccttggggcgctccgatcatttttgtggagaagaaggacaagacgaagagaatgtgtgtcgattaccgcgcactcaataaggtcacaatcaagaacaaatatcctttaccgcggatcgatgatttgtttgatcagctgaaaggagctaaagtgttttctacgatagacctgcgatcaggctatcaccagttgagaattcgggaagaggatattcccaagacagccttcaccactcggtatgggttgtatgagtgcacggttatgtcttttggacataccaacgcacctgcattcttcatgaacctgatgaacaaggtgttcatggaatttctggataagtttgttgtggtattcattgatgacatactcatctattcaaaatctgaagaagaacatgagcaacatctccgtctggtactcgagaagttgaaggagcaccaattatatgccaagttcagcaagtgtgacttctggttgtcggaagtcaaatttctgggtcacgtcattacagctcagggcgtggcagtcgatctgtcgaatgtggagtcagttaccaagtggaccccacctaagaccgtgtcacagattcgaagttttcttggacttgcgggttattaccgtcggttcattgaaaatttctataggatcgccagacccatgactcagttgcttaagaaagatgagaaatttaaatggacagctgagtgtgaccagagttttgaggagcttaagaagaaattagtatccgccctagttctgattctgcccgaccagacgaaagacttccaagtctactgcgacgcgtcccgccacgggcttggatgtgttctaatgcaagagggcagagtggtcgcttatgcctcacggcagttgcgtccacatgaagggaattatccaactcatgacctggaattggcagcggtggtacatgctttgaagatctggaggcactatctgattggcaaccgctgcaaagtatatacggaccacaagagtcagaaatacatcttcacccaaccgaatctaaatctccgacaacaaagatggttggagctaatcaaagattatgacatgagcattcattaccatccgggtaaagccaatgtggtggcagatgcattaagcaggaagagctactgcaatgccctatgcaccgagggcatgtgtaaagaattgcagcaggaacttgaacgtctcaacatgggaatcgtagaacacgggttcggagccgctctagaggcacggcctacgcacgtggatcaagtcagagcagctcaagtgaatgatcccgagatagctgaactgaaaaagaatatgagggtcggaaaagcccgggactttcttgaggatgaacatggcacaatctggatgggagaaagattgtgcgtgcccgatgacagagagctgaaagatctgatacttactgagactcatcagactaaatattccattcatccgggtagcaccaagatatatcaagatctcaacgaaaagttttggtgggc

SEQ ID NO: 14761 - DNA, 3066 bp, Oryza sativa
  Clone ID: TFbOSC5516j.C1.o6.fg
atggcgagttcctccagcagcgccgggagtcctttttccggtcaggcggtcgcagagaagctcacccggacgaacttccttctgtggaaggcgcaaatcctcccggtgatccgcggtgcccgcatggaagggtacttgacaggcgcgacacaggccccgctggctgtgatcgacgccaaagatggagaagcgaccgtcaaggcgtcgaagccggcgttcgagatgtggataacggcggaccaacaggtgctgggtttccttctttccacactttccaaagagatcctcacccaagtcatcagtatggaatctgccgcacaagtatggaaggccatcacggagatgttgtcttcccaatcacgtgcgcgtgctttgaacacgcggctggcgctcgcgacgaccctcaagggcgatctcagcgtctctgattacatcagtaagatgaaagtcctcgccgacgagatggcattcgccggcaagccgcttgatgacgaagaactcatttcctacgtcctggctggcctcgacgacgactacgagccggtcgtctcctctctcgtcggcaagtcggaggttgtctccctcgccgagtgctactctcaactcctgagcttcaagtccaggcagaagcttcgtcatgcggctgcacatcaggcttcgtccgtcaacgcggccaggcgcggtggcggaaagggcggtggatacactcccttcaatcgcggcgggcgcagcggtggcaacaacaacggcaggcgcagcaacaatggaggtggacgtggtggccgcggcaacaacaatggagaccggggtggcaaaccacatcctgtgtgccatctatgtggcaaaacggggcatgttgtcgccgattgttggtacaggtatgatgagaattttgtgcctgaaaataagatagctgctgcagcctcatatggtgtagacacaaattggtacgtggacactggagccacggatcatatcactggagaattggacaaattgacgactcgggagaagtataatggcaaggatcagatatatacggcaagtggtgcaggtatggacattaaacatattggtcattctgttatttgtacccctactcgcaatatatacttgaaaaacatccttcatgttcccaaagccaagaaaaatttactttttgctcatcgcttagcccttgataatcatgcctttgttgaagttcattctcgtttctttgccatcaaggatcaggctaagagtcatcaacttccctatcctaagtctttcagtgtgtttagtcatcccctagaacttgttttctcagatgtttggggtcctgctcctgattctgttggtggcagaaaatattatgttagttttatagatgattttagtaaatttacttggatctatttgcttaaaaagaagtctgaagttcttcagaaattctctgagtttcaacagcttgttgaaagactatttaatcgcaaaattattgctatgcaatctgattggggaggagagtatgaaaaacttaatgccatttttactaaaattgggatcactcatcatgtctcttgtccctatgctcaccaacagaacggttccgcagaacgtaaacatagacacattgttgaagttggtctctccttacttgctcatgcttccatgcctctcaagttttgggatgaggctttccttacagctacttatcttattaatcgcacaccaagtaaagttatacagtactcgacgcctttagagcgtctcttgaatcaaaaaccaaattactcctccttgagaacctttggatgtgcgtgttggccgaatcttcgaccctataataatcgcaaacttcagtttcgctcaaaacagtgtgtttttcttggctatagcaatattcataaagggttcaagtgtcttgatgttgcaactggcagagtttatatttctagagatgttgtgtttgatgaaaatatttttcccttctcacaacttcactctaatgccggggctagactacggtcagaaatcttgcttttgccatctacactgttgaatcctgaaattgctagtaggggtatgcaagtgaatgatcatatgtctaatgctccctctggagaatctaatattatttctgagcatgcacctgaacaggaagcaggaggttcaaatataaatgcacctacagatacacatgatacagaagatcctggtgctggcggcagtactggatttgatgaaaatactgctggaagtgatggacctgacggcagtgatggatttgatgggtcagctgctggctcagatcccggcgatggcagtacagaagttgggagcagcagcagcagcgctgtcggcagtcctagcactgggaacggcggcagtagtggtgcgtcagtcaatccaggaccagggagtgcatcggcaacagaaccagcccgtcatggtggtgcgacaggtgatgagacacatactaatcagattattcctgagcaggtgcaccagccaagtcgtccaaccacaaggttgcagaggggaataaggaaggaaaaagtctatactgacggaacagtaagaggttggtgtcttcgacagtttgatgtacagaatgcctttcttcatggtgttcttgaagaagaggtgtatatgagacaaccgcctggctatgaggataagacaagtgctacacagggtgctgctgaggctttgttgaaagatttaaaacaagagtttgctctcaaggatttaggtgatttacattatttccttggaatagaagttaacaagattaacaggtcttcttctactcttgttagtgctttttctgatgcagattgggcaggatcagtagatgacagaagatcaacaggagctacatatctgtcagtcaatcctgtgtttcatgccagaactaagcatatagaagtggattatcattttgttagagaaagagttgctaggaagcaactggagataaaatttatatcttctggtgatcaagtggcagatggttttactaaaccaatctctgttcaacagcttagagattttagaaacaatcttaacttagataagttatga

SEQ ID NO: 14762 - DNA, 1572 bp, Oryza sativa
  Clone ID: TFbOSC900304j.C1.o1.fg
atgcacaccgtcaaggagacggagttacttgctgccaagctggacctcctcatgaaacgattggacgaccacaagaaacggccacaaggcaccgtcaaggccttggactctcacatcaagtgtgaagtctgcggcgtcacaggtcattctgggaacgactgcccggaaacccgtgaggaggcgatgcctttgtgcgaccatggagccagcgtcagcgtcatgtcaaaagatgtctttgacaagctcaacttcacggtgttggcaccaacaccgatgcgcctccaactggctgactcgtcagtccgttacccggtggggatagtggaggatgtgccagtcaagatacgggatttcttcatcgcgtttgatttcgtggtgctggacatggacacgaggaaggagacgccgctcatcctaggcagtccgttccttagcaccgcaggagccaacattgacgtgggaacggggagtatccgtttccatatcaacgggaaggaggctccatggtcagaatcaagtacgggccaaacccgcagaacattcaagaggtcgaagtggagccacccaagacggatagcctgtatgaggaggcgactgtctcatctgttcaaggggtcgggctctccatcaagtcgtcatgacgagtctagtactcgttcatcagccgatgcctcgatggaagacgccgacgctccgcgacaactcctgagcgacgctgacctcgaccttgtcagtgatcgggagagacaagcctactacatgctgagcgaccgggagtatgctcacacacgagaatactcaccggaattgctgaaaaagataggtatggatgttaaatttcgttctatttggaaagctgttggttggcagagatttgctatgaaaggaatttctaggttcgagaaaaataggttttgggaagatatttctggtgctccaatttgcaagaaatctagaacgaatgatatccataatcctacacttaggctcatgcacaaatggattgctttgactttgtttcctagaagtgatctgagacccattaggagagatgaactaattatcatgtttgccatggttagaaagatcaaaatttctcctgtgaaatgtatgataagacaatggttagaaagtataaagttctctgctcttgttgagtgcacttctctgattactcgatatacgaggcaggttgggcaccaactagggatgcacccggaaggacccaagctccacgccataacatcggagtctcaacctggtcaagcgccagtgaggaccggtggcatgcgcctcatgacatccactgggagggacaatcaacctcctagatcaagtggtgtgcctccatctccaagtgaatggcgctcgagttcctctcgttgggacttgggtgaaatcactaggaggatggacacccttgatatgcagacgggggagatccagtacaacctcacggaacacacagctcaaacgcaagaatggcaacaatctgctgatgctcaattccccaacatcaacaacatgatgcaacaacagcatgatgaccttcaggcgtactttcgtttttag

SEQ ID NO: 14763 - DNA, 132 bp, Oryza sativa
  Clone ID: TFbOSC101455j.C1.o16.gm
atgggccggcaagaggtatctagcgccatctctgttctcgccgagtacagattcgaggaggaagattaccctgtcatcgactacgacaccggcttcggccaacaggatgtagggctattacctatcagataa

SEQ ID NO: 14764 - DNA, 2911 bp, Oryza sativa
  Clone ID: TFbOSC1518j.C1.o2.np
aggacgaggacggggcagcgaaggagagatccttaccaccacacgacgaggcgagggaacgacaacgatgaacgggcgcggcggagacggccgggaatgacggagacgaaaggcgaggggacgacttcacagaacagtggcggtaacgccactgttgccggcggggatgcacttccggaggtctccatgggcaacagagggcaggccggtgcagaggaggcggctgcgacgctggagaaggcaccggcacggccgaccggcgctcgggcaaggcggtaggggcggctggagggtggccggcactgaggaaagagaaggaggaggcggggagaggtggtgcagccacggggagggcgcgggagggggctaaaacgagagaacggagcgaggggccctcgtaccacggtcgatccggaagccgcaaaggccgtcgcagggcccatccaaactccatcacgcccaccctagccagggtacgtcaaccagaggaaagctatacttcaaatcaagcagttacccattcccgcttaataaaagatgctataactggtaataatttgattagctcctggtttggaatggttaattcctagtttggagatagaactgtgcagccgatgccgcgcttcaagcctgagtacttgtttggtgttgagggatttgtccaggagttgcatacgatgtcctttgccataggatttgggactgcccctttgtatgcccagattcctcatgatcgtgatgaagagaagtgccgagtcaaagtcaccatgaacagtaatagtgaagatatcccatcagtgatgttcgaagctggaggaggaaactacattcatgcatgtcaggaggtggcaaggatggccataggagagctccgcgatcgctacagtgatcagttggccgacactgagtatcgctaccatcctcgccaaccccagggaagtgaccgtggcagttaccttgagactgtggggattgagaatgatgctaccacaaggcatttggttgagatgctgtgagctatggatgagacccgcgcggagactgtgttagcagctcaagatcgtgaagaccagaatcgtggtaagatttgcaagctagaggacaaggtggatcatttggagaaggaactagccgcgttgaagggagaagcaccaccgcagaaggccagggttcgtcttaccgcaaggaagagagctctattcgtccctcgctaccaattggcgccaaaggttcgtgtggtggagaaagaagttaccccagccctagcggatcctccggtcgtcaatgtaagtaatgatgataaagaagaatccaagcgcacccattccaagatcgagtggggagcaactcaagatgatggagacgaaccgaacgagccttcaatcaactccgatgcccggaagacctagacaacgggaatggtcccaacatcatcaacaacaacaacaatggagagaatcccacgcttgcccaagtcctagctcaacaggcacagcttatgaacatgatgatgcagcaactccagaaccagcagaaccagggaaataaccatgcacctccccagaacaagttagcagaatttcttcgtgtgaggccgcccactttctctagcaccactaatcctgttgaagctggtgattggctggatgccatagagaagaagttggatttgctccagtgcactgatcaggagaaggtctcatttgcatcacaccaactgcatggccctgcctctgagtggtgggatcacttccgccttaacaggactattgctgaacctatcacttggcttgatttcaccgctgctttccgaaagatgcatataccatcgggagtggtgtctctcaagaagaaggaattcaggtcgctcatccagggatctcgcacggtcaccgagtatctgcacgagatcaatcgtcaggctcgttatgctccggaagatgtgcgcactgatgaagagcgccaggagaggttcttggaaggacttaatgatgagctttcttacccactcatgactggggattatcatgatttccagaagttagtggataaggctattcaccaggaggacaagtacaaccgcatggagcagaagaaatgccggattgctcacttcaaggcacaacaggggaatagtcagaggccgcatcttactttgggacctcagtcaatgtcacagggaggttcttcgtctgttgttcgtccccagcgtcagttcttcaacaacaacacgggcaacaacatccgcaatcaagctccacgccttgttgcagctttgacacagcaacagcctgccaagagggagcaaggcagcaagcccggggtgtgcttcaactgtggtgaaccaggccattactctgacaagcgtccaaagccccgacgcgtgaaggttgtccctgcccaaagcaactctaccgcaccagcatcaaaggctcgtgtcaatcatgttgctgctgcagaagctcaaggtgctccagatgtgattttgggtacgttccttgttaactcagttcctgcaacagtgcttttcgattctggtgctacacattcattcttatctatgagttttgcgggaaatcatgggatggaagtagaagatcttagacgtcctttgatggttagtaccccgagtaatcaagcactctctttgcaacatagcccctctgtcagaatagaaattcaaggagtaccatttcttgccaatcttattctgttagaagccaaagaccttgatgttatcctagggatggactggttagccagatataaaggtgtgatagactgcgccaacagaaaagtaattctcaccagcaatgatggtcgagttgtaactgttcatgcattgtcttctgagtctttaaggtcaagtctgaaccaaatgactttggaagagattcctatagtccag

SEQ ID NO: 14765 - DNA, 288 bp, Oryza sativa
  Clone ID: TFbOSC1661j.C1.o1.np
atgaagttaagcatgaaacgacccccgcataatttaagatgtgtgtgagacttctctttcccgggagcgccagaactcctctcactgctagaaatatggacgcctagagtgcatgaggatttaagttcatggagcaggtactgccaatgcgaggttatcgaaaaggtttgccgtgacgtgtctcatgtgttgggacgaggctcatgtgttaagcagtcgcggagtgcgggtaaagtgtatccactgcagtgtgagtatactagaaaaatgtctctacaaagcattttt

SEQ ID NO: 14766 - DNA, 4269 bp, Oryza sativa
  Clone ID: TFbOSC1661j.C1.o2.fg
atggcaattaaggaccggttcacgggaaaccctgggagacttaccgtgcttaccacaagcgggagtgggtttgttgcttgtgggttagtcagcggtcgatatcatgtgtcagtgatggagataaggaatggttcacgcgactccaacaacgtcagtggcagcgaagagccgatcaatggagcacgtgccaatggtgcatctgactacagtctgtccccaccgcccgagaacccaacaattgctcaggtgttgaacaatcagactcagatgatgacaatgatgatgcaacagatgcagcaacagtaccatcaggtgttgcaacaggtgcagcagcaagcacagcagcagcaacagaacctgcagtttggtcctccacctcctcagtccaaattgttagaatttcttcgtgtcaagccgcccattttctcaagcaccaccaacccaatcgaggcccacgactggcttcatgccattgagaagaagctgaatcttttgcaatgcaacgagcaggagaaggttgcttttgctatacaccagctacaaggtcccgcttctatttggtgggacaactacatggtgacccgtccagctggggcagaggttacttggacagagttttgtcatagtttcaataaagcacaggttcccgagggaattgtggcacaaaagaagagagagttccgttccctgcaacaaggaaccagaacagttatagagtatttgcatgagctcaaccgcctcgcgcgctacgcccctgaggacgtgcgtaccgatgccgagaggcaggagaagtttctgtctggtcttgatgatgaattgactaaccagttgatctctagagattatgaggactttgagaagctggtggataaggctatccgtcaggaggagcactataacgaaataaaccgtaagaggaaggcagctcagttcaggactccccaggggaagagtcagaagcctcgtttcacgatgggacatcagggtggaccttccaccatgattatccggcagtaccgtccctaccacccgggtagcttcaacaagacccaccatagtggcagtcacaacaacagtgagcagcacaggctcaagcctactccaagtccattaatgattccagctcagccagctctgccagctcagccagaacagcccaagaagtttggagaaaagcccgaactctgcttcaattgtaacgagcccggacacacggtcggaaggtgcccgaagccaagacgtgctggacccaagtttgttcaggcccgtgtcaatcatgcgtcagcagaggaggcgcagtcagcaccagaggttatattgggcacatttcctgtcgactcgacaccggcaaaaatattgtttgattctggtgcaacccattccttcatttccaagcgttttgctggtgcacatgggttatctttagtgaagcttaagataccaatgcgagtgcatactcctggaggtggcatgaccacaactcactactgcccatctgtgacagttgaaattcaagggatgatttttccagccaacctcattcttctcgaatccaaggacctagacgtcatacttggaatggattggttgacaaggcacagaggagtgattgattgcgccagccgcaccatcaagttgaccaatgcaaaaggagaggtggtaactttccagtctcaagtgccgcggaagctagggattagtttaaaccaggctgctggtgaagaacaagaggtagcagtggagaaaaccactaagaagctggaggatattcccatagtcagagagtatccggaggtttttccggacgatctgacaacaatgccaccaaaaagggatatcgagttccggattgacttggtacctggaactgcaccgatccacaagaggccttacagaatgggagccagcgagttggcggaagtcaagaagcaagtcgatgaacagttacagaagggatacatccgcccgagcacgtcgccttggggtgctccggttatctttgtggagaagaaagacaaaaccaagaggatgtgcgttgactaccgcgcactcaatgaggtcactattaagaacaagtatccgttgccaagaattgatgatctgtttgatcagttgaaaggagctacggtgttctctaagatagacctgcgatcaggttatcaccagttgaggatccgcgaagaggatattccaaagacagcattcatcactcggtacgggttgttcgaatgcacagttatgtctttcggactcactaatgcacctgccttcttcatgaatttgatgaacaaggtgtttatggaatttctggacaagtttgtcgtggttttcatcgatgatatactgatttactccaagtccgaggaagagcatgagcagcatcttcggctggtacttgaaaagttaaaagagcaccaactatatgccaagttcagcaagtgcgacttctggcttaaggaagttcagtttctcggtcacatcgtgaatgctcaaggagtagctgtggatccagcaaatgtggagtcagttaccaaatggaccccaccaaggacagtcactcatgttcggagtttcttaggacttgcgggctattaccgccggttcattgagaacttctctaaaattgctaagccaatgacacagctattgaagaaggaagaaaagtttatctggtctgctgaatgcaataggagttttgaagaactcaaacgacggttggtgtctgcaccagtcttaatcctgcctgatcagacgaaaggtttccagatctattgtgatgcatctcgccaggggctaggatgtgtgttgatgcaggatggcaaagtggtttcttatgcttcacggcagttgcgtcctcatgaaggcaactacccgacgcatgatctggaattggccgcagttgttcatgctttaaagatttggcggcactatctcatcggtaaccgttgtgaggtatatacagatcacaaaagtctaaagtacatctttactcaacctgatttaaatctcagacagcgaagatggttggagctgatcaaggattatgatatgggaatacattatcatcccggcaaggctaatgtggttgcagatgccttgagcaggaagagctactgcaatgttgcatgggtagagcaactatgttgtgaggttcaacgcggtctggaacatctgaaccttggtatagttgagcacggattcgtggttgccctagaggcacagcccacactggtggagcaggttcgcatagctcaagcaagtgatcctgaaatagcagagctcaaaaagaacatgagggttggaaaagcccgaggttttgttgaggacgaacaaggaacaatctggatgggagaaagattgtgtgtacccgaaaacaaggaattaaaagacctgatactaatcgaggctcatcaaactcaatattccattcatcccggcagtaccaaaatgtaccaagacctcaaagaaaagttctggtgggtcagcatgagaagggaaatagctgagttcgtagcactctatgacgtctgtcaacgagtaaaggcagaacaccaaaggccagcaggtttgctacagccacttcagattccagaatggaagtgggaagaaatcggaatggatttcatcaccggtttgcccaggacgtcatcggggcatgattctatttgggtagtcgttgaccgactcaccaaagtggctcacttcattccgttctcgtacaacaacagttaccaggctagtctgcagatggcaccgtttgaagcactgtatggacgaaggtgtcgtactccgctcttctgggatcagacaggggaacgccaattgtttggtacagaagttttaaatgaggcagaagagaaagtcagagctgttagggaaagattgagaatcgcacagtctcggcagaaaagctatgcagacaaccgccgaagggagctcgctttcgaaacaggggattatgtgtatctccgtgtcactccgctcaggggagtacatcgcttccaaaccaaaggaaagttggcaccacgctttgtgggaccatacaggatcttggaacgtagaggtgaagttgcttaccagctcgagcttccctccaacatgcttggcatccacaacgtgttccacgtctctcagttgaagaaatgtttgagagttcctgaggaacaggcaagtccggatcacatcgaaattcaggaagatctgacgtatgtggagaagccgactcgtgtcctcaaaaccagcgagagaaggaccagaaacaaagtataa

SEQ ID NO: 14767 - DNA, 636 bp, Oryza sativa
  Clone ID: TFbOSC400196j.C1.o1.fg
atggatcaaatggctctcgccaccattgtccaagctgtgccggaggccatggtgatggtcatatccgagaaggaaatggcgagggaggcgtgggatgccctcaagcagatgaacatgggtgaagagcgtgtcaagaaggcccgagtacaaactctcaagagagtgcttgatgattcgttctctcggcacgaaagtggaggagaccaccgtcgtggagaggctcttgcattccgttcccgacaagttccaatccctcataagcaccatcgagcagtgggggatgtgtcggagatgacggtgacggagacaattggatgtttgcgggcgttcgaggtgtcctccaaggggcgacgtcgtgaaaacgcaggggaggagcagctgcttattgcaggggctgagcaacggctcacacgcgctgagtgggaggccattgttgctgaagagaagaagagctacgaggcctctggcagtgtcacgaagaagtttcgcagcaagttcgacaagtcgaagattgagtgctgcaggtgtggcaagtttggacacttcgctgatgagtgtgacgagcctcggaagatgactaaggcagtggcgcagcttgcaattgcagatgctgatgatgagccaacattactttga

SEQ ID NO: 14768 - DNA, 2178 bp, Oryza sativa
  Clone ID: TFbOSC400872j.C1.o5.fg
atgtcaggtacaagttccgatgaaccaacactggagaatctagcgcataaactgaagggcatggaaaattggtatgaagagttgatgcgtaatagtaaatcatacaaggaaagcacagataaacatttaaaaaccttaagtgaaagcctggtgaaagtagtggatcaaattgagaaaatgaatcaatcacataaacaattaactgaaaacattcagaatatgaatattggacatgaaaatattgtgcgacgcattggtttacttgaggctgcaggtgaagaaggtgcaggtgccactgcccatcgacaccaaagatatgacaatgaagatgaagagcaatctgttgctgatgatgaggaggaagacgagagtgttagaaatagaagacaacgtcgagttagggacaaagatgatcctttatctaagtttgagccttctgtctatctagattgggagttagctgttgagcaaaaattctcctgctatgattttcctgataataagaaagttaaagctgccagtagtgaatttacctcctttgcatctctatggtggaatgatatatgtggtagaggacttagacctagaacatgggatgatatgaaacgtacaatgagatctagatttgttcctttttactatgctcgtgacatattaaataaactgcaacttttaagacaaggtcccaattctgtagaaacatactatcaagagatgatgattactttgtcacgctgtgatttgcaagaaactgaggatgctagaatttctatgttctatggaggtcttaagagagaaattcgggatattcttgaatataaagaatacaataccatgaatagattattccattttgcttgcaaagctgaaagagaagtgcagggacgcaacaagcataggagttcttttgcaggtgctacttctacacgacagtcaacaccacgtcaatctactactgccgttcgtccagcttcttccacaccacctacctccacgccatcccatgctcaagaaacaagcaaaaatgcttcagttcagactccagccaagagtgaaacttcagtagtttccactggacgtacccgtgatactacatgtcataggagccatggcattggacacattgcacgtgactgtccaaatcggcgagctctatttgtgaatgctgatggtgagtatacttctgctagtgattgtgatgatgaatatgctttagctaccactaaccacgcaggaggacaagataatgatgacatcgagaaagtccatttgcatccagagtcgctagatcagtatcctagcctaattgtcaagctagcacttagtgctaaagagaagtgtgaagagcaaaaccaacgtcacaatttgttccaaagcaaagttcttgtgaaaggccataccgtcaaaatgattattgatagcgggagttgcaacaatttagcaagtgaagagatggtcaagaagcttggcttgactacccatccacatccacatccgtatcatattcagtggtttaatacatgtggtaagatgaaggaatatgaggatgtttttcacgatgagatacctccaaggatggccaatggacgagagagtgcacacaatcaagaagatgggattgagtcgaggacaactccaattcaagaaggggaggatgatgaggacatcacttcatcggatacgctcataacttcacacgctccaatgataattccaagtccaagtccagttcagcctccggagatagcactgacttcaaacggacctagcaccttcatgccaactccgatttggtgttctctcgtttgcattgcagggatgatcaaccgcgcgtcacggttgtgggagaggccatgcgcccatgcctaccggatcaacgcacgacgagggagcggagtcggttggatctacacgggatggggagagcccaccggatccgctaccgccggattccgcacccaacggcctctcacaatctcgccgccagaccccatggtcgctgacaggtctcgagctcactgctcccgctaccacttgccgttggaggaagtggagcggagaggtggagagaacaggaagtggaagataggtgtagcagagaggataaggagagggatgggggaaagaatacaaagatattttacggaagagagagtggatgctggtctggttggctag

SEQ ID NO: 14769 - DNA, 3066 bp, Oryza sativa
  Clone ID: TFbOSC900139j.C1.o6.fg
atggcgagctcttcttcagcggcgacgatctccaaccctatgtttggcctccaaatctcggagaagctcaccaagcacaaccactccctctggtctgcgcagatcctcaccactcttcgtggtgcgcagttagatgggcatctctccggcacgaccgaagctccggcggccgagattgagaaagaagaaggagacaagaagatcaagatcatggtctcaaatccggcgtacaaggcgtggttcgcccaagatctacaagtgctcgggttcctcttctcctccctcacgcgggagatacttcaacaagtcgctggtgcaacaacggcggctcaggcgtggagcatgatcggcgacatgttctccaccaagtccaaggcgggttcgatcaacgtccttctcgccctcacgatgacccagaagagtcccatgaccatcagcgaatacatcgcaaagatgagatctctcgctgatgagatggcggccgcaggcgaaccgctggatgatgaagaactggtggcatacatcatcaacgggctcgactccgacttcgatgctgttgtcgaaggaataatggcaacggaaagaattgctcctccttctgtttctcatgtttattcacaggttttgagttatgaaaataggatgaaaattcgtcaagcttatgtcaccacatccgcgaacgctgcgaactgtggcgggcgcggtggacgtaacagcggaggaaaccgtggtcgcggtggctttggtcgcggtggtcgcggtggaggacgcggcaatcctgccggcaacaaccagggacgcgggcgcggcaatgacagccgccccttgtgccaagtctgccacaagcgcgggcatgttgctagcgattgttggcatcgctatgacgattcatatgtccctgatgaaaaacttggagataattatggtttcctcgaaattcatggcaaatattttttgattaaggacaaggccacgaggaggataattcttgaagatgtatgggagcctgcctccacttcattaggagcaaagaagtattatgttagttttattgatgattacagcaaatttgtttggatatatttccttaaacacaaatctgaagtgtttcaaaaattccatgagtttcaaaagcttgttgagagacagtttgatcgcaaaattcttgccatgcaaaccgattggggaggacctcctgaaatagctgctacagatgccctgggtacacttgatggggtgcctggagcgcacgaagagctgagtgaatccacccaggattcagcgccagctgctgtctcaggattgccgactgacaccccaggatcgctgagtcagggggagcaggagcgctcgcctgcgcgtacggcggtacgctctcagccatcgcaccagtccggcggcgacacgtcggcaggcagtggcgtcctctctcctgcacatggggacaacatcgtcacctctgatgtgacggcaccaggatcctctacatcagcagcgccagcgcagcagcaaattccagctgaggtaatgcgtccaaaaaccaggttacagagtggcattaggaaagaaaaagtttatactgatggaactgttagatatagttgtttcacatcctctggagaaccacagtctctgtgtgaggctctaggtgataaaaattggaaacatgcaatggatattcctcccaaaaaaggactgaatataatagattgtaagtgggtctataaaattaaaagaaaggctgatggaagtctagatagatacaaggctaggcttgtggcaaagggatttaaacaaaggtatggtatagactatgaagatacttttagtctagtagtgaaggctgctactatcagaactattttgtctatagctatctctagaggatggtccttgcgtcaattagatgttcagaatgccttcctccatggagtcttagaggaagatgtttatatgaaacagctactagggtatgaacagaaggatggctatgtgtgcaaactagacaaggctctgtatgggttaaaacaagctcctagagcatggtactctaggttaagtacaaagttacatgagttggggtttaagtcctcaaaatcagatacgtctctgttcttttacagtaagggagatatcacaatgtttatgctggtttatgtggatgacattatagtagctagctcttctcatgatgctactaatgttttgcttaagaatctgaatagagaatttgcactaaaggacctaggtgaactgcattatttcctagggatagaagtcaagaaggtaaatgatggcatagtcttaacacaggagaaatatgctaaggatgtgttaaggagggtaaatatgagtgaatgcaaagcagttaatactccattgtctatctcagaaatattaagtgctcaaggaggcactcctctggggccagaagatagtactaaatacagaagtttggttggagctctgcagtatttgactttaactagaccagatttgtccttctcagtgaacaaagtgtgtcagtatttgcatgctccaactacagaatactgggtagcagccaagaggattctgagatatttaaagcacacagttaaacttgggttaaagatcaattgggcaggatgtttggatgatcggcgatccaccggaggttttgctgtttttatagggcctaatcttgtgtcatggagtgcacgtaaacaggcaactgtgtcacgatcaagtacagaagcagaatataaagccttggctaatgctactgctaaaattatgtggatacaaacattacttcttgaacttggagttcaggtgcctagagcagccaaggtaaggtgtgataatattggtgcaaaatatttatcatctaatcctgtgtttcatactcgtacaaaacatattgaagtggattatcattttgttcgagaacgagttgcacgtaagttgttgcaagtggagtacatatctactacagatcaagttgctgatggttttaccaagacgttagctgtcagacagttagagatgtttagaaacaatctaaaccttacatgtatagattga

SEQ ID NO: 14770 - DNA, 5736 bp, Oryza sativa
  Clone ID: TFbOSC900300j.C1.o6.fg
atggctgacaagacactccgcgagttcgctgctccctctgttgacaatgtggccattgggccgcaaatcaacatgggagacgtggatttcggcttgaagtccagcctcatcacgatggcgcaggctagcccgttcagcggcaagcctaacgaggatccaacgctcatatgcagcagttcctggagatctatagcacaactcctacaatggactcactcccatgtcccgcgatcactggccgcggcggctggaggagcattcttctctaagacggttcgaggagctgttgatctaatagagaagatggtctccaatatgggttggagcgaggaacgactccagacccgtcagcgaggtatgcacaccgtcaaggagacggaattactcactgccaaactagacctcctcatgaaacacctggacgaccacgacaaacggcctcaaggcaccgtcaaggccttggactcacatgtcacgtgtgaggtctgcggcggcacgggacattctgggaataactgcccggaaatccatgaggaggcgaagtacatgggcaacaataacaacgggtaccgtccacaaggaggtcaggggtggaacgagccacgcccgtattatcaaggaggaaccaatgggatagccaaggaagtgccatccaatgactcagctgacaaggagattcagccagagaaagccgtgccgcaggagtattgtgacacacgattgctgccgtttcctcaacgaagtaggaaaccgtcagtggacgagcaattcgctcattttgttgaagtaatccagaagatccacatcaacgtgccattgttggatgctatgcaagtgccaacatatgcccgctaccttaaggatatactcaacaacaagagactgctcccaacaacggagttcggccaagctttatatgatcttggagcaagtgtcagcgtcatgccaaaggacgtctttgacaagctcaacttcacggtgttggcaccaacaccgatgcgcctacaactggctgactcgtcagtccgttacccggtgcggatagcggaggatgtgccggtcaagatacgggatttcttcatccctgttgacttcgtagtgctggacatggacacgggaaaggaaacagcacttatcttggggcgcccgttccttagcaccgcacgagccaacattgacgtgggaacgggaagtatccgtttccatatcaatgggaaggaggaaaagttttattttcagctaaggaccgaacaattctccatggtcagaataaagtacaggccaaacccgcaaaatattcaagtggtcgaagtggagccacccaagacggacagcctcgtaaagttcatgcagaatttcctggagaaggaaacaacaatgcccaggaaccgttattggaagacgccgatggatcggtcgtcatggatgtatgagatgcggagaatgcagccggtatttattaaggaagcatctaaatttattgatcaggctaaggcgcatgctttgagggagaatatgacaaagatcttttgtccgtgccgtcattgcaagaatcagaaattgttggtagatcctgatgaaatattgggtcacataatggagtacggattcaccgccaactacaaggtttggacctatcacggggaattcgccgatcccgaagatgacaatgaagagttaagtttcgagatgaataaggcagagaattttataatcgaagacatgtcccgtgaaagaatggatgttgatgtttccaccgatagtgatgatttcgagggtggttttgatttagacgatatgctacgccatgttgaaccaaaggtgctagcgggcaggtcacgaggattggagaattggcaggcattagagaaggcatcgaaggatcttctttacgatgaaacgaagggatgtgataaggatttcacagtcttgcgttcagtgcttgaacttctgagattgaagactaaacatggatggttggacacaagttttaatgatctgatgagtttgttgcttgtgttgcttcctaagcctaactttgtaccatcaaacacgtatcaagcgaagaaactcatatgtcctttatctcttggtgtagaaaagattcatgcttgtaagaatcactgcatattataccgtaaagaatatgcaaacttggaaagttgcccaatgtgtggcacaagtcggtataaaatggggaatgggcccatagattcagagtgtaccgatccagattctgataagggtaagcgcggaaagattccctcaatggtgatgtggtacctaccaattaaggaccgccagaagcgtctgtactcaaacccgactgatgctgagttgatgagatggcatcaagagagccggaagatagatggtatgattcgacatcctgccgacgctcgccagtggaagaaatttgatgcaaaacacccagaatttgctaaggatcccaggaatgtaaggtttgcgttgagcattgacggaatgaactcgtttggtgacttaagcaactcgcacaacacatggccagtccttctcacaatgtataatcttccaacatggatatgccagaaacgaaagtacattcttctcactatcctcatacaaggtccaaaccaacctggaatcgacatagatattttccttgagcctttgatggaggacatggaggagctttcgaaagaggggttacgactatgggatgagtttaagcgggagcacttcaatctagggaagactggatgtctgatatgtttggagaaaacttcgtacaaatacctgacatcgtctttgaagacagtgtacatgcggcatcgacggttcctaccacaaagacacaggtaccgtaagatggctagattgttcgataatatagtggagaatgacactgccccagaagcacgaagtggtacatacgtgtatgagataacaaagaagattaaggttgtatatggaaagggaaagaagaagacagtaaagaggaagaaagctgatggtgacaaagatactgcattgcctttcaagaagcactcaattttcttcagatacttagattattggaaggacctagagattcgacatgcaattgatgttatgcacctcgagaagaacgtgtttgatagcaccattggcacattgctggacatcccgagtaagacgaaggatggattgaagtcacataacgaccttgtagatttggccatacggcatgaccttctcccagtagtgcttccaaatgggaagaccgagattcctcctgcttgttactcattgacacttgaagagaaaaaagccttctgtaaatgtttgcaaggggttagagtgcctactggtttcgcatcaaacatcaggaagctagtatcaatgaaggatttgaccatttctggatacaatgcgcatgactgccataggttgctaatggtattcctaccaattgctataagggcagtcaaaccagtccataccaaggtggttataacaaagttgtgctactttttcaatcgaatttcgcagaagatgtgggcctttgagcgttacatgtcgatcctcaaaggctatgtactcaatcgcgctcaccccgaaggatcaatgatagagggatacacaactgaagaggcggtcgagtgttgtatggattacataaaggatgctaatgccattgggattcctgttcatcgacacgaatggagattgtctggaaggggtacggttggtaggaagcagttcttcgataatgagtacaaaatggtgtccgcggcacacaacaatgttcttcaacagctcgctatcgatgagccattcattgagcgacaccttgaagaaatgaaagcatgcttcccagggaacttactttacaaagactggcatgtgggccttcaagtattgtcaattcatggcaagatccctgtgctccgttgtgaatgggtcaaagacacaacaggggtttccgttgatgactacgggctaacgatagtcgatcacagtaaaacaggccacgaggatgatccatgggttttagcagagcgtgtggctcaagtgttttatgtgaaggacccttcggatgaaagaaaaactattgtcatatccggaaagcaacagatcgtcggcatcgacaacatcgaagaccccaatgattacaaccagttcgatgatgtaccattgtttactgatcttcctatgcgaattaagaaggttgagagaacaattgatgaagcgaatatgtcttggaagatgtcgaacgataaggttccatcgaacgcgccaatagctcctcaagaaggtaacgctcctcaaaaatctggtagcaacaagcagcctgacgcttctagtgaagaaacatggcgcacaccaagtgacccgtttccaatggaaataacacaagtcgcccctcgcgatgatgatccgtactacatacctatggaacaggccgatgggaagcccgtcgagccaccgatagtgcggtccaagtttagcaacacctgtggcactctagtcaggacgcgttttcccattaatgtcaagttgtgggaaacggtggatgacaacatcaagacacttctttggaatgagttgcagaagtattttgtgtaccctcctggatcagagttaatatcgacatatgacccaaaggagattgacaaggataaggagaagttcatgttttcagctttcaggaattctgagaagaggaaaaaacttgctcatgtcatgtcagactcccagaagtcagtactagcggcccaagatgaagtgcaatcctggttatctgccgatgtgcctgaaacttatgagtatggcaagccattcttgccaacttatcttatgaacaagctaccatgggaaatgagggtaattcacgaatggtatatcaaggcatctaggaagggtctcggtttcataagcgtcgccgtcccggaaggtgctttcatgagtggtcctaatgggatattttttatctctttccaagacctttacgccctctacaagctagataaaatggacgttaatctcgttgcggtgttctgtcttatgcaattccacgaagctgatagaactggagcaaaggttggatacgtcgatccaacaagaatatgcaaaacacaacacatcgtagagctgagagaggactgcgagcaattggttggcaagacccctaaagaaaaggaagaatatgtgaagacattgcacaagaggaagaagctagaagtagcaacatacttggcaatagcaatgttggcgcacgccgacaaagatgacttaatggtcccctacgcgttcacagaccactacatattattccttgtatatccaaaagaccaattgatcatatcattggaccccgcacactatgacaaggaaacatttatggaattcctcactattttgaatttagcacataagtactaccgcaaaagaggtggaccagtacatattacatcccagaagcagttatctgtcaggactggctggctgtgctacaaacaaccaccgggaaccaacttgtgcggttattacgtgtgcaagatgctcagagtaaatgggaggtacaaaacaaccagtaaccgaatccccaaaatcccatatattgcacaacaattcaatgacaatactatcttgaacatggccgctgacctctgtcgattcatccatcgcgatgtctgcaacgcaagaggtctcttctacgacaaccagagtgaactcgcaatggacgacaaatttaaacctctcagagagtag

SEQ ID NO: 14771 - DNA, 3738 bp, Oryza sativa
  Clone ID: TFbOSC401367j.C1.o87.fg
atggcatcttcgtccagctccattccatttgctctccatgggcaatcagtctctgagaagctgacgaagagcaacttcgtgctctggaaggcgcaggtcctagcgacgttgcgcggcgctcagatggcgggcttccttgacgggagcaacaaggcgcctgaagccaccatcgtcatcaccaaggacgatgggaagaccactgagaaggtggcaaatcctgctcttgcgcaatgggttgcgcaggaacaacaagtcctgagttacttgctgtcgtcgctctctcgcgacgtcctcacccaggtggccacgctcggcaaggccacagaagtctgggaggcattgaaagcctctttgcgtcgcagtctcgagctcgcgtcatcaacacccgcatggcgctctccaccaccaagaaagggaacaaaactgtcgctgaatatgaatccactggacgaggaggatctcgtctcctacatcctcgtcggcctcgacttcgactacaactcggttgtctcctccgttgctgggcgtgcagattcaatctcagtcagcgagctatatgctttgctcgttggctttgagacacgcctggatctgcttcagaacaactcctccccttctgccaacaccgtgtcgcgaggagggcgcggcggtggtggcggtggcaggggacaaggcggcaacaacggcggacgcggcggcggtttcaggcgcggccgtggtgacggcaaacccaagcccacttgccagctttgcggcaaaattggtcacgtggtggccaagtgttggaagaggtttgatccctctttcacaggagaagagaaggttgcgagcactgctgcaaccaacaactcctatagcatcgacacaaactggtatattgacagtgccgccactgatcacattaccagcgagatggagaagctggcgataaaggacaagtaccatggcaacgaccaggtccacgctgccagcggctcaggtatggacattgattatgttggtcatactgctatttgcactcccactcgtgatctctggctcaagaacattcttcatgtccttgaagcttataaaagtcttgtgtctgcccattgttttgctagagataatagagcctttgttgaacttcacccctgtttctttttggtaaaggatcaggtcacgaggaggccacttcttcgaggcaggtgtgaaagcggcctctaccccttgccaactgataagcaggcccatggcgccatcaagccgtctttgtctcggtggcatagccgtctagggcatccttctttttcaattgtcgatcgagttgttagcacaaataatctccatgtcactagggattctagtcgaagattaaaaccatgcaaacagattgggggaggggaatttcagcgcctcaatagtttctttaacaatgttggcattgaacatcatgtcgcctgcccctatgcttaccagcagaacggatcagttgagcgcaaccatcaccatatcgtcgaagttggcctttccttgctagctcatgcgtcaatgccactcaaattctgggatgaggcgtttaccaccgctgcatacctcataaatcgaacccctaccagagttctgtcttatgagactcctctccagcgcctattcaatcttcctcccgactacttcctgcttcgtaccttcggctgtgcctgttggccgaatcttagaccctacaacacacgcaaacttgccttccgatctaaacagtgtgctttcctagggtatagcacgatgcacaaagggtttaagtgcttggacattgctgccggtcgggtatatatctctcgtgatgttgtgtttgatgtacaagttttcccctttgctcagttgcattccaatgctggtgctcgtcttcagtctgaaatccagcttcttactcccaatctccttccttcaattatgcttgatcacgggggtgcagtagtacatgatcaacctctaattaataatcctaatcctactgattccagtggtgagagtgcaggacaaaattctggagcaaacggagaaaacagcgcagctaatgatagcgaatccacatcaattaaccatgattttatgcagaactgcgatctggctagttccggcgaacattataccgctgatgacgatcctaatgctgattcagctgactcggtgtcgcgtcaggtggatcccgaggcggatgcggcggctcatggctcggcggcgtcatctccaccaaccacgccgagccacgtcgactcagatgcgttcgggccaaccatgtctctgcaagatgcgggcccgacaccgacgccagctaccggatcgcctactccaaccatctctgcagtcgagtccgaggcaacgccagaagcacagccaattccaggtccaatcacacgagcgcaccatggaattcacaaacccaagaaatatacagatgggacggtaagatatgcttgcttaactgatactgaagaaccatctagtttacaagaagcactgcatgataaaaattggaagatagctatggataaagaatttgctgctcttgttcataataaaacttggcatctagttccaccacagaagggaacaaatgttattgactgtaagtgggtttataagataaaaaggaaggcagatggtataatagatagatataaggctaggttggtagctaaggggtttaaacagagatatgggattgactatgaggataccttcagtcctgtagttaaggcaacaactattagacttgttttgtctttagctgtttcacagggctggagcctgcaacagttggatgtccagaatgcctttttacatggatatcttgaggaggatgtgtatatgcgacaacctcctggatatgaggaatctaaggtgcctcactatctttgcaagcttgataaggcattgtatggtcttaaacaagctcctagagcttggtactccagattaagtaagaggctgcaggagttaggattcacctcatcaaaggcagatacttcgttgttcttctttaacaagaaaggtcttgtgatgtttctacttgtttatgctgatgatattattgttgccagttcttgttctcaggcagtcacagttctacttgaaaatctagagaaggactttgctcttaaggatcttggtgagttacattattttctaggtatagaagtaaagaaagatggagatggcttgctgctaagtcaggaaaggtatgcaaatgagatccttaagcaagtcagtatgactggatgcaaacctgtaagtactccactctccactgtagagaagctgtcggctcatgaaggagaaaagttaggagtaaatgattcaagtcagtatcgtagtattgttgtagctttacaatacttgacacttacaagaccagatatatcattctcaatcaataaggtctgtcagttcctacagaatccttttgttgttcattgggcagcagttaaaagaatactaagatatttgcagggaacagttaaacttggtctcaaaattgagaaatcaccttctagtgttgtaagtgccttctctgatgctgactgggcaggatatttagatgacagaaggtctacagggggttttgcagtcttcctaggttctaatttgatctcatggaatgctagaaaacaggctacagtatccaggtctagtactgaagcagaatataaagctttggcaaatgcaacagctgaagtaatgtggaattcctcatcctaa

SEQ ID NO: 14772 - DNA, 188 bp, Oryza sativa
  Clone ID: TFbOSC14790j.C1.o1.np
caaacacaccgaatacggggcgactgctgttttataggcgcggggtggggcgtcgaggagaaggaaccggcattggggcgatcaaggggagcgagctggcggttgtgctcggagctagcggccaaacggcagtggaggtgcggtggctgaggttggaaaaagagaaaaagaagggggaaagaggagct

SEQ ID NO: 14773 - DNA, 1362 bp, Oryza sativa
  Clone ID: TFbOSC401437j.C1.o16.fg
atggcacgtcgctccacccgtcagatccgtgcccctaaccgctttggttttgaggaagagctagttcagtcagaaatccccgatcaaccagttaaccggacagatgagcaagaagccgagagtgatcatacggttgcttccggatcagttaatgatgtcgcaagaggtaatcaacccccacccgtggaccttcaccaaatcctggccatgcaaacgcatataatacaaggaatggttcagaatataattgctatgcaacaacaacacacacaagagcgtcaaccccatatggttcaagatgatggcaaatcaaaactgaatgatttcttggggtctcgtccaccggagttctcccaaacaaatgagcctattgaagctgatgattggattaaagatatggaaaggaaattaaatctggtacagtgtactccgcaagagaaaaccctttacgccgcacatcagttaagaggacctgccgcagattggtgggataactactgtgctacccatacagatgctagtaccatcgtctggacagagtttgcaggagcctttcgctcagcacacatccctgaaagcataattgatttgaagaaggaagaatttgcaaatatcaagcaaggatcctcttgcatcaacgagtatttgagtcgcttcaatagattggcccgatatgccccagaagatgtagacactgataaaaagaagatcagaaaatttttaaaaggaatggacgcgaaactgcgagtgaaacttttggctcacgactttccgacgtttcagcaaatggtcgataagtccttgttactagaagatgcagaaaaagagatgcaagaatacaagagacgcaaagtaatgtccctagagattcaagcaaaagaagatttgtgtcgaaaaacaaactcgccagcacaatactatcagaaagcatctcagcattcaaatggttccggttctacgtctcgttcgactatgtcagaacctggtcagcaagccacaatgatcaacagtaatagccatgaaggaagcaactccgtaccatgccctacaccttcaaaaagacgtggttataaggcaggagtcgaatgtttcatctgccatgagatgggacactattcgtggtattgccctcagaaagtcaagtcaaagcgagttcaaccaacgacaggccttcccaacgtatctagaccaaaaagtttgaaggcaccgaacagtggatctatctcactgacgtcaccgcctattggacaaagtcatctgaaccatgtgcaagtagaaacaaatggaaaagttgtgaatctcgagcaagttgaaggagcaggagaagaacaggttccacaggcaagagcagagccacagtaa

SEQ ID NO: 14774 - DNA, 2064 bp, Oryza sativa
  Clone ID: TFbOSC408741j.C1.o9.gm
atggaagacgccgaagctccgcgacgactcctgaacgacaccgacctcgaccttgtcagtgatcgggagagacaagcctactacattctgagcgaccgggactgccgtgaactaaccattccccagcagatcatagaagaatctcatgcaggtggagcatacagggagacgcgcaacatgacaaggaatgaacgaaaaagtacatcatcctcaacacccgtgcagatgtatgaggcagagaagggtaagagaccttctcaccgtgccacccgttttgtcaagagcaatggtaagtattgctccaagtgtcgtgaggttgggcatttggtgaatgattgccccggtggttgtgcctcaaatagcaaggcataccagttctacaacaagaacagaggtattgtggaagaaactgccgatgttcaatttggtgaaactaatggcacccaagaggggcacgagaatttggatgatgtaggtgatgaaggattgatgagagctatgaagaacatgtctattggagatgtcaaggaatttgatatgtccttgattggagagttgagcttcttccttggacttcaaatcaagcaactcaaggatgggacgttcgtgagccaaaccaagtacatcaaggatctactcaagaggtttggcttggaggatgcgaagcccatcaagacacctatggcaaccaacgggcatctcgcccttgatgaggaagtgatggcttcccgcactcgccgtggtcgtcgtgagcccactccggagcccgtgagtgagaatgatgaatcgagcggagaggaatatgctcaaagtgaggaagaatttgtggaagaagttgagggggctgaggaggaagcaagtagagatgatagtggcagtggtggtggagaagatgaggaaagtgatgatgagggtcttctcgatcctaccatctatttttcgctcaatttgaggaatgcccaacagtacactatcctccatcatcacaaccaattccggaggcccaatgattgcgccaatcctcagtttcatacacggtatcagaaagctgtgtatgagcaagtatatgcaaacaaagccttcgctgaccacaagtggatttcttggaggcacattagtgagacaccagaatttgtggatcttcaagggatgttcaaggcggtgggcattgataggattgtcaccttgaagcaaccatatgatgaagatctcatccgacatttctatgccaccgtgtgggtgtccagcgactgtgatgctatgaaatggatgtcggggaccattcaatgctccatcaaccggcgtgaattcaaggagctcttgcacatccatttcaacaacggggatgacctccatgatgagcacactcacaaccccttccccattgatcactatgctcagttttatgaagaagggggaaggcacacctatgaaaaggtggcgggattgaggatcatccctagtggtcaaccgcatagtgagagccacccttctcccaaggagatagccatttccaaggggacaattggacaagaaatttactatgctccctacataatgcgattgattcaaagcaagttgggggaagttggcgacaatttgagagaacacaaggagtacaagcttcgccgccaactctccactcctcgagctccccaaatgcaccaacatatctttgatcaaggcgcaagctcaagtgcggcacctcctcatcctcatgggtttgttgatcctaatgccttctttaatcctcaatatgcttactttgggatgcaaccaaatgactacttcaacccggtgcttagggctataaataccctaagtgaaagcattcaaaggctatccaccaggcatgaggccatgcatgaggatcctgaccaggccggtctgaccggtgcacaaggccggtctgaccgacggcaattgggcggtctggccggccccccggaggccgggatgtcctctctgtgggctggctcccgccttacccaccccttgacgaatggggcgtgcggtggcttcgtgattgagcagtggagttgggctcgcctcaacggggagtag

SEQ ID NO: 14775 - DNA, 6052 bp, Oryza sativa
  Clone ID: TFbOSC34301j.C1.o1.np
ttgacggcggccgacctcccacgccggtttccttcctccctggccgctctctcccccttccaaccctatttaaaccctccccgcacctcctccgtccggttccacctctcgccgcccttcctcctcgccggattcgagctcgcgacgtcgctctctctccgccgtcgccgccgagctccggtccaccaccgtcgtcgccccggaccgcctcccacctcggcgccgcctccttcggcttcaccgcatcctcgccgacctcgttcacctctctgtttcggtcgccgatagccggagcgccgccgtccccgtcgacccgagccgcgccaccgcctacctccgctccggccgcctcctccgtcgccgccgtcgccccggggtgagccgtggaccgtcgcctcctttccccttccctcccctctctcggccgccgctccgcagcatctatggccgcagccggcgaccatcggggcgcgggcgcgccgcctcccgccgaccgcgccggcgtggccgccctcgggcgcgccgagtggctgccgcgtggagcccggccatcagccgcccgcgccctcaggtgcggctgacgtgtggggcccacggcgccggccggtgcgagcccgggtgcgcccggtccaccgtggacccacctcggccatataaggatcagtcttcgggcctctgttgcaaagcactaccgtacttccacatgtctagtgggacaaatgacggctacacgagctgcggcccggtagtcgagatgtcatggcacagggctggtgtcctgctgctaggggctcagtcctgcctacctgtccggggggttccggccgtaggtggggttgggtcgatgtacacctctgatcagagtataatctgttcgaatagccgcgccctcggttatgggcaagccgagcaatgtacccaaatggccggcagcatcaaccatcgtggcttggacctgactggcttcgttttggagctgcggggcatgtgcgttgtcctggggtatccgcatggagtggactaccagggcaagcagctctcgaagcaggagggtgacgatgcagagccccacgctgcttgggaggtcactgcagtgatcctcactggctcacccgagaggacttcgttggcagtcaccgcgggtggagattccttctccgccgcttgccagaacgccgcactcctcaccatcggcactcttcaccagcgctacccggatgagttgcagcactcgccctaccgctaccaccctcgtcgcggaggagcccgcgactacgccaccttcagggatgctagctcggaggatgacgctaccatcatgcacctagcgcgcatcgtggaggcgtacgatgtggctcgtatcgacttccatcagatggtgcgccgtgggttggtcgagaacaacatgaagatcctggagctacgtcaggagaatctgcagctgaagaaggacctagacgcaggggaggcgcagctgtgtcagctcaagatcgcctagggagaggtctgtcgccccaagcgctgccgcgtctgccgcagcctgaagatcaccgcccgcaagagtacctccaggcccgagcttgttcgtcagtccttggcatggacctgcttcgtcgagacccctcgtgacgagcccgcgcccttggtttctcaggatgagggagcctctggcgttggtagcacggaggatgcactgctgctcaccttccatggtgacaaccaggagaagtgctgctaccggtgaaggcagtcaccccgaaggcagcaactacaacaaccatggcagcccacctccacctcctcacccgcctccaccaccaccaccagacaccaactctatcctcacccaaatcctcgcccagcaggccaacatgatggctgctttcctccatcacatccaaaatccgccacagcataatgctccacctccaccaccacccccgcaacattctaaacttgccgagttcctccgcatccgtccgcctaccttctctagctccaataaccccgtggatgctttggattggttgcatgccgtggggaaaaagttagacaccgtgcagtgcaacgatgaggagaaagtcatctttgccgctcaccaactgcaggggcccgcatctctatggtgggaccacttctaggctacgcagccagaaggacagcctattacttgggcccgcttcaccgccgctttccggaggacccatgtgcccgccggagtcatgacccttaagaaaagggaattccgagagttgaagcaaggcaactgctctgtgatggagtatttgcatgagtttaacaacctggcccggtacgccccggaggatgttcgtgaagatgaggagaagcaggagaagttcttggcaggaatggaccctgagctgtccgtgcatatggtctccggggattatccggatttccagcgtttggcggacaagagcatccgcttggaagccaagcacaaggaactggagtcacacaagcgtcgcttggcaaatttccgcaatcaacagggggctaaccaaaggatccgctacaccaatccctatccagggggatcctcctcgtagcagcagcagcagcaaccacgctccgcgctccgacctcaattcgtggtgcgcgtcccacagccgcagcaacagcagagccagcaagggacccgtgcgccccgtcctcctacgccagccgtgcagcctggacaaggccgcagagacgttcatggtcagcagcgtctgtgcttcaactacttcgagcccgggcactttgcggataaatgcccaaagccgaggcgccagcaaggccaagcgcctccccgccccaacaacggtggtaaggatgtcattcggggtcgtgtgaaccacgtgactgccgaggatatgctgacaactccaggcgttatcgtgggtacgttcctcattcattccatccctgctaccattttgttcgactctggagcttcccactcgtttatatctgtgccattcgtggggagaaatcagttgggggtagaaaggcttaggaaccctctgctcatcaccacccctggaggggttatgacagcaaagtattatagccctgccgttcctatagaaatccagggaatcctttttccctcagatttgattcttctggacaccaagaacttggatgtgatccttgggatgaaatggttggctcaattccaaggagtagtggattgcgcaagacgcactgtcactctgtaccgagggccggaacaaccggttgttttctttgcgcccccaacctctgccagtagttcagaacttcatcagataggactgtcagaaatccccatcgtcagagagttcggagacgtgtttccggaagaactactcggtatgccgcccaagcgagagattgagttccggatagatcttgctccaggaaccactcctctgtacaagcgaccctaccgtatggcagcaaatgaactggccgaagtcaagaaatagttggaagagttaaaagaaaaggggtatatacggccgagcacttccccctagagtgctcccgtgatttttgtggagaagaaagacaagacaaagcggatgtgcgttgactacagagctctcaatgaagttactatcaaaaacaagtaccctcttccccggatcgatgatctcttcgatcagcttaaaggtgccactgtcttttctaaaattgatcttcgttccggatatcaccaattgcgtatccgtgaagaagatattccgaagaccgcattcacctcgcgttatggactgtatgaattcacggtgatgtcgttcggtctgaccaatgctcctgccttcttcatgaacttaatggacaaagtgttcatggaaaacttggataagtttgtggtggtctttattgacgacatcctgatgtactcacaatcagaggaagaccatcagcagcatctccgtctggtgttgggaaagttgcgggaacatcaattgtatgccaagcttagcaagtgtgagttctggttgtccgaagtcaaattcttagggcacgtgatatccgctaaaggagttgctgtggaccccgaaacggtgaccgccgtcactaattggaagcaacccaagacagttactcaggttcgcagctttttgagtatggcaggatactaccgaagattcatcgagaatttctccaaaattgccagacccgtgacgcagttgctgaagaaggaagaaaaatttgtgtggagcccgcaatgcgagaaagcattccaaactctcaaagaaaagctggtttcctcgccagtgttaatcttaccggatactcgtaaggacttcctggtgtactgtgacgcttcgcgccgaggattggggtgcgtattaatgcaggaaggtcatgtggtagcctatgcctcacgccagctacggccccatgaaggcaactaccctacccatgatttggagttatccgctgtggttcatgctctaaagatctggcggcactatctcattgtgaatcgctgtgaaatatatattgatcataagagtttgaaatacatcctcactcagtcggatctgaatcttcggtagagaagatggttagaactcatcaaggattatgatgtgggaatccactatcatcctagtaaggccaacgtggtcgccgacgctctaagtcgaaaaagccattgcaacactcttggcgtccgtggcattccaccgaaacttaatcaacagatggaagccctgaacctaagcatagttggtcgtggattcttggctacactggaagccaagcctaccttgctcgatcaaatccacgaggctcagaagaatgatccggatatgcgtggactcctcaagaatatgaaacaaggtaaagccactggtttcacagaggatgaacatggaacccaatggaacggaaatcggcatgtcaaggcagagcaccaacgaccggccggacttctccaacctctccaagtaccagaatggaaatgggatgaaattgggatggatttcatcaccggacttccaaaaacccaaggcggatatgattctatgtgggtagtcgtggaccgactaaccaaggtagctcggtttattcctatgaagaccacctatggaggaaacaaattagctgaactctacttcgctaggatcgtgagtctccatggcgttcccaagaaaattgtatctgatcagggaagccagttcacctctcatttctggaagaaactccaagaagagttgggtacccgattaaatttcagcaccgcgtatcacccgcagacagatggacagaccgagcgtctgaaccagatcctcgaagatatgcttcacgcatgtgtcctagattttgggaagacctggggtaagagtctcccttatgccgagttctcctacaataacagctaccaagccagcatacaaatggcaccctatgaagcgcgttgtatggccgcaaatgccggacaccgctattgtgggaccaagttggggaaagccaagtgttcgggaccgatatactgagagaagctgaagctaaagtcagaaccattcgggataatctaaaggtggcacagtctcggcagaagagttatgcagacaaccgacgtcgtaacctggaattcgcagtggatgattttgtgtaccttcgggtcacgccattgcgaggcgtacacaggtttcagataaaagggaagctcgcaactcggttcgtgggtcctttccgtatcattgctcgacgcggagaagtcgcttaccagttggagctgcccgcatccttgggcaacgtgcaagatgtgttccatgtgtcgcaactcaagaaatgccttcgagtgccatccgagcaggccgattcagagtaaattgaagttcgcgaagacttgacctacgtggagaggctagtgaaaatcctggacaccatggagcgcaggaccaggaaccgggtaatccgtttttgcaaggtccaatggagcaaccacgctgaggaagaagctacttgggagcgtgaagacgagctgaaggcagtccatcccgatctcttcgccggttcttctgaatctcggggttgagattccgtt

SEQ ID NO: 14776 - DNA, 4905 bp, Oryza sativa
  Clone ID: TFbOSC400231j.C1.o31.fg
atgacaactttagcaccttgtgccaaacattatacaccaaaaggcctaaccactctccttcaaaccaatcctaataacagacatactatccccaaaaccctgaaatgggatgagatcaccctgcctgagaaatgggttttatctcaagctgttgaacctaagtctatggatcagtcggaagtcgaatccttgattgaaacactagacggagatgttgagataacatttgcttcaaaacaaaaagcctttctccagtctagaccttctgtcagtctagattctaggcctaggacaaaacctcaaaatgttgtctatgctacctatgaagacaactccgacgaaccttcaatctcagacttcgatatcaatgttatcgagcttgatgttggctttgttattgctttagaagaagaagaatttgaaattgacaaagaattgcttaggagagaaataaggctccccaaaaatagagctaagactaaaagataccttgaagaagttgacgaatcattcagaatgaagataagagaagtttggcataacgaaatgagagaacaaaggagaaatattttcttctttgactggtacgagaatagccagattatacacttcgaagaattcttcaaaagaaaaaacatgataaaaaaagagcaaaaatccgaagcagaagatttaactgttatcaagaaggtttctacagaatgggagacagccagtggaaacaaggtagactctgttcatcctccatttgaatccattcaattatctcataatggaggaaaagcttgtccactaaaaagtatttctaaaaatacatatggagaaacagcaaaggttgaacacataggacatttggtagaacaacaaaattatgcaaatatatctctacgttctcttggtcaacaaacagatcgaatagagacaatccttatggaaggctacaaaacaggaagacctgaggtaaaaataaatattccttctaattctcagtcttctagttctcagtctgttagtcctatgtttgtcccaacaattgatcctaacatcaaatttggaaaacaaaaggcttttggacccgcaatctctgaagaactagtcaatgagctagccttaaaactaaataatttaaaagtaaataaaaacatcaatgagatttctgataatgagaaatatgatatagtcaacaagatttttaaaccttctactcttacttccacaactaggaattattaccctcgaccaacttatgcagacctacagtttgaggaaatgcctcagattcaaaatatgacttattacaatggcaaagaaattgtagaatggaacctagatggctttactgaatatcaaatctttactttatgtcatcaaatgattatgtatgctaatgcctgcatagctaatggaaacaaagaaagagaagctgccaatatgattgtcattgggttttctggtcaattaaaaggatggtggaataattatttaaatgaaactcaaagacaggagattctttgcgcagttaagagggatgatcaaggaaggccattacctgatagagatggtaatgggaatccaaccggtaacatttctgatgccttagccactctaatctataacataatttatcactttgctggaaactatcatgatatctatgaaaaaaatagagaacaattgataaatttaaaatgtaaaacaatgtcagattttagatggtataaagatactttcttgtcaaaactatataccctaccagaacctaatcaagacttttggaaagaaaaatatatttctggtttacctcctttatttgctgaaaaggttagaaattccctaagaaaagaagggggagggagtataaattatcactatctagatattggaaaaatcacacaaaagatacaattagtaggggctgagctttgcaatgacctaaaaatcaaagatcaactcaaaaaacaaaggattcttggtaaaagagaaatgggagatttttgctatcagtttggttttcaagatccttatgtctatagaaaaagaaaaacccattccaaacccatgacaaaaccaaatgataaaagcaagatgagctttcaagctaccaaaaggaaaccaaaaagaatttacaataagaatataagaacacaagacactgaaagcaaagaaaccatttgttacaaatgtggcttgaaaggacacatagctaacagatgtttcaaatccaaagttaaaaaagagatccaagccttgttagattcagaatcagaagacgttaaagaaaaacttgaagcaatactaaataatatagacaatgacttaagttcagatgaagaaaaaaatgcagaaattaattgttgccaagacagtggttgctcttgttgtgagccagataattcagaagaagagtctgatgaaaatatactcgttttaaccagtttagaagaatttgttctcgatacttttgaaaccattcaagatccagaagaaaaaagaagagtcctcgaaaaattcctttcaagagtcaaaactgataaggataaactaaaaaaggatattcaaaagagcaaattcctctctattgatgaagtgtttaaaaggttagatgaacagaaaaagaagaatgagcaaccagatttgatcagcctattcgaagaccaaaaaattatgaaacaagatttagaagaaataagaaagcgtctatacatgttagaatcaaaagaaggattccatatggaagaaaaggacgaaccaattcaagaagatgatcatgttgttggaaccattcaaaaatatatgaagcaaaaatggtacacagaagttatgtatcgttttatagacggatcctacttccagcatattactttaattgattctggtgctgatgtcagttgcattcgagaaggtattatccctcataaatatttctataaagccgcccacagaattcgtggggcagatggaaggcttttaacagtagaatatcaaatccctgaaatctatatttgcatatctgaagtttgcattaaaacatctttcctactcgttaaaaatcttaagcaagatgttattttaggaacaccatttttatcacttattcgtcctttccttgtcacgaacgaagatattcaatttaagataatggacaaacaggtgagcctaagattttcgtctaacacagatgagattcttgaccagcttattcagaccaagagagaacaagttgtgaatacaatatatttacatgacaattctttcccatcatatcttccaaaatctatggacttgccaggtaagacgtcatgggaagatagatatttattaaaagctactaaagattttgaatatatatgcagggaaatggcttcacagaagtctgaatggctcacgaatatgagttcatggagactgccccaactgcccagaggccatggagaacgatttaatcacaacttcagagtaacagagctacaacaagggttattaaacctcttgtggcagacaaaaaacaaaaaagaaaaagctcatgccttaaatggcctggcatattatttcaaaaatttcgtgccctcagatcaaaagataacagaaaaaagggctaaaatacaagatatccctcatcatgaggagatgttactagattatcgcgaggaaaaatcccgtgatggccaagataaacttcccatggaagttgaacaatctatggcaacagataagaataccaaggtattctcagataagattttgatctcaacagatcctgcttcgagcatggttgctttccacataaatatcaataacctattgcaatcttttccacataataaaccatcatcatccacaaaaaggcatgataccattccccaaacaccatacatactgcataatcatcccaattcattccttccacaatatatactccggacccagccaaaagcaccatgtagatcttgtgcctacaaagattcttgccaaaagaaacttaaaagccaaaatcccatgagtactacatacgaaaatctccagcccagattaagcttcaaaacggagcaaaccttatcctgctttgggcaagacatcctcgatcttgtttggcacaagtttaaggagagacaaatgaaaatattccttggactccaagattatttctttgatctcttagaagggagagaaagaaacccagccatacgagtaatcatatatatgctccctctcttaaggctagatgatcaggcaatctctgacccatcctatagattcctggttctcaaagctgagataaatcttcaaagattccggaacctacccacatacaaccatgaagaaatatctctccaaaccattatagatcatggtcttgtgaattccatctatgcaaccctcgatcagatccttcaatctgatttaggaaacgctgtgaaagatatctgcaggagacttggacatggaagatacagaattatcttctcctcaataccaccaaaattcacaccacctgttcgtccagcaattcattatatatatatcatgaatagacaatttaattttcaagaagacggtcctagcaaactatcggatgaagaggaagaaatatatacaacaattgctaatcatgaaaattggagattattttctgaagctgcagaaattgaagaagctatcaccacagattatgaatatcagctggttttccaaaacaagatcacaaggatttttatcagcaaattctacaaccaaagttatgaatacttcaagggagcagggcacataattaaaccggattttggaaatgaatgctccaagaaaagttactacagaagcctggctcagtggtttcagaaaacagagccatcagagatcgacacggtgcaatcagcacccatgataatcaacgaagataatgaataa

SEQ ID NO: 14777 - DNA, 3615 bp, Oryza sativa
  Clone ID: TFbOSC401054j.C1.o45.fg
atggacaacaagatttttaaaccttctactcttacttccacaactaggaattattaccctcgaccaacttatgcagacctacagtttgaggaaatgcctcagattcaaaatatgacttactacaatggcaaagaaattgtagaatggaacctagatggctttactgaatatcaaatctttactttatgtcatcaaatgattatgtatgctaatgcctgcatagctaatggaaacaaagaaagagaagctgccaatatgattgtcattgggttttctggtcaattaaaaggatggtggaataattatttaaatgaaactcaaagacaggagattctttgcgcagttaaaagggatgatcaaggaaggccattgcctgatagagatggcaatgggaatccaactggtaacatttctgatgccttagccactctaatctataacataatttatcactttgccggaaactatcatgatatctatgagaaaaatagagaacaattgataaatttaaaatgtaaaacaatgtcagattttagatggtataaagatactttcttgtcaaaactatataccctaccagaacctaatcaagacttttggaaagaaaaatatatttctggtttacctcctttatttgctgaaaaggttagaaattccctaagaaaagaagggggagggagtataaattatcactatctagatattggaaaaatcacacaaaagatacaattagtaggggttgagctttgcaatgacctaaaaatcaaagatcaactcaaaaaacaaaggattcttggtaaaagagaaatgggagatttttgctatcagtttggttttcaagatccttatgtctatagaaaaagaaaaacccattccaaacccatgacaaaaccaaatgataaaagcaagatgagctttcaagctaccaaaaggaaaccaaaaagaatttacaataagaatataagaacacaagacaccgaaagcaaagaaaccatttgttacaaatgtggcttgaaaggacacatagctaacagatgtttcaaatccaaagttaaaaaagagatccaagccttattagattcagaatcagaagacgttaaagaaaaacttgaagcaatactaaataatatagacaatgactcaagttcagatgaagaaaaaaatgcagagattaattgttgccaagacagtggttgctcttgttatgagccagataattcagaagaagagtctgatgaaaatatactcgttttaaccagtttagaagaatttgttctcgatacttttgaaaccattcaagatccagaagaaaaaagaagagtcctcgaaaaattcctttcaagagtcaagactgataaggataaactaaaaaaggatattcaaaagagtaaattcctctctattgatgaagtgttcaaaaggttagatgaacagaaaaagaagaatgagaaaccagatttgatcagcctattcgaagaccaaagaattatgaaacaagatttagaagaaataagaaagcgtctatacaggttagaatcaaaagaaggattccatatggaagaaaaggacgaaccaattcaagaagatgatcaggttgttggaaccattcaaaaatatatgaagcaaaaatggtacacagaagttatgtatcgttttatagacggatcctactttcagcatattactttaattgattctggtgctgatgtcaattgcattcgagaagtctgcattaaaacatctttcctactcgttaaaaatcttaagcaagatgttattttaggaacaccatttttatcacttattcgtcctttcctagtcacaaacgaagatattcaatttaagataatgggcaaacaggtaagcctaagattttcgtctaacacagatgagattcttgaccagcttgttcagtccaaaagagaacaagttgtgaatacaatatatttacatgacaattctttcccatcatatcttccaaaatctatggacttgccaggtaagacatcatgggaagatagatatttattaaaagctactaaagattttgaatatatatgcagggaaatggcttcacagaagtctgaatggctcacaaatatgagttcatggagactgccccaactacccagaggccatggagaacgatttaatcacaatttcagaataacagagctacaacaagggttattaaaccttttgtggcagacaaaaaacaaaaaagaaaaagctcatgccttaaatggcctggcatattatttcaaaaatttcgtgccctcagatcaaaagataacagaaaaaagggctaaaatacaagatatccctcatcatgaggagaggttactagattatcgcgaggagaaatcccgtgatggccaagataaacttcccatggaagttgaacaatctatggcaacagataagaataccaaggtattctcagataagattttgatctcaacagatcctgcttcaagcatggttgctttccacataaatatcaataacctattgcaatcttttccacataataaaccatcatcatccacaaaaaggcatgataccattccccaaacaccatacatactgcataatcatcccaattcattccttccacaatatatactccggacccagccaaaagcaccatgtagatcttgtgcctacaaagattcttacaaaaagaaacttaaaagccaaaatcccatgagtactacatacgaaaatctccagcccagattaagcttcaaaacggagcaaactttatcctgctttgggcaagacatcctcgatcttgtttggcaaaagtttaaggagagacaaatgaaaatattccttggactccaagattatttctttgatctcttagaagggagagaaagaaacccagccatacgagtaatcatatatatgctccctctcttaaggttagatgatcaggcaatctctgacccatcctatagattcctggttctcaaagctgagataaatcttcaaagattccggaacctacccacgtacaaccatgaagaaatatctctccaaaccattatagatcatggtcttgtgaattccatatatgcaaccctcgatcagatccttcaatctgatttaggaaacgctgtgaaagatgtctgcaggagacttggacatggaagatacaggattatcttctcctcaataccaccaaaattcacaccacctgttcgtccagcaattcattatatatatatcatgaatggacaatttaattttcaagaagacggtcctagcaaactatcggatgaagaggaagaaatatatacaacaattgctaatcatgaaaattggagattattttctgaagctgcagaaattgaagaagctatcaccacagattatgaatatcagctagttttccaaaacaagatcacaaggatttttatcagcaaattctacaaccaaagttatgaatacttcaagggagcagggcgcataattaaaccggattttggaaatgaatgctccaagaaaagttactacagaagcctagctcagtggtttcagaaaacagagccatcagagatcgacacggtgcaatcagcaccaatgataatcaacgaagataatgaataa

SEQ ID NO: 14778 - DNA, 4590 bp, Oryza sativa
  Clone ID: TFbOSC401341j.C1.o21.fg
atggcacagggccggtgtcctgctgctaggggctcagtcctgcctacctgtcccgggggtccggccgtaggtgggattgggtcggtactcttgtctatggctaggatgggttggaaactatgtcacgtcttccgtctgtttaccgtggtgatggccggcagcatcaaccgccgtggtctggacctgactggcttcgttttggagctgcggggcatgtgcgttgtcctggggtatccgcatggagtggactaccagtgcaggcagctcccggagcaggagggtgacgatgcagagcgccacgctgcttgggaggttactgcagtgatcctcactggctcacccgagaggacttcgttggcagtcaccgcaggtggagattctttctccgccgcttgccagaacgccgcactcctcgccatcggcacacttcaccagcgctacccggacgagttgcagcactcgccctaccgctaccaccctcgccgcggaggagcccgcgattacgccatcttccgggatgctagctcggaggatgacgctaccatcatgcacctggcgcgcatggtggaggcgtacgacgcggcccgtatcgacttccatcagatggtgcgccgtgggatggtcaagaacaacatgaagatcctggagctgcgtcaggagaatctgcagctgaagaaagacctagatgcagtggaggcgcagctgcatcagctcaagatcgcccagggagagatggtgacgaccaggagaagtgctaataccggtgatggcaatcaacccaaaggcagcaaccacaacaaccatggcagcccacctccacctcctcccccgcctcctccaccaccaccagacaccaacgccatcctcacccaaatcctagcccagcaggccaacatgatggctgctttcctccaccacatccaaaatccgccacaacataatgctccaccaccacccccacaacactctaaactcgccgagttcctccgcatccgtccaccaaccttctctagctccaataaccccgtggatgcgttggattggttgcatgccgtggggaaaaagttagacaccgtgcagtgcagcgatgaggagaaagtcatcttcgccgcccaccaactgcaggggcccgcgtctctatggtgggaccatttccaggctacgcagccagaggggcagcctattacttgggcccgcttcaccgccgctttccggaggacccatgtgcccgccggagtcatggcccttaagaaaagggaattccgagagttgaagcaaggcaaccgcttcgtgatggagtatttgcatgagtttaacaacttggcccagtacgccccggaggatgttcgtgaagatgaggagaagcaagagaagttcttggcaggtatggaccctgagctgtccgtgcgtctagtctccggggactatcaggatttccaacgtctggtggacaagagcatccgcttggaagccaagcacaaggaactagagtcgcacaagcgtcgcttggcgagtttccgcaaccaacagggggctaaccaaagggtccgctacaccaatccctatccagggggatcctcctcacagcagcagcaacagcagcagcaaccccgctccgcgccccgacctcaattcgtggtgcgcgtcccacagccgcagcaacagcagagtcagcaagggactcgtgcgccccgtcctcctacgccagctgtgcagcctggtcaaggccgcagggacgctccaggtccgcagcgtctgtgcttcaactacttcgagcctgggcactttgcggataaatgcccaaagccgaggcgccagcaaggccaagcgcctccccgccccaacaacggtggtaaggatgtcaatcggggtcgtgtgaaccacgtgacggccgaggacgtgctgacaactccagacgtcatcgttggtacgttcctcattcattccatccctgctaccattttgttcgactctggagcttcccactcgtttatttctgtgccattcgtggggagaaatcagttgggggtagaaaggcttaggaaccctctgatcatcaccacccctggaggggttatgacagcaaagtattatagccctgctgttcctatagaaattcagggaattccttttccctcggatctgatccttctagacaccaagaacttggatgtgatccttgggatgaattggttggctcaattccaaggagtagtggattgtgcaagacgcactgtcactctgtaccgagggccggaacaaccggttgttttctttgcacccccaacctctgtaggcagttcagaacttcatcagataggactgtcagaaatccccatcgtcagagagttcggagacgtgtttccggaagaactacccggtatgccgccgaagcgagagattgagttccggatagatcttgctccaggaaccacccctcagtacaagcgaccctaccgtatggcagcaaatgaactggccgaagttaagaaacagttggaagagttgaaagaaaaggggtatatacggccgagtacctccccctggggtgctcctgtgattttcgtggagaagaaagacaagacgaagaggatgtgcgttgactacagagctctcaatgaagtcactatcaaaaacaagtaccctcttccccggatcgatgatatgttcgatcagcttaaagctgccactgtattctccaagattgatcttcgttccggatatcaccaattacgtattcgtgaagaagatatccctaagaccgcattcaccacgcgatacggactgtatgaattcacggtgatgtcattcggtttaaccaatgctcctgccttcttcatgaacttaatgaacaaagtgttcatggaatacttggataagtttgttgtggttttcattgatgacattctggtgtactcacaatcagaggaagaacatcagcaccatctcagtctggtgttgggaaagttgcgggaacatcaattgtatgccaaacttagcaagtgtgagttctggttgtccgaagtcaaattcttagggcacgtgatatctgctaaaggagtcgctgtggaccccgaaacagtgaccgccgtcactgattggaagcaacccaagacagtcactcaaattcgcagtttcttaggtttggtaggatactaccggaggttcatcgagaacttctccaaaatcgctcgacccatgacacagttgttgaagaaagaagagaaatttgtgtggagcccgcaatgcgagaaggcgttccaaactctcaaagaaaagctggtttcctcgcaagttttaatcttaccagatactcgcaaggacttcatggtgtattgtgatgcttcgcgtcaaggattggggtgcgtgcttatgcaggaaggacatgtggtagcctatgcctcacgccagctacggccccatgaaggcaattaccctacccatgatttggagttagccgctgtggttcatgctctaaagatctggcggcactatctcattgggaatcgctgtgaaatatatactgatcataagagtttgaaatacatcttcactcagtcggacctgaatcttcggcagaggagatggttagaactcatcaaggattatgatgtgggaattcactataatcctggtaaggccaacgtggtcgccgacgctctaagccgaaaaagccattgcaacactcttgacgtccgtggcattccacctgaacttaatcaacagatggaagccctgatcctaagcatagttggtcgtggattcttggctacgttggaagccaagcctaccttgctcgatcaaatccgcgaggctcagaagaatgatccggatatgcgtggactcctcaagaatatgaaacagggtaaagccgctggtttcacagaggatgaacacggaaccctatggaacggaaatcgggtatgcgttccagacgacaaggaacttaaacagctaatacttcaggaagctcacgaaagtccttattccatccaccctggcagtacgaagatgtacttagacttgaaagagaaatactggtgggttagtatgaagcgggaaattgcagagttagtggccctttgtgatgtgtgccagcgtgtcaaggcagagcaccaacgaccggccggacttctccaacctctccaagtaccagaatggaaatgggatgaaattgggatggatttcatcaccggacttccaaaaacccagggcggttatgattctatatgggtagtcgtggatcgactaaccaaggtggctcggtttattcatgtgaagaccacctatggagggaacaaactagccgagctctacttcgctaggatcaaatgccttcgagtgccgcccgagcaggccgactcagagcagattgaagttcgcgaagacttgacctacgtggagagaccagtgagaatcttggacaccatggagcgcaggaccaggaaccgggtaatccgtttttgcaaggtccaatggagcaaccacgccgaggaagaagctacttgggagcgtgaagacgagctgaaggcagcccatcccaatctcttcggcagttcttccgaatctcggggtcgagattccgtttaa

SEQ ID NO: 14779 - DNA, 5561 bp, Oryza sativa
  Clone ID: TFbOSC401344j.C1.o2.np
atggcggccgggtcttccgcgcccgtttccccttcgtccggccgccctctctcaccccccaccctatataaccctccccgagctccccaccaccgtttccgccactcaccgccctctctccccgccggaatcgagctcgcgccgtcgctctctctctccgccgtcgccgccgagctccggtctgccaccgtcgtcgccccggaccacctcccacctcggcgccgcctccttcggcttcgccgcatcctcgccgacctcgtccacctctccgtttcggtcgccgaccgccggagcaccgtcgaccccgtccacccgagccgcgccgccgccttcctccgctccggtcgccgtttccgtcgtcgccgtcgacccggggtgagccgtggaccgccgcttcgtttccccctttccctcccctctctcggccgccgctccgccgtgcctatggccgccgccggcgaccataggggcgcgggcgcgccgcctcccgccgctgcgccggcgtggccgcctccgggcgtgcctagcggctgccgcgtggggcccggctgtcagccgcccgcgcccttaggtgcggctgacgcgtgggacccatggcgccggccggtgtgagccctggtgcgcccggtccaccttggacccacctcggccatataaggaccggtcttcgggcctctgttgcaaagcactaccgtacttccacatgtctagtgggacaaatgaaggctacacgagctgcggcccggtagtcgagatgtcatggcacagggccggtgtcctgctgctaggggctcagtcctgcctacctgtcccgggggtccggccgtaggtgggattgggtcgatgtacacctctgatcagagtataacctattcgaatagccgcgccctcggttatgggcaagccgagcaatgtacccaaatggccggcagcatcaaccgccgtggtctggacctgactggcttcgttttggagctgcggggcatgtgcgttgtcctggggtatccgcatggagtggactaccagggcaggcagctcccggagcaggagggtgacgatgcagagcgccacgctgcttgggaggttactgcagtgatcctcactggctcacccgagaggacttcgttggcagtcaccgcaggtggagattctttctccgccgcttgccagaacgccgcactcctcgccatcggcacacttcaccagcgctacccggacgagttgcagcactcgccctaccgctaccaccctcgccgcggaggagcccgcgattacgccatcttccgggatgctagctcggaggatgacgctaccatcatgcacctggcgcgcatggtggaggcgtacgacgcggcccgtatcgacttccatcagatggtgcgccgtgggatggtcaagaacaacatgaagatcctggagctgcgtcaggagaatctgcagctgaagaaagacctagatgcagtggaggcgcagctgcatcagctcaagatcgcccagggagaggtctgtcgccccaagcgtcgccgcgtctaccgcagccagaagatcaccgcccgcaagagcacctccaggcccgagcttgttcgccagtccttggcatgaaccagcttcgtggagacccctcgtgccgagcccgcgcccgtggttcctcaggagggggaagcctccggcgttggtagcacggaggatgcgctgctgctcaccttccatggtgacgaccaggagaagtgctaataccggtgatggcaatcaacccaaaggcagcaaccacaacaaccatggcagcccacctccacctcctcccccgcctcctccaccaccaccagacaccaacgccatcctcacccaaatcctagcccagcaggccaacatgatggctgctttcctccaccacatccaaaatccgccacaacataatgctccaccaccacccccacaacactctaaactcgccgagttcctccgcatccgtccaccaaccttctctagctccaataaccccgtggatgcgttggattggttgcatgccgtggggaaaaagttagacaccgtgcagtgcagcgatgaggagaaagtcatcttcgccgcccaccaactgcaggggcccgcgtctctatggtgggaccatttccaggctacgcagccagaggggcagcctattacttgggcccgcttcaccgccgctttccggaggacccatgtgcccgccggagtcatggcccttaagaaaagggaattccgagagttgaagcaaggcaaccgcttcgtgatggagtatttgcatgagtttaacaacttggcccagtacgccccggaggatgttcgtgaagatgaggagaagcaagagaagttcttggcaggtatggaccctgagctgtccgtgcgtctagtctccggggactatcaggatttccaacgtctggtggacaagagcatccgcttggaagccaagcacaaggaactagagtcgcacaagcgtcgcttggcgagtttccgcaaccaacagggggctaaccaaagggtccgctacaccaatccctatccagggggatcctcctcacagcagcagcaacagcagcagcaaccccgctccgcgccccgacctcaattcgtggtgcgcgtcccacagccgcagcaacagcagagtcagcaagggactcgtgcgccccgtcctcctacgccagctgtgcagcctggtcaaggccgcagggacgctccaggtccgcagcgtctgtgcttcaactacttcgagcctgggcactttgcggataaatgcccaaagccgaggcgccagcaaggccaagcgcctccccgccccaacaacggtggtaaggatgtcaatcggggtcgtgtgaaccacgtgacggccgaggacgtgctgacaactccagacgtcatcgttggtacgttcctcattcattccatccctgctaccattttgttcgactctggagcttcccactcgtttatttctgtgccattcgtggggagaaatcagttgggggtagaaaggcttaggaaccctctgatcatcaccacccctggaggggttatgacagcaaagtattatagccctgctgttcctatagaaattcagggaattccttttccctcggatctgatccttctagacaccaagaacttggatgtgatccttgggatgaattggttggctcaattccaaggagtagtggattgtgcaagacgcactgtcactctgtaccgagggccggaacaaccggttgttttctttgcacccccaacctctgtaggcagttcagaacttcatcagataggactgtcagaaatccccatcgtcagagagttcggagacgtgtttccggaagaactacccggtatgccgccgaagcgagagattgagttccggatagatcttgctccaggaaccacccctcagtacaagcgaccctaccgtatggcagcaaatgaactggccgaagttaagaaacagttggaagagttgaaagaaaaggggtatatacggccgagtacctccccctggggtgctcctgtgattttcgtggagaagaaagacaagacgaagaggatgtgcgttgactacagagctctcaatgaagtcactatcaaaaacaagtaccctcttccccggatcgatgatatgttcgatcagcttaaagctgccactgtattctccaagattgatcttcgttccggatatcaccaattacgtattcgtgaagaagatatccctaagaccgcattcaccacgcgatacggactgtatgaattcacggtgatgtcattcggtttaaccaatgctcctgccttcttcatgaacttaatgaacaaagtgttcatggaatacttggataagtttgttgtggttttcattgatgacattctggtgtactcacaatcagaggaagaacatcagcaccatctcagtctggtgttgggaaagttgcgggaacatcaattgtatgccaaacttagcaagtgtgagttctggttgtccgaagtcaaattcttagggcacgtgatatctgctaaaggagtcgctgtggaccccgaaacagtgaccgccgtcactgattggaagcaacccaagacagtcactcaaattcgcagtttcttaggtttggtaggatactaccggaggttcatcgagaacttctccaaaatcgctcgacccatgacacagttgttgaagaaagaagagaaatttgtgtggagcccgcaatgcgagaaggcgttccaaactctcaaagaaaagctggtttcctcgcaagttttaatcttaccagatactcgcaaggacttcatggtgtattgtgatgcttcgcgtcaaggattggggtgcgtgcttatgcaggaaggacatgtggtagcctatgcctcacgccagctacggccccatgaaggcaattaccctacccatgatttggagttagccgctgtggttcatgctctaaagatctggcggcactatctcattgggaatcgctgtgaaatatatactgatcataagagtttgaaatacatcttcactcagtcggacctgaatcttcggcagaggagatggttagaactcatcaaggattatgatgtgggaattcactataatcctggtaaggccaacgtggtcgccgacgctctaagccgaaaaagccattgcaacactcttgacgtccgtggcattccacctgaacttaatcaacagatggaagccctgatcctaagcatagttggtcgtggattcttggctacgttggaagccaagcctaccttgctcgatcaaatccgcgaggctcagaagaatgatccggatatgcgtggactcctcaagaatatgaaacagggtaaagccgctggtttcacagaggatgaacacggaaccctatggaacggaaatcggcgtgtcaaggcagagcaccaacgaccggccggacttctccaacctctccaagtaccagaatggaaatgggatgaaattgggatggatttcatcaccggacttccaaaaacccagggcggttatgattctatatgggtagtcgtggatcgactaaccaaggtggctcggtttattcatgtgaagaccacctatggagggaacaaactagccgagctctacttcgctaggatcgtgagtctccatggcgttcctaagaaaattgtatctgataggggaagccaattcacctctcacttttggaagaagctccaagaagagctgggtacgcggagaagttgcttaccagttggagctgcccgcctccttgggcaacgtgcatgatgtgttccatgtgtcgcaactcaagaaatgccttcgagtgccgcccgagcaggccgactcagagcagattgaagttcgcgaagacttgacctacgtggagagaccagtgagaatcttggacaccatggagcgcaggaccaggaaccgggtaatccgtttttgcaaggtccaatggagcaaccacgccgaggaagaagctacttgggagcgtgaagacgagctgaaggcagcccatcccaatctcttcggcagttcttccgaatctcggggtcgagattccgtt

SEQ ID NO: 14780 - DNA, 4164 bp, Oryza sativa
  Clone ID: TFbOSC401549j.C1.o15.fg
atgcgggcccagccgcctaatgggctccagtctaagggccctggcgatggcctctacaagcgacaaccaaaggcgctgcttgccctagctcgtaaacagcgtcgaccaatcaaccccaagcgatcttttgcggaagtggtgcgagcgggtgagatggctggtggtggaggacgatatggcggcggccgtggtaccggcagcggcggcgatggccaggatggtgacggccgtggcggcgtgttcaatccaggcaggggagaagcggctaccgggaatggcagtggtggtgcttccggccgtggtcatcaaggccgtggcggagacagtaacagaggtccggatggtcagttcgctgtgaatctgaatgcagcaacagcatcaggtactgatgttccaagaggagagtctagggttgacatagtgactgcagaggctggcacttcttcaaaggcgtcaaaagggcgttgtttcagatgcaaggagaagagccatgctgtttcagagtgcacaaagattttgtgtgatatttgtgaagcacctgaacatactgcactttcatgcccgcttttactcgctcccaaacccacagcaagcatgtgtggatggggagttgatggtggaggctttttcatgatccccacgccaacaacaggggcagtgaaacccagggaacacaacaaaacagcaattatccgggtggagaatggccacatttctgtggacaacttgatcattgaattgcgaaggttggtgccggttaggttccaatgggatgttaaggagactgctccagacacttatatggttcaatttccctctgtgatcgaattagacaggttgcgtagggttggcagtgttcctagttttgactttaatgtgaacctagtcattgacaagtgggagcaagagattgaagcgaagtttgttctaaagaaaacttggtttaaagtttatggagtgtcatatgagattagagactttctcagtctacatgctgttggttctgtcattggtcaaacaacaactgtggacatgatttatctcaggaaaaatggtgtggttaggatgcaggtggcagttgatgagttagcagatttaccacctagtgtttacgttgttgtccgaaaccatggctatgaaatcttctttgaaccggaattgcctgaggtggatgggaaaggaaagaagaagattgatgatattgaccaggacggagaaagaaaaaatggtggtgatcatgatgttcacatggaagatagggacccaaaacgccaaaagaatggttctgatgggtcgctaaggatggaaataggaggcttagcgccagctaagctgccctcaacgcgcaccaataatatggttctagataatgaagcattttcaccgtctcctagctcagatacgcctgctacaacaacggagttggaagcgtttgcctcatactcctccgtggtgttggaaacgcccatgagtcaattgggagcccaagggacaggaaactccgagtcaaccaaggaggctgtcggtgaggtggtgtactccgacgaggtttcgacacagctagcgaagttggcaacgactaaggtactttctactgaggttgctgtgcagctagcaggaacagatgaggtggttacgaatggcaaagagcaacaacaagaacctgtcagcatggcacaagaattacagcatgtttcagctagcttcttgtctcccgtggagcatgtattggactgcaacgtgcagtctgaattgctccccaagaatagccagcttgcaggcgatggaagagtaacatcgactaagaacttgatggcagtactagcaaccaatgaagaccaacttagtgcctccagtgctgccacatctaaagcccaggatgcagcacaggcagttggagctcgatccccgacaagaaggcgacctcgtcgcccagtggaccctattccaactaggcaaagtgaaagacagaaggcgatggcaaatgcagatgcgccggtggcaaaccgggcagagctgcttaaaaaggttcataacctcgagacgctaacaggggtttctctaggaaagaatgatttagaaataaaggagtccattaaccagattaaaatttcagaagtggatagatttgctactctttatagtagtgctgtagcgtctactagtaatgtagataaaagcaatgatgaattgttaaaattgtcttctctccagcacttatgtagtgactggctagaagaggctgagagtaatgacgatgagtctatggattctcaggccatacctcaaatgaggaagatttcgaccaaagtcaaacataaagtggtcaaaaatgatttggcaaaactgttaagggacgaagagttgtattggtaccagcgatctaagacaaatcatttactccaaggggatagtaatactaaatattatcacttgatagacaatggtaaacatcgtaagcagatgattttccagttggaacaagaggacactataataacgggtgaggggaatctcaaagaatacatcaccaattattataaaggattatttggtcctccagatcataatcatgtatccatgatagagggatggactgatgatattcctcaagtgtccgacttggaaaatgacatccttactgctgaattttcagaaaaggaagtcaaagaggcaatttttcaaatggatcataactcctccctaggtccagatggctttcctgcagagttttatcaggtcttttgggagattgttaagaatgatctcatggctctatttagagaatttcataaagggacattatccctttataacctaaactttgggatcatcgcgctattgccaaaaaaggctgatgcaaatcaaattcaacaatataggcctatttgcctactgaatgtcagctttaaaatttttacaaaagtggacaccaataggattacaacggttgctcacaaagtcattcgcccaacccaaacagcgtttttgccagatagaaatatcatggaaggggtggtgattttgcatgagactgtccatgagttacacacaaagaaaatggatggtatcatattcaaaattgactttgaaaaggcttatgacaaagttaaatggcagttccttcagcagacattacgaatgaaagggttttcacaatcgtggtgcaattggatttccaactgggtggaaggaggaactgtaagtgtcaaagtcaatgataatgtaggaaaaaatttccggacacgcaaaggcttgagacaaggggatccaatgtccccaattctttttaacatagtggctgatatgttagccattcttattgaaaaagtcaaagtcgatggccaaattagaggggtaattccacacttagtggatgatggtttgtccattctccaatatgccgacgatacaataatatttcttgaacatgattttgaacaagcaaaaaacatgaaggccattctttgtgtgtttgaacatctctcggggctgaaaataaactttcataaaagtgaaattttctgctttgggggagccaaggaaatggaggaccaatatagacaactgtttggttgtaattctggttcctttccattcaaatacttaggaatccccatacactatcgaaaactcagaaattttgattggaaatgtgtggaggataggtttcaaagaaaacttagcgcatggaagggcaaaaacagctcctatggtgggagattggttcttcttaacttggttctttcgagtcttcccatgttcatgttatccttttttgaaatacctcgaggtgtacttcaaagactagattactaccgatcgagctttttctggagcagtgatagccagaaaaagaaatataagttaacaaaatgggattatatatgccggccaaaagatcaaggtggactgggtgtcctaaatcttgatatcatgaatagatgtttgttgagcaaatggctattcaagcttcttaatggtgatggcctatggcaaaaccttttgcgcaacaagtacttaaagggttatcttcatgtgttccaattggctccactcttggtgtatgatgctttcacaggaacaacaggatactatgcgcaatggtgctacacgcttggaaatagtagccaaggaacttttatttcattttggatggcgtag

SEQ ID NO: 14781 - DNA, 2914 bp, Oryza sativa
  Clone ID: TFbOSC409046j.C1.o3.np
atggcatgttcagaggataatgatgaggagggtgcgtttcattccccacgcaccaaaggcatcataaaatattttacaaggcaagttaagtagcacaaagaaggacttgatgctgatttgcaggtgacaaatgagaagaatggacaattggagtccacacagatcgccaccaacatcaagcttacagggttggagacatcgatcgcttgcattaacactagccttgctgctcttgtgaggcattttgatgatctcaatgctagaggtaatggtcgacgtaatgaagacggcattgaggatgaatatacgctgacactaaacaagatgatcgagatgctcttgatcgttgacaactacgcaataatcatagaggtatgggtggtcaccgccaacgcaaggtacgcaataatgatgatgtttttttttctaaaattaaatttaagatacctcctattgatggaaaatatgatcccgatgcgtacctttcttgggagattgttgttgaccaaaaatttgcatggcatgattttcctgagaattctaaagttactagttagttcactgatttttcttcggtttggtgaatagaacatggcaagaaaaatcctaataacatgccacaaacttgggatgcttttaaacgggtcatgcgggcatgatctgctccttactttgcgtgtgatttgttgaataggttgcaacaattgagacagggtgtgaaaagtataggggaatattatcaggaattacaaatgggcatgcttcgttgtaatttagaggaaactgaggacgctgctatggctagatttttgggtggtttaaatggtgagatttatgacatcgtagactacaaagattacactaatatgactcgattgtttcatcttgcttgtaaagctgaaagggaagtgcaggtaaatctacattatgataggcaggcaccacttctccggccggccgtactccttcctcatcttccacacccacacccagtcgagcagcacctcctccatccagtaacaagccacgtggccctcctgcaagttcaacgacaaaggctgtttagctagccgcgagtgcttcttcaattgcatccacgggtaaaacaagagatgttcagtgtcaccattgcaagggctttgggcacatgcagcgtgactaccctagcaagcatgttttggtagtcaaaaatgatggtgaatatttgtctactagtgatttcgatgaggatacacttgctttgcttgcagctgaccatgcaaataatgaggagccgccagaagagcatattagggctaatgatgcagagcactatgagaacctcattgtgcagcgtgtcctcagtgcacaaatggagaaggcggagcaaaatcactgacacacattgtccaaacaatgtacgtcatcaaagagcgttcttgctgcatgatcattgatggaggtaactgccacaattgctagcagcgagatggtggagaagcttgcacatagcaccaaacctcacccacatccatagtacatccaatggttgaacaacagtggtaaggcaaaggtaacaaaactggtgcgcgttaattttgcaattggaaattaccatgatgttgttgaatgtgatgttgtgcctatgcaagcatgtaggggtgaaatcgggtcaggttgggtcggatctcacccttcccgtatcctaacccacattttgcaatcggaatcgggtcaaatacgaatagtgtcgaatacggatacaaactcggataatatctggcacaaatatgaaatggatttgtaccaaaacatatatacgctatcggttacgaatgtttatttggatatctagtcaaaaaaacatccctatatatccctatatattcataacgtgactatattaggccattagtatcttacaatcaacgagcttctaatgtgatattgagaaagggaaatgaatcatcggcatccgtctttaactgtcctgtgtgaagtgactagtagttgtctggctgctaaccaatgaagtggggggggggggggtggagacgaggggtatgcagcgcaacgagctcatgagtcacgacggtttccagcggacttccgactgcgggtgcattggggtgtggtgaaccgacgggtgcagtggcaatggcggagactcgacggggcgtgcaggcgacggaggatcgacgtcacgagcgttgtggagcttcaatggacgcggcagcggcatggcgacaacggtgcgtagcggcagcggagctgtgtggctatgctacctatgtgttctgtgcatgcttgggttaggctgcctggctggtggctcgtgggccatttgggcctggtggctggctctattgtgttttcgaaagttgatttgcgtagtcgatgccaccaaattcacatgaaactaggggatgaatggaaaactgctttcaaaaccaagttcaggtgatatgagtggttagtcatgccttttgggttaactaatgcacctagtactttcataagattaacaaatgaggttttgcgtgctttcattgggaaatttgtggtggtatactttgatgatttattgatttacaacaagtctatgggtgaacatcttcatcatttacgtgatgtttttaatactcttcgtgatgcacgtttatttggtaaccttgagaagtgcaccttttgcacagatcgagtttctttgcttgtctatgttgtcactttgcaggggattgaggttgatcaagccaaggtggaagccatacaagaatgccctgttccaataactatcacacaagtgcgaagtttttttaggccttgctagatcttaccattgctttgtgaaggatttcagcaccattgttgcgccattgaatgagcttactaagaagaatgttgccaccatctggaattaaaatactgccaatga

SEQ ID NO: 14782 - DNA, 4251 bp, Oryza sativa
  Clone ID: TFbOSC419191j.C1.o2.fg
atgacaactttagcaccttgtgccaaacattatacaccaaaaggcctaaccactctccttcaaaccaatcctaataatagatgtactacccccaaaaccctaaaatgggatgagatcaccctgccagagaaatgggttttatctcaagctgttgaacctaagtctatggatcaatcggaagtcgaatccttgattgaaacaccagacggagatgttgagataacatttgcttcaaaacaaaaagcctttctccagtctagaccttctgtcagtctagattctaggcctaggacaaaacctcaaaatgttgtctatgctacctatgaagacaactccgacgaaccttcaatctcagacttcgatatcaatgttatcgagcttgatgttggctttgttattgccatagaagaggatgagtttgaaattgataaagatttgcttaaaaaagaactcaggcttcaaaagaaccgacccaagatgaaaagatactttgaaagggtcgatgaaccatttagactaaagataagagaactttggcacaaagaaatgagagaacaaaggaagaacatctttttctttgattggaatgaaagtagccaagtcagacacttcgaagaattcttcaaagaaaaaaacatgatgaaaaaagagcaaaaatccgaagcagaagatttaactgttatcaagaaggtttctacagaatgggaaacaaccagtggaaacaaggtagactctgttcatcctccatttgaatccattcaattatctcataatggaggaaaagcttgtccactaaaaagtatttctaaaaatacatatggagaaacagcaaaggttgaacacataggacatttggtagaacaacaaaattatgcaaatatatctctacgttctcttggtcaacaaacagatcgaatagagacaatccttatggaaggctacaaaacaggaagacctgaggtaaagataaatattccctctaattctcagtcttctagttctcagtctgttagtcctatgtttgtcccaacaattgatcctaacatcaaacttggaaaacaaaaggcttttggatccgcaatttctgaagaactagtcagtgagctagccttaaaactaaataatttaaaagtaaataaaaatatcaatgagatttctgataatgaaaaatatgatatggtcaataagatttttaaaccttctactcttacttccacaactaggaattattaccctcgaccaacttatgcagacctacagtttgaggaaatgcctcagattcaaaatatgacttactacaatggcaaagaaattgtagaatggaacttagatggctttactgaatatcaaatctttactttatgtcatcaaatgattatgtatgctaatgactgcatagctaatggaaataaagaaaaatatatttctggtttacctcctttatttgctgaaaaggttagaaattccctaagaaaagaagggggagggagtataaattatcactatctagatattggaaaaatcacacaaaagatacaattggtgggggctgagctttgcaatgacctaaaaatcaaagatcaactcaaaaaacaaaggattcttggtaaaagagaaatgggagatttttgctatcagtttggttttcaagatccttatgtccatagaaaaagaaaaacccattccaaaccaatgacaaaatcaaatgataaaagcaagatgagctttcaagctaccaaaagaaaaccaaaaagaatttacaataagaatataagaacaaaagacactgaaagcaaagaaaccatttgttacaaatgtggcttgaaaggacacatagctaacagatgtttcaaatctaaagttaaaaaagagatccaagccttgttagattcagaatcagaagatgttaaagaaaaacttgaagcaatactaaataatatagacaatgactcaagttcagatgaagaaaaaaatgcagagattaattgctgccaagacagtggttgctcttgttatgagccagataattcagaagaagagtctgatgaaaatatactcgttctaaccagtttagaagaatttgttctcgatacttttgaaaccattcaagatccagaagaaaaaagaagagttctcgaaaaattcctttcaagagtcaagactgataaggataaactaaaaaaggatattcaaaagagcaaattcctctctattgatgaagtgttcaaaagattagatgaacagaaaaagaagaatgagaaaccagatttgatcagcctattcgaagaacaaaaaattatgaaacaagatttagaagaaataagaaagcgtctatacatgttagaattaaaagagggattccatatggaagaaaaggacgaaccaattcaagaagatgatcagcatatcactttaattgattctggtgctgatgtcaattgcattcgagaaggtattatccctcataaatatttccgtaaagccgcccacagaattcgtggggcagatggaggacttttaacagtagaatatcaaatccctgatacctatatttgcatatctgaagtttgcattaaaacatcttttctaatcgttaaaaatcttaagcaagatgttattttaggaacaccgtttttatcactcattcgtcccttccttgtcacaaacgaagatattcaatttgagataatgggcaagcaggtgagcctaagattttcgtctaacatagatgagattcttgaccagcttgttcagaccaaaagagaacaaattgtgaatacaatatatttacatgacaattctttcccatcatatcttccaaaatctatggacttgacaggtaagacatcatgggaagatagatatttattaaaagctactaaaaattttgaatatatatgcaaggaaatggcttcacagaagtctgaatggttcacgaatatgagttcatggagactgccccaactgcccagaggccatgaagaacgatttaatcacaatttcagagtaacagagctacaacaagggttattaaacctcttgtggcagacaaaaaacaaaaaagaaaaagctcatgccttaaatggcctagcatattatttcaaaaactttgtgacctcagatcaaaagataacagaaaaaagggctaaactacaagatatccctcatcatgaggagaggttactagattatcgcgaggagaaatcccgtgatggccaagataaacttcccatggaagttgaacaatctatggcaacagataagaataccaagccaaaagcaccatgtagatcttgtgcctacaaagattcttgccaaaagaaacttaaaagccaaaatcccatgagttctacatacgaaaatctccaacctagattaagcttcaagacggagcaaactttatcctgctttgggcaagacatcttcaatcttgtttggcaaaagtttaaggagagacaaatgaaaatattccttggactccaagattatttctttgatctcttagaaggaagagaaagaaacccagccataagagtaatcatatatatgctccctctcttaaggctagatgaccaggcaatctctgacccatcctatagattcctggttctcaaagctgagataaatctccaaagattctggaatctacccacatacaaccatgaagaaatatctctccaaaccattatagatcatggtcttgtgaattccatctatgcaaccctcgatcagatccttcaatctgatttaggaagcgctgtgaaagatgtctacaggagacttggacatggaagatacaggattatcttctcctccataccaccaaaattcacaccacctgttcgtccagcaattcattatatatatatcatgaatggacaatttaattttcaagaagacggtactagcaaactatcggatgaagaggaagaaatatatacaacaattgctaatcatgaaaattggagattattttctgaagctgcagaaattgaagaagctatcaccacagattatgaatatcagccggttttccaaaacaagatcacaaggatttttattagcaaatattacaaccaaagttatgaatacttcaagggagcagggcgcataattaaaccagattttgaaaatgaatgctccaagaaaagttactacagaagcctggctcagtggtttcagaaaacagagccgtcagagatcgacacggtgcaatcagcacccataataatcaacgaagataatgaataa

SEQ ID NO: 14783 - DNA, 3828 bp, Oryza sativa
  Clone ID: TFbOSC421500j.C1.o1.fg
atgtcgataaagaatgcttcatctatatcttttgaggatattgagaaaagtatttccaactggaagatccctaaggttaatattaaggaaatatatcatgtagaaagagaaatcaattctataagagctaaacatcaatatcactaccttcactttggtcttatacaagttgctatcagatccttgactagaaagggtttgaacgtctctgttctggcttgtctaagagattgcagaaataaaaggttcaaagattccttacttggcatggtggaagccagcctcagtaatggtcctgtttattttaacacctttcccgatttttctgtatccctctcagacacaaatatccataaagttctcactctcaacttacaaacatctggttatgatctagaaccagggagtgaaaacatctccgttacctacagagtttactacaaagccatgacaactttagcaccttgtgccaaacattatacaccaaaaggcctaaccactctccttcaaaccaatcctaataacagacatactatccccaaaaccctgaaatgggatgagatcaccctgcctgagaaatgggttttatctcaagctgttgaacctaagtctatggatcagtcggaagtcgaatccttgattgaaacaccagacggagatgttgagataacatttgcttcaaaacaaaaagcctttctccagtctagaccttctgtcagtctagattctaggcctaggacaaaacctcaaaatgttgtctatgctacctatgaagacaactccgacgaaccttcaatctcagacttcgatatcaatgttatcgagcttgatgttggctttgttattgctatagaagaagatgagtttgaaattgataaagatttgcttaaaagagaactcaggcttcaaaagaaccgacccaagatgaaaagatactttgaaagggtcgatgaaccatttagactaaagataagagaactttggcataaagaaatgagagaacaaaggaagaacatctttttctttgattggtatgaaagtagccaagtcagacacttcgaagaattcttcaaaagaaaaaacatgataaaaaaagagcaaaaatccgaagcagaagatttaactgttatcaagaaggtttctacagaatgggagacagccagtggaaacaaggtagactctgttcatcctccatttgaatccgttcaattatctcataatggaggaaaagcttgtccactaaaaagtatttctaaaaatacatatggagaaacagcaaaggttgaacacataggacatttggtagaacaacaaaattatgcaaatatatctctacgttctcttggtcaacaaacaaatcgaatagagacaatccttatggaaggctacaaaacaggaagacctgagaaatatgatatggtcaacaagatttttaaaccctctactcttacttccacaactaggaattattaccctcgaccaacttatgcagacctacagtttgaggaaatgcctcagattcaaaatatgatttattacaatggcaaagaaattgtagaatggaacctagatggctttactgaatatcaaatctttactttatgtcatcaaatgattatgtatgctaatgcctgcatagctaatggaaacaaagaaagagaagctgccaatatgattgtcattgggttttctggtcaattaaaaggatggtggaataattatttaaatgaaactcaaagacaggagattctttgcgcagttaagagggatgatcaaggaaggccattacctgatagagatggtaatgggaatccaaccggtaacatttctgatgccttagccactctaatctataacataatttatcactttgccggaaactatcatgatatctatgaaaaaaatagagaacaattgataaatttaaaatgtaaaacaatgtcagattttagatggtataaagatactttcttgtcaaaactatataccctaccagaacctaatcaagacttttggaaagaaaaatatatttctggtttacctcctttatttgctgaaaaggttagaaattccctaagaaaagaagggggagggagtataaattatcactatctagatattggaaaaatcacacaaaagatacaattagtaggggctgagctttgcaatgacctaaaaatcaaagatcaactcaaaaaacaaaggattcttggtaaaagagaaatgggagatttttgctatcagtttggttttcaagatccttatgtccatagaaaaagaaaaacccattccaaacccatgacaaaaccaaatgataaaagcaagatgagctttcaagctaccaaaaggaaaccaaaaagaatttacaataagaatataagaacacaagacactgaaagcaaagaaaccatttgttacaaatgtggcttgaaaggacacatagctaacagatgtttcaaatctaaagttaaaaaagagatccaagccttgttagattcagaatcagaagacgttaaagaaaaacttgaagcaatactaaataatatagacaatgactcaagttcagatgaagaaaaaaatgcagaaattaattgttgccaagacagtggttgctcttgttgtgagccagataattcagaagaagagtctgatgaaaatatactcgttttaaccagtttagaagaatttgttctcgatacttttgaaaccattcaagatccagaagaaaaaagaagagtcctcgaaaaattcctttcaagagtcaaaactgataaggataaactaaaaaaggatattcaaaagagcaaattcctctctattgatgaagtgtttaaaaggttagatgaacagaaaaagaagaatgagcaaccagatttgatcagcctattcgaagaccaaaaaattatgaaacaagatttagaagaaataagaaagcgtctatacatgttagaatcaaaagaaggattccatatggaagaaaaggacgaaccaattcaagaagatgatcatgttgttggaaccattcaaaaatatatgaagcaaaaatggtacacagaagttatgtatcgttttatagacggatcctacttccagcatattactttaattgattctggtgctgatgtcaattgcattcgagaaggtattatccctcataaatatttctataaagccgcccacagaattcgtggggcagatggaggacttttaacagtagaatatcaaatccctgaaatctatatttgcataactgaagtttgcattaaaacatctttcctacttgttaaaaatcttaagcaagatgttattttaggaacaccatttttatcacttattcgtcctttcctagtcacaaacgaagatattcaatttaagataatgggcaaacaggtgagcctaagattttcgtctaacacagatgagattcttgaccagcttgttcagaccaaaagagaacaagttgtgaatacaatatatttacacgacaattctttcccatcatatcttccgaaatctatggacttgccaggtaagacatcatgggaagatagatatttattaaaagctactaaagatcttgaatatatatgcagggaaatggcttcacagaagtctgaatggctcacaaatatgagttcatggagactgccccaattgcccagaggccatggagaacgatttaatcacaatttcagaataacagagctacaacaagggttattaaacctcttgtggcaaacaaaaaacaaaaaagaaaaagctcatgccttaaatggcctggcatattatttcaaaaatttcgtgcccacagatcaaaagataacataa

SEQ ID NO: 14784 - DNA, 4027 bp, Oryza sativa
  Clone ID: TFbOSC4434j.C1.o1.np
tatataatcgttccccgtgctccgctcctccgtttccgcctctcgccgctcactctccccgtcggaatcgagcccgcgccgtcgcaccttctctccgccgtcgccgccgagctccggttcgccgccgtcgtcgccccggacctcctcccgcttcggcatcgcccccttcggcttcgccgcgtcctcgccgacctcgtccgctcctccgtttcgcccgccgaccgccggaacgccgccgtcctcgtcgacccgagccgcgccgccgtcttcctccgctccgctcgtcgtttccgccgccctcgtcgtcccgtggtgagccgtggaccgctccgttcgcttcccccttccctcctctctctcgggggccgctccgccgcgccgttggtcgccggcggcgaccatcggggcgcgggtgcgccgcctcccgtcggccgtgccggcgaggccgccttcgggcgcgccccgcggctgccaggtggggcccggccatcagccgcccgcgcccgcgggtgcggctgacgcgtgggacccacggcgccggccggtgcgagcccgcgtgcgcccggtccaccgtggacccacctcggccatataaggatcagtcttcgggcctctgttgcaaagcactaccgtacttccacatgtctagtgggacaaatgacggctacacgagctgcggcccggtagtcgagatgtcatggcacagggctggtgtcctgctgctaggggctcagtcctgcctacctgtccggggggttccggccgtaggtggggttgggtcgatgtacacctctgatcagagtataatctgttcgaatagccgcgccctcggttatgggcaagccgagcaatgtacccaaatggccggcagcatcaaccatcgtggtttggacctgactggcttcgttttggagctacggggcatgtgcgttgtcctggggtatccgcctggagtggactaccaggccaggccgcttccggagcaggagggtgacgatgcagagccccacgctgcgtgggaggttactgcagtgatcctcactggctctcccgagcggacttcgctggcagtcaccgcgggtggagattccttccccgccgcttgccagaacgccgctctcctcgccatcggcactcttcaccagcgctacccggacgagttgcagcactcgccctaccgctaccaccctcgctgcggaggagcccgcgacttcgccaccttccgggatgctagctcggaggatgacgctaccatcgtgcacctggcgcgcatggtggaggcgtacgacgcggctcgtatcgacttccatcagatggtgcgccgtgggatggtcgagaacaacatgaagatcctggagctacgtcaggagaatctgcagctgaagaaggacctagacgcaggggaggcgcagctgtgtcagctcaagatcgcctagggagaggtctgtcgccccaagcgctgccgcgtctgccgcagcctgaagatcaccgcccgcaagagtacctccaggcccgagcttgttcgtcagtccttggcatggacctgcttcgtcgagacccctcgtgacgagcccgcgcccttggtttctcaggatgagggagcctctggcgttggtagcacggaggatgcactgctgctcaccttccatggtgacaaccaggagaagtgctgctaccggtgaaggcagtcaccccgaaggcagcaactacaacaaccatggcagcccacctccacctcctcacccgcctccaccaccaccaccagacaccaactctatcctcacccaaatcctcgcccagcaggccaacatgatggctgctttcctccatcacatccaaaatccgccacagcataatgctccacctccaccaccacccccgcaacattctaaacttgccgagttcctccgcatccgtccgcctaccttctctagctccaataaccccgtggatgctttggattggttgcatgccgtggggaaaaagttagacaccgtgcagtgcaacgatgaggagaaagtcatctttgccgctcaccaactgcaggggcccgcatctctatggtgggaccacttctaggctacgcagccagaaggacagcctattacttgggcccgcttcaccgccgctttccggaggacccatgtgcccgccggagtcatgacccttaagaaaagggaattccgagagttgaagcaaggcaactgctctgtgatggagtatttgcatgagtttaacaacctggcccggtacgccccggaggatgttcgtgaagatgaggagaagcaggagaagttcttggcaggaatggaccctgagctgtccgtgcatatggtctccggggattatccggatttccagcgtttggcggacaagagcatccgcttggaagccaagcacaaggaactggagtcacacaagcgtcgcttggcaaatttccgcaatcaacagggggctaaccaaaggatccgctacaccaatccctatccagggggatcctcctcgtagcagcagcagcagcaaccacgctccgcgctccgacctcaattcgtggtgcgcgtcccacagccgcagcaacagcagagccagcaagggacccgtgcgccccgtcctcctacgccagccgtgcagcctggacaaggccgcagagacgttcatggtcagcagcgtctgtgcttcaactacttcgagcccgggcactttgcggataaatgcccaaagccgaggcgccagcaaggccaagcgcctccccgccccaacaacggtggtaaggatgtcattcggggtcgtgtgaaccacgtgactgccgaggatatgctgacaactccaggcgttatcgtgggtacgttcctcattcattccatccctgctaccattttgttcgactctggagcttcccactcgtttatatctgtgccattcgtggggagaaatcagttgggggtagaaaggcttaggaaccctctgctcatcaccacccctggaggggttatgacagcaaagtattatagccctgccgttcctatagaaatccagggaatcctttttccctcagatttgattcttctggacaccaagaacttggatgtgatccttgggatgaaatggttggctcaattccaaggagtagtggattgcgcaagacgcactgtcactctgtaccgagggccggaacaaccggttgttttctttgcgcccccaacctctgtcagtagttcagaacttcatcagataggactgtcagaaatccccatcgtcagagagttcggagacgtgtttccggaagaactactcggtatgccgcccaagcgagagattgagttccggatagatcttgctccaggaaccactcctctgtacaagcgaccctaccgtatggcagcaaatgaactggccgaagtcaagaaatagttggaagagttaaaagaaaaggggtatatacggccgagcacttccccctagagtgctcccgtgatttttgtggagaagaaagacaagacaaagcggatgtgcgttgactacagagctctcaatgaagttactatcaaaaacaagtaccctcttccccggatcgatgatctcttcgatcagcttaaaggtgccactgtcttttctaaaattgatcttcgttccggatatcaccaattgcgtatccgtgaagaagatattccgaagaccgcattcacctcgcgttatggactgtatgaattcacggtgatgtcgttcggtctgaccaatgctcctgccttcttcatgaacttaatggacaaagtgttcatggaaaacttggataagtttgtggtggtctttattgacgacatcctgatgtactcacaatcagaggaagaccatcagcagcatctccgtctggtgttgggaaagttgcgggaacatcaattgtatgccaagcttagcaagtgtgagttctggttgtccgaagtcaaattcttagggcacgtgatatccgctaaaggagttgctgtggaccccgaaacggtgaccgccgtcactaattggaagcaaccca

SEQ ID NO: 14785 - DNA, 3471 bp, Oryza sativa
  Clone ID: TFbOSC900176j.C1.o7.fg
atggtgacaaccaggagaagtgctgctaccggtgaaggcagtcaccccgaaggcagcaactacaacaaccatggcagcccacctccacctcctcacccgcctccaccaccaccaccagacaccaactctatcctcacccaaatcctcgcccagcaggccaacatgatggctgctttcctccatcacatccaaaatccgccacagcataatgctccacctccaccaccacccccgcaacattctaaacttgccgagttcctccgcatccgtccgcctaccttctctagctccaataaccccgtggatgctttggattggttgcatgccgtggggaaaaagttagacaccgtgcagtgcaacgatgaggagaaagctacgcagccagaaggacagcctattacttgggcccgcttcaccgccgctttccggaggacccatgtgcccgccggagtcatgacccttaagaaaagggaattccgagagttgaagcaaggcaactgctctgtgatggagtatttgcatgagtttaacaacctggcccggtacgccccggaggatgttcgtgaagatgaggagaagcaggagaagttcttggcaggaatggaccctgagctgtccgtgcatatgcagcagcagcaaccacgctccgcgctccgacctcaattcgtggtgcgcgtcccacagccgcagcaacagcagagccagcaagggacccgtgcgccccgtcctcctacgccagccgtgcagcctggacaaggccgcagagacgttcatggtcagcagcgtctgtgcttcaactacttcgagcccgggcactttgcggataaatgcccaaagccgaggcgccagcaaggccaagcgcctccccgccccaacaacggtggtaaggatgtcattcggggtcgtgtgaaccacgtgactgccgaggatatgctgacaactccaggcgttatcgtgggtacgttcctcattcattccatccctgctaccattttgttcgactctggagcttcccactcgtttatatctgtgccattcgtggggagaaatcagttgggggtagaaaggcttaggaaccctctgctcatcaccacccctggaggggttatgacagcaaagtattatagccctgccgttcctatagaaatccagggaatcctttttccctcagatttgattcttctggacaccaagaacttggatgtgatccttgggatgaaatggttggctcaattccaaggagtagtggattgcgcaagacgcactgtcactctgtaccgagggccggaacaaccggttgttttctttgcgcccccaacctctgccagtagttcagaacttcatcagataggactgtcagaaatccccatcgtcagagagttcggagacgtgtttccggaagaactactcggtatgccgcccaagcgagagattgagttccggatagatcttgctccaggaaccactcctctgtacaagcgaccctaccgtatggcagcaaatgaactggccgaaaagaaagacaagacaaagcggatgtgcgttgactacagagctctcaatgaagttactatcaaaaacaagtaccctcttccccggatcgatgatctcttcgatcagcttaaaggtgccactgtcttttctaaaattgatcttcgttccggatatcaccaattgcgtatccgtgaagaagatattccgaagaccgcattcacctcgcgttatggactgtatgaattcacggtgatgtcgttcggtctgaccaatgctcctgccttcttcatgaacttaatggacaaagtgttcatggaaaacttggataagtttgtggtggtctttattgacgacatcctgatgtactcacaatcagaggaagaccatcagcagcatctccgtctggtgttgggaaagttgcgggaacatcaattgtatgccaagcttagcaagtgtgagttctggttgtccgaagtcaaattcttagggcacgtgatatccgctaaaggagttgctgtggaccccgaaacggtgaccgccgtcactaattggaagcaacccaagacagttactcaggttcgcagctttttgagtatggcaggatactaccgaagattcatcgagaatttctccaaaattgccagacccgtgacgcagttgctgaagaaggaagaaaaatttgtgtggagcccgcaatgcgagaaagcattccaaactctcaaagaaaagctggtttcctcgccagtgttaatcttaccggatactcgtaaggacttcctggtgtactgtgacgcttcgcgccgaggattggggtgcgtattaatgcaggaaggtcatgtggtagcctatgcctcacgccagctacggccccatgaaggcaactaccctacccatgatttggagttatccgctgtgagaagatggttagaactcatcaaggattatgatgtgggaatccactatcatcctagtaaggccaacgtggtcgccgacgctctaagtcgaaaaagccattgcaacactcttggcgtccgtggcattccaccgaaacttaatcaacagatggaagccctgaacctaagcatagttggtcgtggattcttggctacactggaagccaagcctaccttgctcgatcaaatccacgaggctcagaagaatgatccggatatgcgtggactcctcaagaatatgaaacaaggtaaagccactggtttcacagaggatgaacatggaacccaatggaacggaaatcgggtatgcgttccagacgacagggaacttaaaacagttgatacttcaggaagctcacgaaagtccttattccatccatcctggcagtacgaagatgtacttagacttgaaagaaaaatactgcatgtcaaggcagagcaccaacgaccggccggacttctccaacctctccaagtaccagaatggaaatgggatgaaattgggatggatttcatcaccggacttccaaaaacccaaggcggatatgattctatgtgggtagtcgtggaccgactaaccaaggtagctcggtttattcctatgaagaccacctatggaggaaacaaattagctgaactctacttcgctaggatcgtgagtctccatggcgttcccaagaaaattgtatctgatcagggaagccagttcacctctcatttctggaagaaactccaagaagagttgggtacccgattaaatttcagcaccgcgtatcacccgcagacagatggacagaccgagcgtctgaaccagatcctcgaagatatgcttcacgcatgtgtcctagattttgggaagacctggggtaagagtctcccttatgccgagttctcctacaataacagctaccaagccagcatacaaatggcaccctatgaagcgcgttgtatggccgcaaatgccggacaccgctattgtgggaccaagttggggaaagccaagtgttcgggaccgatatactga

SEQ ID NO: 14786 - DNA, 2145 bp, Oryza sativa
  Clone ID: TFbOSC401120j.C1.o11.fg
atggctaacaagactctccgcgagttcgctgctccatctactgacaatgtggccaattggccgcagatcaacatgggagacgtggatttcgacttgaagtctagcctcatcactatggtgcaggcttgcccgttctgtgccaagcctaatgaggatgccaacgctcatctgcaacagttcctagggatctgtagcacgtacaccatcaagggcgttagtccagacgccgtcaggctaaggctgtttccgttctcccttctcgggagagcgaaacagtggttctatgccaaccgtgctactgtcaatacctgggacaagtgctctacggcattcctctcgaaattcttcccgatgggcaaaaccaatgcccttcgtgggaggatttctagtttccagcagacaagggacgagtccattccggaagcatgggaacaactgcaggagtatgtggccgcctgtcctcatcatgggatggacgactggctgatcctgcagaacttctacaatggactcacccctatgtcccgcgatcacttggacgcggcagctgggggagctttcttctctaaaacggttcaaggagccgttgatctaatagagaagatggtctccaatatgagttggagcaaggaacgactccagacccgtcagcgaggcatgcacaccgtcaaggagacggaattacttgctgccaagctggacctcctcatgaaacgcttcgacgaccacgagaaacggccacaaggcactgtcaaggccttggactctcacatcacatgtgaagtctgcggcggcatagatcactctaagaatgactgcccggaaacccgtgaggaggcgatgcacatgggcaacaacgggtaccttccacgaggaggtcaggggtggaaccaaccacgcccatattatcaagaagctaaaaccactgatgcgctaagcaaaaagcttgctgccaatgataagaacctagaaaatatgaacgtcaagttagatggctttgcttctgcttttcaaaaccagctgagcttcaataaaatgatagaaacccaactagctcagtttgcatccttagtccatgcaaatgaaactgggaggattccggggcaacccgacttctccattgaaaatgtcaaggtgatcacgacaaggggaggaactactgggataaccaaagaagcgccatctagtgactcggctgacaaggaagttcagccagagaagaccgtgccgcagaaaccgttagtggacgagcaatctgctcattttgttgatgtaatccggaaaatccacatcaacgtgccactgttggacgctatgcaagtgccaacatatactcgttatctcaaggacatactcaacaacaagagaccgctcccaacaacagagatggtcaagctgacagaacaatgcagcaacgtgatactctacaagctcccggagaagaagaaagatccgggctgtcctacgatcacctgctcaatcggggcacaacagttagaccaggccttgtgcgaccttggagccagtgtcagcgtcatgccaaaagacgtcttcgacaagctcaacttcacggtgttggcaccaacaccgatgtgccttcagctggctgattcatcagtccgttacctgacagggataccggaggatgttccagtcaagatacgggatttcttcatccaggttgacttcgtggtgctggatatggacacaggaaaggagacgccgcttatcctagggtgtccgttccttagcaccgcgggagccaacattgacgtgggaacggggagtatccgtttccacataaataggaaggaagaaaagtttgaggttcaactgaggacggaacaatgctccatggtcaggataaagtacgggccgaattcgcagaatattcaagtggtcgaagtggagccacccaagacagacagcctggtgaagttcatgcagaatttcctggagaaggaaacaacgatgcccaggaaccattattggaggacgccggtaaaaccacccataccggctaagctagagcagccggctcagaggaagccgtctttcgcaccaaagcaaaggaaggtgtggaaggaaaaaccaaagatgcccgctccatcacctacggagacgggtagaaaatccgcaaactga

SEQ ID NO: 14787 - DNA, 1824 bp, Oryza sativa
  Clone ID: TFbOSC401845j.C1.o8.fg
atggccagcaagactcttcacgagttcgctgctcccactgctgacaatgtggctgtcgggccgcaagtcaacataggagatgtggatttcaacttgaagtccagcctcgtcacgttggcccaggctagcccgttctgtggcaagcctaatgaggatgccaacgctcatctgcaacaattcctggagatatgtagcatgtacaccattaagggagtcagtcctgacgccgtcaggctgcggctgtttccgttctcccttctcgggagagcgaagcagtggttctatgccaaccgtgctgctatcaacacctgggataaatgctctacggcattcctctcgaagttcttcccgatgggcaaaaccaacaccctttgtggacgaatttccagcttccagcagacaagggacgagtccattccggaagcatgggaacgactgcaggagtacgtggccgcctgtcctcatcatgggatggacgactggatgatcctgcagaacttttacaatggggtcaccccgatgtcccgcgatcacctggacgcggcagctggaggagccttcttctctaaaacgatggtctccaatatgggttggagcgtggaacgactccagacccgtcagcgaggcatgcacaccgtcaaggagacggaattactcgctaccaagctggacctcctcatgaaacgcttggacgaccacgagaaaaggccacaaggcaccgtcaaggccttggactcacacgtcacgtgtgaggtctgcggcggcacgggtcattctgggaacgactgccggaaacacatgaggaggcgatgtacatgggcaacaacaacgggtcccatccacaaggaggttaggggtggaaccaaccacgcccatattttcaaggaggaaataacaaagtccctgcaaatgaaactgggaggattttggggcaacccgaggggaggtaagtccacctgtgatccgttgtaccctaaccctgcaggaactaatgggatgtcaaaaggaacgccatctaatgactcggctgacaaggagattcagccagaaaagacagtgccgcaaggatactgcgacacatggttgctgccatttcctcaacggagtaggaaaccgtcagtggacgagcagttcgctcattttgttgcagtgatccagaagattcacattaacgtgccattgttagacgcaatgcaagtgccaacatatgcctgttgtctcaaggacatactcaacaacaagagaccgctcccaacagcggaggtggtcaagctgacggaacactgcagcaacgtcatactccacaagctcccggagaagaagaaagatccggggtgtcccacgatcacctgctcgatcggggcacaacaattcgaccaggccttttgtgatcttggagctagcgttagcgtcatgccaaaagacgtctttgacaagctcaacttcacggtgttggcaccaacaccgatgcgcctccaagcggctgattcatcagttcgttatccggcagggatagtggaggatgtgccagtcaagatacgggatttctttatcccggttgattttgtggtgctagacatggacacggggaaggagacgccgctcatcctggggcgtccgttccttagcaccacaggagccaacattgacgtgggaacggggagcatccgtttccatatcaacaggaaggaggaaaactttgagtttcaaccaaggacggaacaatgctccatggtcagaatcaagtacgggccgaatccgcagaatattcaagtggtcgaagtggagccacccaagacggatagcctggtaaggtttatgtag

SEQ ID NO: 14788 - DNA, 4353 bp, Oryza sativa
  Clone ID: TFbOSC400003j.C1.o3.np
ccagcgggcggagcggcgatgggtgggtggcgggcccgcgcggcagcgaagcggcggcgggcgggcagagcaaccccgtcctcttcgtgctccgccccttcgtcggaagcgagcggaaggcgaagcaggtagggggcagcggtagagcggcgacgggcgagcgcgacaacgggcggaaggcggtcacgggcggcgggcggagtggcagagggctggtgcttaggcgcgtggtcaaggaggtggggggctcagccaactatccgatcctcacgaagacgaactacagcgactggtccctcttgatgagggtaatgctccaggcgcgcggcctctgggaagctgtcgagacgggtgacgtcgacttccaggaggataggatggcgttggaggccgtcctcaaggcggtccccgctgatctgctgccggtactcgctgtcaaggagacggcgaaagacgcctgggatgccatcaagacgatgcgcgtcggcgtcgaccgcgtccgcaagtccaaagcgcaggagttgcgcaagcagttcgacgcgaatgagttcaaggaaggcgagtccgtggagttctccgtccggctgagtgggctcgtcaacaaccttgccgtactcgggttccagctcgaggaatcaaaggtctgtgaaaagtttcttcatgttgttcctgatcatcttgagcagattgctttgtccatcgagactcgtctgagaaatgcggaggaacgccgtcccaagaagaagtccggtgatgagggcggcaaactgtatctcattgaagaacagtgggctgctcgcgccaaggaacggcagtccggtgagggatcgttgggcaagaaggcgggcaacaaccgtcgccgccgcggtggccggaagaaatccaaggccgctgcggatggcgagcgtggcgcgcgcgacacgcacgatcaagggcgtgataagtgcaagaactgtggctgtctcggtcactaggcgaaagactgtcgtcagcccaagaaacaagtcgcggcgcacatcgcccatggtgaagaggaggatgatgagccagcgttgctgatggctcatgccattgagttggcgccacctccgtcggcgtccccgcctccagcggggttgctcgaccttgatgaacccaaggtgttcgctcccctgcatcgccaggaacacgttgacaccggtgtgtggcaccttgacaccggtggtaccaatcacatgcccggcgtgcgtgatatcttcgccgagctcgacactgctgtgcgcggcaaagtccgtttcggcaacggctccgtggtcgccattgaaggccaaggtaaaattatcttcgagtgcaggaacggtgaacaccgcgcactcacaggggtgtactacatccccaagctcaacgcgaacctcgtcagtctcgggcagctggatgaaaatggctgcaacgtccgcatctttcatggcgtctgcacgatccgcgacaccgcgcgacagctcctcgctcgcgtgcagcgtacgcgcaatcagctgtacctgatcaagatcaccgtcgctcggcctatgtgcctctcagcacgcacgcaggaggccgcgtggctgtggcatgctcgcttcggccacctctacttcgacgcgctccggcgactcgctcgacaggacatggttcgtggtcttccccaaattgatcaagttgagcaactgtgtgactgctgcgtcatcaccaagcaacgacgttcaccgtttccctggcggtccctgttctgcgcggaggatcgtttggagctggtccatggtgacctctgtggtcccatttcgcctgcgacgcccggcggcaagaaacactttctgctgttggtcgatgacgcgagccgctacatgtggctcgcactgcttcagaacaagagggaggcggcagtggcgatcaaacgcttccaagcccgcagcgaagctgagtctggctgccgtctcaagctccttcgcaccgacaatgggggcgagttcacctccgccgagttcgccgcgcattgcgccgagagcggcgtcaagcgacagctcaccgcgccgtattccccccagcaaaacagggtggtcgagcgccgcaaccagacgattctggggatggcgcagagtcttctcaaggccaagtcagtgccggcgtgctactggggggaggcagtcactacggctgtgttcttgctcaatcgcgcgccgaccaaatgcttggacaacaagactccgtatgaagcttggtttgggcggaagccggccgttgggcacctgcgcacgttcgggtgtctcgcgtacgtcaaggatgttcggccgcatgtcaccaagctccaggaccgcaacaagcccacggtcttcctcgctacgttgagggatccaaagcctacaagttgttcgacccgaagtcgggtcgtgttcaagtgacgcgcgacgtggtgttcgacgagggcgccagctgggattgggatgccactgatggtatgcattcccctccctcgtctgacttctctgttgaatacattgtcactcaggagccggaacgtgcggagttgtccacgccgacgctggccacaccgagacatggcgcggttgcgcacgacgcgccgtcactgacggcctcactgctcaatgcgaggtcaccgagattcgtcagcccgccgcaggacggcgacgacaacctcgacgccgacgccgacgactgtccgccccggtaccgctccatcgatgggattctgggggagcgtacacgccgggtctagcaacaagggacctggcggacggcgagctttacttgctggcggcggaggaacctaccaccttcggcgaggccgagcatcaccaagagtggcggcgtgccatgctgcaggagatttcctccatcgaggacaacaagacctggcgccttgtcgacttgccacccggtcatcgcgccatcggactcaaatgggtctacaagatcaagaaggacgcgcgtggcatgatcaccaagcacaaggctcgtcttgtggcgaagggatacatgcaacagccaggggtggacttcaacgaggtgtttgctccagtggcacggctggagtcggtgagaatgctactcgcgcgggcggcgcaagtaggctggcctgtccaccacatggacgtcaagtcggcgttcctcaacggggagctcaccgaggaggtctacgtcaagcaacctcctgggttcattgtggacggacgcgaacatcaagtgcttcgcctggacaaggccttgtatggtcttcggcaggctccacgcgtgtggaacgcgaagctggacgcgagcctgctgtcgctggggttccggcgcaatgactgcgagcacgcggtctacgggcggggcagtggcgacagccgactgctcgttggcgtgtacgtcgacgacttgatcatcaccggcaacgtggcgatggagatcgaccgtttcaaagctgagatgatgtccctattcaagatgagtgatcttggtcccctctcgttctacttggggatcgaggtcgaacaggtggcggacggcattcgactatcgcagaaatcgtatgcacaacgcatacttgagcgagccgggatgcagggatgtaattcctgcttgacgccgatggagcctcgtctcaagttgaccaaggcaagcacggcggcgccggtggatgccacccagtaccgcagcatcgtcggctgcctgtggtatctggttcacacgcggccggacctcgcgttctctgttgggtacgtgagccacttcatggaagctccaaccaccgagcatgacgcggcggtgaaacgcatcttgcgttatgttgccggcacggttgatttcggctgctactacaaaaggatggaaacgccacctgagctcgtcggatactgtgatgcagacatggcgggtgatgtcgacactcgcaaaagcaccagcggggtcgtcttcttcctgggcgccaacccggtcagttggcagtccatcaagcaaaaggttgtcgcgctctcatcttgtgaggcggagtacatagcggcgacgacggcggcgtgttagggaatttggctggcgcagctgctgggagaaatcaagcaagaggagccagaaagcttcaagctcctcgtcgacaataaatcggcgatcgccctcagcaaaaatccagtgtttcatgacaggagtaaacacatcgccacgcgctaccacttcatccgtgagtgcgtggaggacgggagagctcaggttgagttcattggcattgatgggcagattgcagacatcctgaccaaggcactcgggcgggttcgttttcaagaattgcgagctcgcatcagcgtcgtcgaggtcagttcacggtgccaggcttagggggagaat

SEQ ID NO: 14789 - DNA, 3846 bp, Oryza sativa
  Clone ID: TFbOSC400044j.C1.o102.fg
atggctactcctgctaggttttcaactaagcctcatgttttcgacggaacggatttttctcattggtgtagtaggatgcaatcttatattatgactgaagattatgatatttggagaaaagtttcttatccttatgtgattcctgaagctattaatactgccgctgaaaaaactgcttttgagcaaaattgcaaagctcgcaacattcttttgagtggtatttctcgttcggattatgatcgtgttgcgcactttcgaactgctcatgaaatttggaatgctttgagtaacttttatcaaggaacaaataacattaaagaacttcgtcgtgatattttcaaaaaggagtatattaaatttgagatgaaacctggagaagcgttggatgactatcttttagttatatctattcaggagtctgttgacatgtctactttgactttggattcactttatataaaattgaaaacacatgagatgaatgttctttctcgaaaagttgattctaagtcgagtgctttggtttcttcttcttcctctttggatgctgatgcttcttcatctaagtcttcttttcttgctgtttttaatgccacatccgatgatcaactcgaacaaatcgaggaggaggatttggctttggttgctaacagaattgctcgagctatgaataatgccaggaacaggaaaagaggtggtccaaatcgttgctttgaatgtggttcaattgatcatcttcgttcgtattgtcctaagcttgggagaggcaaaagagaagacaaagatggtgagaagaccaacaacaacaagccgaagggttcatcccaagggaggaagctggagaatctcaggaaggcttttcaacaagtttgcgccgccttcgagccactaagtgatagagatggtgaaagtggagatgatgataagggaaagaacatctccgatgtttgcttcatggcgcgtggtgaatctgacacagagtatgaagataatgagttaaaacaacctcatgatgttttggattgctcaacatgtaatttgaataagttgaaattgagggatgctttaggtcgtgttgagtacatggaagatgttgtgaaaaacaatgaagtgctttcttgccctaaatgtcgtaaaagcaaaggtgtcatggtagatagtgaaaattgtgctaatttggaaaaagagatttcttatttgaaaagttctttgctaagattttatgatggtaaaaagaacctcaacatgattttggatcaatcaaaggtgctggtgctagaagtggcttttgtggcaaggaaggagaatgtgtggatcatggattccggttgttcgcggcacatgaccggtgataaaaattggttctcctcactcaagaaggcatccaagactgaatctattatctttggtgatgcttctacaagtgtcgttctcgctataggtttggttaaggtaaaggaaaaatttgaattgaagaatgtagctttggttgagaacttaaagtacaatttgctttcggtttcacaaattgttgatgaaaattttgaggtccactttaagaaaactggaagtaaagtttttgattcttgtggtgattctgtgttgaatatttctcgctatggaagagtgtttaaagccgattttgaaaatcctgtttcacctgtgataacatgtttggttgctaagtttgataaagatgtgatgttttggcatcgtagacttggacatgttggttttgatcatctcactaggttaagtggtttggatcttgttcgtggtttgcctaaacttaagaaagatcttgatttggtttgtacaccgtgtcgtcatgctaagatgattgctttttcacatgctcctattgtttctgtgatgacggatgcaccgggacagctattacatatggacactgttggtccagctggagtgcaatctgttggaggaaagtggtatgtgttggttattgttgacgatttttctcgatattcttgggttttctttatggcaactaaggacgaagcttttcaacactttcgtggtttgtttcttcgatttgagcttgaatttcctgacgagagcgatgacaacgacgacgacgaggtcggctcagctggtcagaccgggcgccaggccggtccgaccgccggcacacctccggacagaccggcccatgaggagcggtcaaactggccaggttcgtcgggttccggtactgttgatgctgatcgagatggacctccagagattacaacttcgaccagtactaatacagaacatggatcaacttcagaagtcgctgctcctttgcacattcaacgacgacatccaccggaacaaatcattggtaatataggtgagcggactacaaggtctaaggtaatgactcatgatgtttgtgcaaattctgcatttgttgcttcttttgaacccaaagatgtgtcacatgcattaattgatgaatcgtggattaacgccatgcatgaagaacttgaaaattttgagagaaacaaagtttggactttagttgaaccaccttctggacataatattattggaaccaagtgggttttcaaaaataaacaaaatgaggatggtttgattgtgagaaataaagctagacttattgctcaaggttttactcaaaatgagggtttggattttgatgaaacttttgctcctgttgctagaattgaggcaattagacttttgttggcttttgctgcttcaaaaggttttaaattgtatcaaatggatgtgaaaattgcttttctaaatggttttatacaggaggaagtttatgtcaaacaaccaccaggttttgaaaatcctgattttcccaaccatgttttgaaattgtctaaagctttgtatggtttgaaacaaactcctagggtatggtatgataggcttaagaactttttgcttgcaaaaggttttacaatgggaaaggttgacaacacactttttgttcttaagcatggtgataatcaactttttgttcagatttatgtggatgatatcatctttggttgttcgactcacgctttggttgtagattttgctgagactatgtgcagggaatttgagatgagcatgatgggtgagttatcgtactttttgggattgcaaattaagcaaacacctcaaggtacttttgtgcatcaaacgaagtatacgaaggatcttttgagacggtttaagatggagaattgcaagccaatttcaacaccaattggttctacagctgtgttggatcctgatgaagatggtgaagctgttgatcaaaaggaatatagaagaatgattggatctttgttgtatctaactgcttctagaccagacatacaatttgctgtgtatttgtgtgcacgctttcaagcttctcctcgtgcttcacatcgtcaagcggtcaagcgaataatgaggtatttgaatcatacacttgagtttggaatttggtattctacttcatcttctatatgcttaagtggatattccgatgctgatttcggtggttgtagaattgatagaaaaagtactagtggaacatgtcattttcttggtacatcgttgattgcaaggtcttctaggaaacaatttagtgttgctcaatcaactgctgaatctgaatatgttgctgctgctagttgttgttcacagattctttggcttttatctattttaaaagattatggtcttacttttgagaaagtacctctattttgtgataatactagtgctatcaatattgctaagaatcctgttcaacactcacgcacaaagcacattgatattcgttttcactttttgagggatcatgttgagaagggagatgttgaattgtag

SEQ ID NO: 14790 - DNA, 3823 bp, Oryza sativa
  Clone ID: TFbOSC25045j.C1.o5.np
atggctggttttgccgatgcactgaggccggataaattcaccggtgtgcactttaagagatggcagatcagggtcactctgtggttgacggctatgaaatgcttctgggtgagtactggcaaacctgaaggaattcttactgttgatcagcagaagcaattcgaggaagccactactctctttgtgggatgcattcttagcgttgttggcgatcgtctggtcgaggtgtatatgcatatgaccgacgctaaggagttgtgggatgcactgaatactaaattcggtgctaccgttgctagcaatgatctgtatatcatggagcagtttcatgactacaagatggctgacaaccgttctgtagtcgaacaggctcatgagatacaaaccatggctaatgaactcgaactccttaaatgtgtcttacccgacaaatttgtggccggttgcattattgcgaaagtacctccatcatggaaaagtttcggtactgcactcaaacacaagaaacaggaatactccgtggaggggttgatagcgtctcttgatgttgaggagaaagctcgggaaaaagacgccgcgtctaagggcgatggtgggcggtccagtgccaatgttgtgcacaaggcccagaacaagagcaaggggaaatacaaagctcaacctggtgtgtgggcaacctggtcatctggctaggaagtgtccacagcgtaaggggataaaggcacctgtagggcagacttctaagtctgctaatgcgaccattggcaacactggagatggaagcgggtatggtaatttaccaactgttttttcagttaatcagtctactaattggtgggttgatactggggccaatgtacatgtttgtgctgacatctcattgttttcttcttatcaggtcgcacggggttccactgtcctaatggggaatgggtcacatgcttctgtccatggtgttggcacggtagatctgaagtttacttcgggaaagaacgtgcagcatgtcccttctatcgacaggaatcttgttagtggctcccgtctgaatagagacagatttaagttggtttttgagtctaataaagtagtcatgtctaaacatggatattttattggtaaaggttatgagtgcggaggcctgttccgcttttccctttctgatttctgcaataagtctgtgaaccatatttgtggcagtgtggatgatgaggctaatgtttggcactcacgtttatgtcatattaattttggcttgatgtctcggttttccagcatgtatttaattcctaagttttccattgtcaaaggttctaagtgccatagttgtatgcaatcgaagcaatctcgcaagcctcacaaggctgccgaggagagaaacttggcaccactagaactcctacattcagatctttgtgaaatgaatggggtgttgacgaagggtggaaaatgatatttcatgacgctgattgatgatgctactagattttgctatgtgtacttgttgaaaacgaaagacgaggctctagactattttaaaatttataatgcagaagttgaaaatcaacttgatagaaagataaaaaggcttaggtctgatcgtggtggagagtttttctcaaacgagtttgacttattctgtgagaaacatggcatcatacatgagaggacgccttcctattctctcgagtctaatgggattgctgaaaggaagaaccgcacactgactgacttggtgaatgccatgttggacaccacgggactacctaaggcatggtggggggaggcattgttgacctcgaatcatgtgttaaacagagttcctaatagaaataaggacagaacaccatatgagatatggattgggagaaaaccatcactttcttatttgcgcacatgggagtgcttggcgaaagtcaatgtaccaataacgaagaagcgcaaactgggacctaagactgtggactgtctttctgggatatgctcatcatagcattgcctatagatttttaataattaaatctgaggtacctgacatgcatgttggtacaattatggagtctcgtgatgctaccttctttgagagctttttcccaatgaaggatacacatagtagttcgagccaaccctctgaagtaattcccaattcaatcacaccaccagaacaaactgaacatacacatgaacatgtcactgaggaggatgtcagtgaagctcctcgaaggagtaagagacaaaggacggctaagtcctttggtgatgatttcactgtgtacctcgtggatgacactcctaagtcaatttcagaagcatatgcatctcctgatgcagacaactagaaggaggttgtctgtagtgaaatggattccattatcgctaacgggacttgggaggtgactgagcgaccatatgggtgtaaacctgtggggtgcaagtgggtgttcaagaagaagcttaggcctgacggtactattgaaaagtacaaggctcggcttgttgctaaaggctatattcagaaagaaggcgaagatttctttgaaacttactcacctgttgctagattgaccacaattcgtgtgctacttttcctagcagcctcacatggtcttctcgttcatcaaatggacgttaagacagcttttcttaatggagagctggatgatgagatctatatggatcaacctgatgggtttgtagttgaaggtcaagaaggcaaagtgtgcaaattgttgaagtctttgtatggtctgaaacaagctcctaagcaatggcatgagaaatttgacaaaacattgacatctgcaggctttgcagtcaatgaggcagataaatgtgtgtactatcgccatggtgggggtgagggagttattctgtgcttgtatgttgttgacatactgatatttgggacaaaccttaggtgacaaatgaggttaaatcattcttgtcttaaaattttgatatgaaggatttgggagtagctgatgttatctaaaacattaagctaattagaggtgagaatgggattacgctcttgcagtcccattatgtggagaagatcttgaatcgtttttgctacattgatagtaagccttctccaacaccttatgatcctagcttgttgattcgcaagaacaagaaaattgctaggaatcaactagaatactcccaaatcattggctcgctgatgtacctggctagtgcaactaggcctgatatctcctttgctgtgagcaagttgagtcggtttaccactaatccggaagatgatcactggcgtgcgcttgagcgagtaatgtgttatctgaaaggtactatggaatcggggcttcactatactgggtatcctgcggtactggagggttatagtgattctaactagatctctgacgtggatgagatcaaagccactagtggatatgtcttcacactgggtggtggtgctgtttcatggaggtcttgcaaacagaccattttgacgaggtcaaccatggaagcagaactgacagcactggatactgctactgttgaggcagaatggctacgtgatctattaatggatctgcctattgtagaaaaaccggtgccggctatccttatgaattgtgacaatcaaacggtaattgtcaaagtgaatagttctaaggataatatgaaatcgtctagacatgtgaaaagacgattgaagtctgtcaggaaattgagaaactccggagttataacgttggattacatccaaacagctagaaacctggcagatcccttcacgaagggactatcacgaaatgtgatagacaatgcatcgaaggagatgggtttgagacccatg

SEQ ID NO: 14791 - DNA, 3171 bp, Oryza sativa
  Clone ID: TFbOSC29329j.C1.o1.fg
atggccggtagcatcaaccgtcgtggtctggacctgactggcttcgttttggagctgcggggcatgtgcgttgtcctggggtatccgcatggagtggactaccagggcaggcagctcccggagcaggagggtgacgatgcagagctccacgctgcttgggaggttactgcagtgatcctcactggctcacccgagaggacttcgttgacagtcaccgcgggtggagattctttcttcgctgcttgccagaacgccgcactcctcgccatcggcactcttcaccagcgctacccggacgagttgcagcactcgccctaccgctaccaccctcgtcgcggaggagcccgcgactacgccaccttccgggatgctagctcggaggatgacactaccatcatgcatctggcgcgcatggtggaggcgtacgacgcggctcgtatcgacttccatcagatggtgcgccgtgggatggtcgagaacaacatgaagatcctggagctgcgtcaggagaatctgcagctgaagaaggatctagacgcagtggaggcgcagctgcatcagctcaagatcgcccagggagaggtctgtcgccccaagcgtcgccgcgtctgccgcagccagaagatcaccacccgcaagagcacctccaggcccgagcttgttcgccagtccttggcatggacctgcttcgtggagacccctcgtgccgagcccgcgcccgtggttcctcaggagggggaagcctccggcgttggtagcacggaggatgcgctgctgctcaccttccgtcctggcccgtcgcagcggagaaatgctaatacaggtgatggcaaccaacccgaaggcagcaaccacaacaaccatggcagcccacctctacctcctcctccgcctccaccaccaccaccagacaccaacgccattctcacccaaatcctcgcccagcaggccaacatgatggctgctttcctccaccacatccaacatccgccacaacataatgctccaccaccacccccacaacactccaaactcgccgagttcctccgcatccgtccaccaaccttctctagctccaataaccccgtggatgcgttggattggttgcatgccgtggggaaaaagttagacaccgtgcagtgcagcgatgaggagaaagtcatcttcgccgcccaccaactgcaggggcccgcatctctatggtgggaccatttccaggctacgctgccagaggggcagcctattacttgggcccgcttcaccgccgctttccggaggacccatgtgcccgccggagtcatggcccttaagaaaagggaattccgagagttgaagcaaggcaaccgcttcgtgatggagtatttgcatgagtttaacaacctggcccggtacgccccggaggatgtacgggaagatgaggaaaagcaggagaagttcttggcaggaatggatcctgagctgtccgtccgtctagtctccggggactatccggatttccaacgtctggtggacaagagcatccgcttggaagccaagcacaaggaactggagtcgcacaagcgtcgcttggcgagtttccgcaaccaacagggggctaaccaaagggtccgctacaccaatccctatccagggggatcctcttcacagcagcagcaacctcgctccgcgccccgacctcaattcgtggtgcgcgtcccacagccgcagcaacagcagagtcagcaagggacttgtgcgccccgtcctccaacgccagccgcgcagcttggtcaaggccgcagggacgttcaaggtccgcagcgtctgtgcttcaactgcttcgagcctgggcactttgcggataaatacccaaagccgaggcgccagcaaggccaagcgcctccccgctccaacaacggtggtaaggatgtcattcggggtcgtgtgaaccacgtgacggccgaggacgtgctgacaactccagacgtcatcgttggtacgttcctcattcattccatccctgctaccattttgttcgactctggagcttctaactcgtttatatctgtgccattcgtggggagaaatcagttgggggtagaaaggcttaggaaccctctgctcatcaccacccctggaggggttatgacagcaaaccgcctgtgccgcctcgaccgtgcgccggccggccgcgccgtcgcctcctccagcgtcgccgccacctcctccaccccggcctgccctccgtttcgcgcggtgaccatcggaggcgcactcccgccgtcgcccttctcattcctccttgccggccacctccagccgcacctcccgcctcgcccgtgcaccctccggccgcgccgccacctctcccggcgtcgcagccgcctcctctttcccggcttcgcctccgtttcgcggggaaatcaccggagacgcgtcctcgccggcgtccagtggcgtcgccaccacttctccgcctccggccgcctctgccgcgtccccggtgcgccggccgacgtcgccgtctcctccgttgacgtcgcagtgccgtcctctctcccggccaggccacggcgtcgcccgaatttcgccggaacgccgtcgtctccgcgccggcctctccttcctcctcgtcggctcgccaccccgctgcaccaccaccttcaccaacatcgcagcggcgtgttccacgccgtcccctcctccgctcagccgctgctgcctgccatcatcgtttcatcgtcgtctccgatcgttctcgtcgtcgacgtcccatcggtcgcccggctcgtcgtctcgcggcgccgcctccgtcgtcggcatcgtagcggcgtgttcctcgccgtcctcgtccccgtgcagccgctgccggctgtcctcgtcgcctcctcgccggtcccggtcgtcgtcgtcgtcgtcgtcctctcgtcgttcccggtcatcgtggcgttcgtccctccgtcgagccgttctcgtccgtcgtccgcgtccgtcaagcaagccgcggcagccccgtcgtcgtcttcgtcctcggctccgcgtcgtcaagcctcgtgccggccgcgtctcgccttcgcccaaggatcgccaccgaagccgtcccctcgccgttcgtctccgttgtgcccgtctgtctccgccgcgcccgttcgtcgttgtcgttcccacgcctcgtcgcgtggtggcttgtag

SEQ ID NO: 14792 - DNA, 5583 bp, Oryza sativa
  Clone ID: TFbOSC401672j.C1.o1.np
atggacgaagtcgggggtcaatggacatctctagggcaaatgaaggctacacgagctgcggcccggtagtcgagatgtcatggcacagggccggtgtcctgctgctaggggctcagtcctgcctacctgtcccgggggttccggccgtaggtggggttgggtcgttgtacacctctgatcagagtataatctatccgaatagccgtgccctcggttatgggcaagctgagcaatgtacccaaatggccggcagcatcaaccgtcgtggtctggacctgactggcttcgttttggagctgcggggcatgtgcgttgtcttggggtatctgcatggagtggactaccagggcaagcagctcccggaataggagggtgacgatgcagagccccacgctgcttgggaggtcactgcagtgattctcactggctcacccgagaggacttcgttggcagtcaccgcgggtggagattctttctccgccgcttgccagaacgccgctctcctcaccatcggcactcttcaccagcgctacccggacgagttgcagcactcgccctaccactaccgccctcgtcgcggaggagcccgtgactacgccaccttcagggatgctagctcggaggatgacgctaccatcatgcacctggcgcgcatggtggaggcgtacgacgcggctcgtatcgacttccatcagatggtgcgtcgtgggttggtcgagaacaacatgaagatcctggagctacgacaggagaatctgcagctgaagaaggacctagacgcagtggaggcgcagctgtgtcagctcaagatcgcccagggagaggtctgtcgccccaagcgccgtcgcgtctgccgcagcctgaagatcactgcccgcaagagtacctctaggcccgagctggttcgtcagtccctggcgtggacctgcttcgtcgagacccctcgtgccgggcccgcgcccttggttcctcaggaggagggagcctctagcgttggtagcacggaggatgtgttgttgctcaccttccgccctggcccgtcacagaagtagacgagcagttagtaggcttgcgcatggtgacaaccaggagaagtgctactaccggtgatggcaaccaacccgaaggtagcaaccacaacaaccatggcagcccacctccacctcctcccccgcctccaccaccaccaccagacaccaactccattctcacccaaatcttcgcccagcaggccaacatgatggctgccttcctccatcacatccaaaatccgtcacaacataatgctccacctccaccaccacccccgcaacattctaaactcgcagagttcctccgcatccgtccacctaccttctctagctccaataaccccgtggatgctttggattggttgcatgccgtggggaaaaagttagacaccgtgcagtgcaacgatgaggagaaagtcatctttgccgctcaccaactgcaggggcccgcatctctatggtgggaccactttcaggctacgcagctagaggggcagcctattacttgggcccgcttcaccgccgctttccagaggacccatgtgcccgccgaagtcatggcccttcagaaaagggaattccgagagttgaagcaaggcaactgctctgtgatagagtatttgcatgagtttaacaacctggcccggtacgccccggaggatgttcgtgaagatgaggaaaagcaggagaagttcttagcaggaatggaccctgagctgtccgtgcgtctagtctccggggactatccgaatttccagcgtttggtggacaagagcatccgcttggaagccaaacacaaggaactggagtcgcagaagcgtcgcctggcgaatttccgcaaccaacagggggctaaccaaaggatccgctacaccaatccctatccagggggatcctcctcgcagcagcagcaacagcagcagcaacctcgctccgcgccccaacctcaattcgtggtgcgcgtcccacagccgcagcagcagcagagtcagcaagggacccatgcaccccgttctcctacgtcagccgtgcagcctggacaaggccgcagaaacgttcaaggtcagcagcgtctgtgcttcaactgcttcgagcccgggcactttgcggataaatacccaaagccgaggcgccagcaaggccaagcgcctccccgccccaacaacggtggtaaggatgtcattcggggtcgggtgaaccacgtgactgccgaggatgtgctgacaactccagacgtcatcgttggtacgttcctcattcattccatccctgctaccattttgttcgactctggagcttcccactcgtttatatctgtgccattcgtggggagaaatcagttgggggtagaaaggcttaggaaccctctgctcatcaccacccctggaggggttatgacagcaaagtattatagccctgccgttcctatagaaatccagggaattccttttccctcggatctgattcttctagacaccaagaacttggatgtgatccttgggatgaattgattggctcaattccaaggagtaatggattgtgcaagacgcactgtcactctgtaccgagggccggaacaaccggttgttttctttgcacccccaacctctgtcggcagttccgaacttcatcagataggactgtcaaaaatcccgatcgtcagtgagttcggagatgtgtttccggaagaactacccggtatgccgcccaagcgagagattaagttccggatagatcttgctccaggaaccactcctctgtacaagcgaccctaccgtatggcagcaaatgaactggccgaagtcaagaaactgttggaagagttaaaagaaaaggggtacatacggccgagcacttccccctagggtgctcccgtgatttttgtggaaaagaaggacaagacaaagaggatgtgtgttgactacagagctctcaatgaagttactatcaaaaacaagtaccctcttccccggatcgatgatctgttcgatcagcttaaaggtgccactgtcttttcaaaaatcgatcttcgctccggatatcaccaattgcttattcgtgaagaagatatcccgaaggccgcgttcaccacgcgatatgggctgtatgaattcacggtgatgtcgttcggtctgactaatgctcctgccttcttcatgaatttagtgaacaaagtgttcatggaatacttggataagtttgttgtggtcttcatcgacgacatcctggtgtactcgcaatcagagatctccgtttggtgttgggaaagttgcgggaacatcaattgtatgccaagcttagcaagtgtgagttctggttgtccgaagtcaaattcttagggcacgtgatatctgctaaaggagttgctgtggaccccaaaacagtgaccgccgtcactgattggaagcgacccaagacagtcactcaagtccgcagctttttgggtttggccgggtactaccgaagattcatcgagaacttctccaaaatcgctcgacccatgacatagttgctgaagaaagaagaaaaatttgtgtggagcccacaatgcgagaaagcgttccaaactctcaaagaaaagctggtttcctcgccagtgttgatcttaccggatactcgtaaggacttcctggtgtactgtgacgcttcgcgccaaggattggggtgcgtattaatgcaggaaggtcatgtggtagcctatgccacacgccagcttcggcctcatgaaggcaactaccctacccatgatttggagttagccgctgtggttcatgctctaaagatctggcggcactatctcattgggaattgctgtgaaatatgtactgatcataagagtttgaaatacatcttcactcagtcggatctgaatcttcggcagagaagatggttagaactcatcaaggattatgatgtgggaatccactatcatcctggtaaggccaacgtggtcgccgacgctctaagtcgaaaaagccattgcaacactcttggcgtccgtggcattccaccggaacttaatcaacagatggatgccctgaacctaagcatagttggtcgtggattcttggctacgctggaagccaagcctaccttgctcgatcgaatccgtgaggctcagaagaatgatccagatatgcatgggatcctcaaaaatatgaaacaatgtaaagccgctggtttcatagaagatgaacatggaaccctatggaacggaaatcgtgtatgcgttccggacgacaaggaacttaaacacctgatacttcaggaagctcacgaaagtccttattccatccaccctagcagtacgaagatgtacttagacttgaaagggaaatactggtgggttagtatgaagcgggaaattgcagagttcatggccctttgtgatgtgtgccagtgtgtcaaggcagagcaccagcgaccggccggacttctccaacctctccaagtaccagaatggaaatgggatgaaattgggatggatttcatcaccggacttccaaaaacccaaggaggatatgattctatatgggttgttgtggaccgactaaccaaggtagctcggtttattcctgtgaagaccacctatggagggaacaaactagccgaactctacttcgctaggatcgtgagtctccatggcgttcctaagaaaattgtatctgatcggggaaaccagttcacctctcacttttggaagaaactccaagaagagttgggtacccgattaaatttcagcaccgcgtatcacccgcagacagatggacagaccgagcgtctaaataagatcctagaagatatgctccgtgcttgtgttctagatttcgggaagacctgggataagagtctcccctatgccgagttctcctacaataacagctaccaagccagcatacaaatggcaccctatgaagcgttgtatggacgcaaatgctggacaccactattgtgggaccaagttggggaaagccaagtgttcgggactgataacttgagagaagctgaagcgaaagtcagaaccattcgggagaatctaaagttggcccagtctcggtagaagagttatgcagacaaccgacgccgtgacctggaattcgcagtggatgactttgtctatcttcgggtcacgccgttgcgaggcgtacgtcggtttcagacgaaagggaagctcgcacctcggttcgtgggtcctttccgtatcattgctcgacgcggagaagtcgcttaccagttggagctgcccgcatcattgggcaacgtgcatgatgtgttccatgtgtcgcaactcaagaaatgtcttcgagtgccatccgagcaggccgactcagagcaaattgaagttcgcgaagacttgacctacgtggagagaccagtgaaaatcttggacaccatggagcgcaggaccaagaaccgggtaatccgtttttgcaaggtccaatggagcaaccacgccaaggaagaagctacttgggaacgtgaagacgagctaaagtcagcccatcccgatctcttcgccagttcttccgaatctcggggtcgagattccgtt

SEQ ID NO: 14793 - DNA, 6037 bp, Oryza sativa
  Clone ID: TFbOSC405120j.C1.o28.np
atggagcccgagagcgccgcgccggtttccttctcctccggccgccctctctcactaccaaccctatataaaccctccccgcacctcctccgtccgtttccgccactcgccgcccttcctcctcgccggaatcgagctcgcgccgtcgctctctctctccgccgtcaccgccgagctccggtccgccgccgtcgtcgccccggaccacctcccacctcggcgccgcctccttcggcttcgccgcattctcgccgacctcgtccacccctccgtttcggtcgccatccgccggaacgccgtcgaccccatcgacccgagccgcgccgccgccttccttcgctccggtcgccgtttccgtcgtcgccgtcgacccggggtgagccgtggaccgccgcttcgtttccccctttccctcccctctctcggccgccgctccgccgtgcctatggccgccgccggcgaccataggggcgcgggcgcgccacctcccgccgctgcgccggcgtggtcgccttcgggtgcaccgagcggctgccgcgtggggcctggctgccagccgcccgcgcccttaggtgcggctgacgcgtgggacacacggcgccggccggtgcgcgcccgggtgcgcccggttcaccgtggacccaccacggccatataaggaccggtcttcgggcctctgttgcaaagcactaccgtacttccacatgtctagtgggtaaggcttagtttgtggctcagtctggttataaacaaaagtacacggagcaatgtacccaagttagtgttttcattcttaaaacctgcttaacaactaaaacgtggaacggttggccatggttggcttgggacgagctgggacccagggtcgggttgccagttcggtctgaatcatcgtaggccttgggttaaggcagtgtttgtagatggccggtagcatcaaccgtcgtggtctggacctgactggcttcgttttggagctgcggggcatgtgcgttgtcctggggtatccgcatggagtggactaccagggcaggcagctcccggagcaggagggtgacgatgcagagctccacgctgcttgggaggttactgcagtgatcctcactggctcacccgagaggacttcgttgacagtcaccgcgggtggagattctttcttcgctgcttgccagaacgccgcactcctcgccatcggcactcttcaccagcgctacccggacgagttgcagcactcgccctaccgctaccaccctcgtcgcggaggagcccgcgactacgccaccttccgggatgctagctcggaggatgacactaccatcatgcatctggcgcgcatggtggaggcgtacgacgcggctcgtatcgacttccatcagatggtgcgccgtgggatggtcgagaacaacatgaagatcctggagctgcgtcaggagaatctgcagctgaagaaggatctagacgcagtggaggcgcagctgcatcagctcaagatcgcccagggagaggtctgtcgccccaagcgtcgccgcgtctgccgcagccagaagatcaccacccgcaagagcacctccaggcccgagcttgttcgccagtccttggcatggacctgcttcgtggagacccctcgtgccgagcccgcgcccgtggttcctcaggagggggaagcctccggcgttggtagcacggaggatgcgctgctgctcaccttccatggtgacgaccaggagaaatgctaatacaggtgatggcaaccaacccgaaggcagcaaccacaacaaccatggcagcccacctctacctcctcctccgcctccaccaccaccaccagacaccaacgccattctcacccaaatcctcgcccagcaggccaacatgatggctgctttcctccaccacatccaacatccgccacaacataatgctccaccaccacccccacaacactccaaactcgccgagttcctccgcatccgtccaccaaccttctctagctccaataaccccgtggatgcgttggattggttgcatgccgtggggaaaaagttagacaccgtgcagtgcagcgatgaggagaaagtcatcttcgccgcccaccaactgcaggggcccgcatctctatggtgggaccatttccaggctacgctgccagaggggcagcctattacttgggcccgcttcaccgccgctttccggaggacccatgtgcccgccggagtcatggcccttaagaaaagggaattccgagagttgaagcaaggcaaccgcttcgtgatggagtatttgcatgagtttaacaacctggcccggtacgccccggaggatgtacgggaagatgaggaaaagcaggagaagttcttggcaggaatggatcctgagctgtccgtccgtctagtctccggggactatccggatttccaacgtctggtggacaagagcatccgcttggaagccaagcacaaggaactggagtcgcacaagcgtcgcttggcgagtttccgcaaccaacagggggctaaccaaagggtccgctacaccaatccctatccagggggatcctcttcacagcagcagcaacctcgctccgcgccccgacctcaattcgtggtgcgcgtcccacagccgcagcaacagcagagtcagcaagggacttgtgcgccccgtcctccaacgccagccgcgcagcttggtcaaggccgcagggacgttcaaggtccgcagcgtctgtgcttcaactgcttcgagcctgggcactttgcggataaatacccaaagccgaggcgccagcaaggccaagcgcctccccgctccaacaacggtggtaaggatgtcattcggggtcgtgtgaaccacgtgacggccgaggacgtgctgacaactccagacgtcatcgttggtacgttcctcattcattccatccctgctaccattttgttcgactctggagcttctaactcgtttatatctgtgccattcgtggggagaaatcagttgggggtagaaaggcttaggaaccctctgctcatcaccacccctggaggggttatgacagcaaagtattatagccctgccgtccctatagaaattcaggggattccttttcctcggatctgattcttctagacaccaagaacttggatgtgatccttgggatgaattggttggctcaattccaaggagtagtggattgtgcaagacgcactgtcactctgtaccgagggccggaacaaccggttgttttctttgcacccccaacctctgtcagtagttctgaacttcatcagataggacagtcaaaaatccccatcgtcagagagttcggagacgtgtttccggaagaactacccggtatgccgcccaagcgagagattgagttccggatagatcttgctccaggaaccactcctctgtacaagcgaccctaccgtatggcagcaaatgaactggccgaagttaagaaatagttggaagagttgaaagaaaaggggtacatacgtccgagtacttctccctggggtgctcctgtgatttttgtggagaagaaagacaagacgaagaggatgtgcgttgactacagagctttcaatgaagtcaccatcaaaaacaagtaccctcttccccggatcgatgatctgttcgatcagcttaaaggtgccacggtattctccaagattgatcttcgttccggatatcaccagttgcgcatccgtgaagcaaatatcctgaagaccgcattcaccacgcgatacggactgtatgaattcacggtgatctcattcggtttaaccaatgctcctgccttcttcatgaacttaatgaacaaagtgttcatggaatacttggataagtttgttgtggttttcattgatgacattttggtatactcacaatcagaggaagaccatcagcaccatctccgtctggtgttgggaaagttgcgggaacatcaattgtatgccaaacttagcaagtgtgagttctggttgtccgaagtcaaattcttagggcacgtgatatctgctaaatgagttgctgtggaccccgaaacagtgaccgccgtcaccgattggaagcaacccaagacagtcactcaaattcgcagtttcttaggtttggcaggatactactggaggttcatcgagaacttctccaaaatcgctcgacccatgacacagttgttgaagaaagaagagaaatttgtgtggagcccgcaatgcgagaaggcgttccaaactctcaaggaaaagctggtttcctcgccggttttaatcttaccggatactcgcaaggacttcatggtgtattgtgacgcttcgcgccaaggattggggtgcgtgctcatgcaggaaggtcatgtggtggcctatgcctcacgccagctacggcctcatgaaggcaactaccctacccatgatttggagttagccgcgatggttcatgctctaaaaatctggcggcactatctcattgggaatcgctgtgaaatatatactgatcataagagtttgaaatacatcttcactcagtcggatctgaatcttcggcagagaagatggttagaactcatcaaggattatgatgtgggaattcactatcatcctggtaaggccaacgtggtcgccgatgctctaagtcgaaaaagccattgcaacactcttgaagtccgtggcattccacccaaacttaatcaacagataaaagccctgaacctaagcatagttagtcgtggattcttggctacgctggaagccaagcctaccttgctcgatcaaatccgcgaggctcagaagaacgatccggacatgcgtggactcctcaagaatatgaaacagggtaaagccgctggtttcacagaggatgaacacggaaccctatggaacggaaatcggcgtgtcaaggcagagcaccaacgaccggccggacttctccaacctctccaagtaccagaatggaaatgggatgaaattgggatggatttcatcaccggacttccaaaaacccaaggtggatatgattctatatgggtagttgtggaccgattaaccaaggtagctcggtttattcctgtgaagaccacctatggagggaacaaactagccgagctctacttcgctaggatcgtgagtctccatggcgttcctaataaaattgtatctgataggggaagccaattcacctctcacttttggaagaagctccaagaagagctaggtacccgattaaatttcagcaccgcgtatcacccgcagacagatggacagaccgagcgtctaaatcagatcctagaagatatgctccgtgcatgtgtcctagatttcgggaagacctgggataagagtctcccctatgccgagttctcctacaataacagctaccaagccagcatacaaatggcaccttatgaagcgttgtatgggcgcaaatgccggacaccgctcttgtgggaccaagttggggaaagccaagtgttcgggactgatatactgagagaagctgaagcgaaggtcagaaccattcgggataatctaaaggtggcacagtcccggcagaaaagttatgcagataaccgtcgccgtaacctggaattcgcagtggacgattttgtgtaccttcgggtcaagccattgcgaggtgtacacaggtttcagacgaaagggaagctcgcacctcggttcgtgggtcctttccgtatcattgctcggcgcggagaagtcgcttaccagttggagctgcccgcctccttgggcaacgtgcatgatgtgttccatgtgtcgcaactcaagaaatgccttcgagtgccgtccgagcaggccgactcagagcagattgaagttcgcgaagacttgacctacgtggagaggccagtgaaaatcctggacactatggagcgaggagcaggaaccgggtaatccgtttttgcaaggtccaatggagcaaccacgccgaggaagaagctacttgggagcgtgaagacgagctgaaggcagcccatcctgatctcttcgccagttcctccgaatctcggggtcgagattccgtt

SEQ ID NO: 14794 - DNA, 4056 bp, Oryza sativa
  Clone ID: TFbOSC414257j.C1.o1.np
atggagcccgagagcgccgcgccggtttccttctcctccggccgccctctctcactaccaaccctatataaaccctccccgcacctcctccgtccgtttccgccactcgccgcccttcctcctcgccggaatcgagctcgcgccgtcgctctctctctccgccgtcaccgccgagctccggtccgccgccgtcgtcgccccggaccacctcccacctcggcgccgcctccttcggcttcgccgcattctcgccgacctcgtccacccctccgtttcggtcgccatccgccggaacgccgtcgaccccatcgacccgagccgcgccgccgccttccttcgctccggtcgccgtttccgtcgtcgccgtcgacccggggtgagccgtggaccgccgcttcgtttccccctttccctcccctctctcggccgccgctccgccgtgcctatggccgccgccggcgaccataggggcgcgggcgcgccacctcccgccgctgcgccggcgtggtcgccttcgggtgcaccgagcggctgccgcgtggggcctggctgccagccgcccgcgcccttaggtgcggctgacgcgtgggacacacggcgccggccggtgcgcgcccgggtgcgcccggttcaccgtggacccaccacggccatataaggaccggtcttcgggcctctgttgcaaagcactaccgtacttccacatgtctagtgggtaaggcttagtttgtggctcagtctggttataaacaaaagtacacggagcaatgtacccaagttagtgttttcattcttaaaacctgcttaacaactaaaacgtggaacggttggccatggttggcttgggacgagctgggacccagggtcgggttgccagttcggtctgaatcatcgtaggccttgggttaaggcagtgtttgtagatggccggtagcatcaaccgtcgtggtctggacctgactggcttcgttttggagctgcggggcatgtgcgttgtcctggggtatccgcatggagtggactaccagggcaggcagctcccggagcaggagggtgacgatgcagagctccacgctgcttgggaggttactgcagtgatcctcactggctcacccgagaggacttcgttgacagtcaccgcgggtggagattctttcttcgctgcttgccagaacgccgcactcctcgccatcggcactcttcaccagcgctacccggacgagttgcagcactcgccctaccgctaccaccctcgtcgcggaggagcccgcgactacgccaccttccgggatgctagctcggaggatgacactaccatcatgcatctggcgcgcatggtggaggcgtacgacgcggctcgtatcgacttccatcagatggtgcgccgtgggatggtcgagaacaacatgaagatcctggagctgcgtcaggagaatctgcagctgaagaaggatctagacgcagtggaggcgcagctgcatcagctcaagatcgcccagggagaggtctgtcgccccaagcgtcgccgcgtctgccgcagccagaagatcaccacccgcaagagcacctccaggcccgagcttgttcgccagtccttggcatggacctgcttcgtggagacccctcgtgccgagcccgcgcccgtggttcctcaggagggggaagcctccggcgttggtagcacggaggatgcgctgctgctcaccttccatggtgacgaccaggagaaatgctaatacaggtgatggcaaccaacccgaaggcagcaaccacaacaaccatggcagcccacctctacctcctcctccgcctccaccaccaccaccagacaccaacgccattctcacccaaatcctcgcccagcaggccaacatgatggctgctttcctccaccacatccaacatccgccacaacataatgctccaccaccacccccacaacactccaaactcgccgagttcctccgcatccgtccaccaaccttctctagctccaataaccccgtggatgcgttggattggttgcatgccgtggggaaaaagttagacaccgtgcagtgcagcgatgaggagaaagtcatcttcgccgcccaccaactgcaggggcccgcatctctatggtgggaccatttccaggctacgctgccagaggggcagcctattacttgggcccgcttcaccgccgctttccggaggacccatgtgcccgccggagtcatggcccttaagaaaagggaattccgagagttgaagcaaggcaaccgcttcgtgatggagtatttgcatgagtttaacaacctggcccggtacgccccggaggatgtacgggaagatgaggaaaagcaggagaagttcttggcaggaatggatcctgagctgtccgtccgtctagtctccggggactatccggatttccaacgtctggtggacaagagcatccgcttggaagccaagcacaaggaactggagtcgcacaagcgtcgcttggcgagtttccgcaaccaacagggggctaaccaaagggtccgctacaccaatccctatccagggggatcctcttcacagcagcagcaacctcgctccgcgccccgacctcaattcgtggtgcgcgtcccacagccgcagcaacagcagagtcagcaagggacttgtgcgccccgtcctccaacgccagccgcgcagcttggtcaaggccgcagggacgttcaaggtccgcagcgtctgtgcttcaactgcttcgagcctgggcactttgcggataaatacccaaagccgaggcgccagcaaggccaagcgcctccccgctccaacaacggtggtaaggatgtcattcggggtcgtgtgaaccacgtgacggccgaggacgtgctgacaactccagacgtcatcgttggtacgttcctcattcattccatccctgctaccattttgttcgactctggagcttctaactcgtttatatctgtgccattcgtggggagaaatcagttgggggtagaaaggcttaggaaccctctgctcatcaccacccctggaggggttatgacagcaaagtattatagccctgccgtccctatagaaattcaggggattccttttcctcggatctgattcttctagacaccaagaacttggatgtgatccttgggatgaattggttggctcaattccaaggagtagtggattgtgcaagacgcactgtcactctgtaccgagggccggaacaaccggttgttttctttgcacccccaacctctgtcagtagttctgaacttcatcagataggacagtcaaaaatccccatcgtcagagagttcggagacgtgtttccggaagaactacccggtatgccgcccaagcgagagattgagttccggatagatcttgctccaggaaccactcctctgtacaagcgaccctaccgtatggcagcaaatgaactggccgaagttaagaaatagttggaagagttgaaagaaaaggggtacatacgtccgagtacttctccctggggtgctcctgtgatttttgtggagaagaaagacaagacgaagaggatgtgcgttgactacagagctttcaatgaagtcaccatcaaaaacaagtaccctcttccccggatcgatgatctgttcgatcagcttaaaggtgccacggtattctccaagattgatcttcgttccggatatcaccagttgcgcatccgtgaagcaaatatcctgaagaccgcattcaccacgcgatacggactgtatgaattcacggtgatctcattcggtttaaccaatgctcctgccttcttcatgaacttaatgaacaaagtgttcatggaatacttggataagtttgttgtggttttcattgatgacattttggtatactcacaatcagaggaagaccatcagcaccatctccgtctggtgttgggaaagttgcgggaacatcaattgtatgccaaacttagcaagtgtgagttctggttgtccgaagtcaaattcttagggcacgtgatatctgctaaatgagttgctgtggaccccgaaacagtgaccgccg

SEQ ID NO: 14795 - DNA, 1638 bp, Oryza sativa
  Clone ID: TFbOSC418607j.C1.o24.fg
atgaacaacctgaacaggaccttggcagaattgcatgggatgctaaagactgccgaggaaagcattaagaaaaactccaaccatgtgatggttatgcataagcgcaagcctaacaacaagaagagtggtcaaaagagaaagttaaactctgatgagatcacgagtactagcaactctaagaccaaggttcaaaagacagggcccgctaaggatgcagagtgcttcttttacaaggagacaggtcattggaagagaaactgtaagaaatacctagagcagctcaagcagaagcagcaggatggaaagagttccacctcagtctataacattaatgcaaaaaggcaacttcctaatgatttaaatcccacttttatttggcattgtcgcttgggtcatataaatgagaaacgcatgaagaagcttcatagagatggacttctacactcgtttgattttgaatcatttgagacatgcgaatcttgtttacttggcaaaatgacaaaggcacctttcacgggtcaaagtgaaagggcaagtgaactattgggactagtacatactgatgtatgtggaccaatgagctcaactgccaggggtggttttgggtactttattacctttaccgatgactttagtagatatggttatgtctacttaatgaggcataagtctgagtcctttgaaaagttcaagaaatttcagaatgaggaaacgaaaggatattatttttataatcgggaagagggcaaagtgtttgtcgcccgacacggtgttttcttggaaaaagagtttatttcaagaaaggatagtgggagcatgttgtggaagcaccggtttcacgaaggtccgaaaggatacggcgtacacctgcgagacgatgatgaacctactacctatgtggaagcaatggtgggaccagactctgagaaatggcttggagccatgaaatccgaaatagaatctatgcatgtcaatcaagtttggaacttggttgatccacctgatggtgtaaaagccattgagtgcaaatgggtctttaagaaaaagacagatgtagatggaaatgttcacatctacaaggcacgattggtggcgaaaggtttcagacaaattcaaggtgttgattatgatgaaactttctcaccattcgccatgctaaaatctattaggattgttttagcgattgctgcctatttcaattatgagatatggcaaatggatgtcaaaacaactttcctcaatggaaatctcgatgaggatgtgtacatgacacaacccaagggatttgttgatccacaatcagctaaaaagatatgcaaattacagaaatccatttatgggttgaagcaagcatctcggagttggaatattcgttttgacgaagtagtcaaggcgttgcgctttgtcaaaaacgaagaagagccttgtgtatacaagaagattagtgggagcgcattggtgtttctaatcctatatgtagatgacatattattgattgggaatgatattcttatgcttgaatctgttaagacatcgttgaaaaatagattttcaatgaaggacttaggggaagcagcatatattctgggtataaggatctatagagatagatcaaagaggctaattggattaagctag

SEQ ID NO: 14796 - DNA, 1296 bp, Oryza sativa
  Clone ID: TFbOSC900047j.C1.o16.fg
atgcactgtcccaggctcccagctggcatgaaaagcgtcgtcactttttggagtactttgcaatttcacattaaaaaacggtttcttgaaaatgaacggtttcttgaaaatgaaagtgaactgccacttttcccatgcatgcaccatgttcagtataagggcatttccaacccaataactaggatggtgtccatagcattaaataagttgccacctaggataaaaaatgatatgatcatggtagctcctgcaccatccagttttaacttgcggtctattcttgagaaagagaagttgactggaacaaacttcatggactggtatcgcaacctgagaattgttctcaggcaagagcacaaagagtttgtgcttacagagtcttttccagctaacttgcccaacaatgctcttgctgctcaacgtagggagcatgaaaagcgatgcaatgattatcttgacataagctgtctcatgcttgctactatgtcccctgagcttcaaaggcaatatgaggcattggatgctcatacgataatcacgggactacgtaacatgtttgaggaccaagcaagagctgagaggtttaatacctcaaagtccttgtttgcgtgcaggcttgcagaaggtaatccagtgagcccacatgtgatcaaaataattggttacaccgagagtctggataagcttggctttccccttagccgagagttggctactgatttgattctccagtcgctccctcccagctttgagccattcataatgaatttcaacatgaacaacctgaacaggaccttggcagaattgcatgggatgctaaagactgccgaggaaagcattaagaaaaactccaaccatgtgatggttatgcataagcgcaagcctaacaacaagaagagtggtcaaaagagaaagttaaactctgatgagatcacgagtactagcaactctaagaccaaggttcaaaagacagggcccgctaaggatgcagagtgcttcttttacaaggagacaggtcattggaagagaaactgtaagaaatacctagagcagctcaagcagaagcagcaggatggaaagagttccacctcaggtattaatgttatagaaattaatcttgctacttcctttactgattcttgggtatttgataccgggtcagttgctcacatatgcaaatcgttgcaggggctgaaaagtaggagcttagcaagaggcgaagtggacattcgcgtgggcaatggagcaagagttgctgctgttgcggtcggcactatgccattatctttaccgtga

SEQ ID NO: 14797 - DNA, 2330 bp, Oryza sativa
  Clone ID: TFbOSC27895j.C1.o2.np
atccgattcgaactcggatccataacgcggcaacattcgaatgatttaatgcaggggctacatttgccaggctagtgtacagggtcttgggatcacaattggggccaaacgtcgaagcctatgttgatgacattgtcataaaaagtcgcaaggccttcgaccacgcatcagacttgcaagagacttttgacaacctccgcgcaaccagcatgaagctaaatccagagaaatgtgtgtttggcgttcgtgctggtaagtagttgggattccttgtgtccgaacgggggatcaaagcaaacctcgaaaaaatcgatgccattcagcaaatgaagccaccatcgagcgttcggcaagtacaaaagctcgaggggcgaattgcggcacttagtcgattcttgtcaaaggcggccgaaaggggcttgccattcttcaagacccttcgaggggcaggaaagttcagttggatgccaaagtgccaagcagccttcgatgagcttaagcggtatctccaaagcccacaagctctggttagcccattggcagggattgaactgtggctctatctagcagcttcgcccgtggctgtcagcatagctttggtgcaagaaaccaaagcaggccagaaactagtatacttcgtctccgaagctctccagggggcgaaagttagatacattgaaatggaaaaacttgcttacgccctagtaatggcttcaacaaagctcaaacactacttccaagcccacagaatcatggtaccttcgcagtatcctttggacgaagtgcttcgaggaaaagaaatcacggggtgcctaagtaaatgggccgctgagctatcacctttcgacctacactttgtcgctctcactgcaatcaagtccctagtcctcactgatttcgtggccgaatggacacgcttcgacacaaccaacaacgcagcagaatatgaagcagtgttaatgggcctgaggaaagcgaaagctttgggcgttcggcgtttcctagtccggacggacccaaagcttgtcgccagccaggttgacaaatcctttaaagcgaaattagaaggaacgagaaaatatctagaagccgtttagtatatgggtaaatgtttcgccggcataacggtcgaacacttgccctgaggccagaatgaagaggctgatgcgctagcgaaatcagctgcttgtggagggccgcattcgccaataatctttttcaaagtcctgtatacaccaagtgtgccagcagatagccaagacatcatggcaattgaccaagtctagttgggcgaagacccaaatgactggcgaacgcctttcgtcaagcaccttaaagagggatggctgctagatgaagaatctatggcgaaacagttgcaactcagagctatgaattacaagctaatctccaggcaattgtatcgaaccggaatactgcagcccatgcttcgttgtgtctctttctccgaaggtgaggagatggtgaaggaaatacactaggggatatgcgaagcgcaccaggcagcaaggaccgtcgcatcaaaagtattttgctaaggcatatattggccaaccgtacttaaagtacgtgttgaacatgtcaaaaaatgtgaaagctgtcagcgacacggccgaagtcaaacagcaccacagtacgaactacagctaatcgcaccaatctagccagtcgcaagatggggcttagacatcaacggcccattcctagtggcgcggaacaattacaagttcgccattgaagccattgagtacttctctcgctgggttgaagccgaaccacttggcacaataactgcagctgcggttcagaagtttgtatggaaaaacattgtttgccgattcggggtaccgaaggagttcatcactgacaatggcaagcagttcgattctggaaagttcaaggaaatgtgcgaggggctaaacctgcaaatcagattcgcttcggtcgcacacccgcagttgaacggggcggccgaatgagcgaatggaaagatcctcgaggctctaaagaagagactggaggtggcggcgaagggaaaatggccagatgaaatgctatccattctctgagcccttcggacgacccccacaaggccaacaaagttcagccctttcatgctcctctgtggagatgaggcgatgatgccggcagaactaggggctaactcaccaagggtgatgttctccgggggcgaagatgggcgtgaagtatcgcttgaactcctagaaggggtgagagtcgaagcactagaacacatgcgcaagtacgtggcaggtacttcggtaacctacaacaaaatggttcgaccg

SEQ ID NO: 14798 - DNA, 3924 bp, Oryza sativa
  Clone ID: TFbOSC24701j.C1.o4.fg
atgacggaaccgccatcatccaaggcggaggtggagccggccattgtgataccaatcacattgaatgatttcgaaggagaagaccgcaagtccatggaggagtacatcaaggagctcacacaagaggcgttgatgagggcgtctactaggactcgtcaagatgcaacttttgaggataaatttgatgagtttttaagatttaaagtcggccctctcttggccgattttgtgggtaaaaataaagcctctaccactgctagccaagcccctatagatcaaacaaatagtagaaccgatggagtggcgcacacagccggtccgaccgggcctgatggccggccaaacggccggtccgaccgggtattaccccggcggtcagaccgggacttaggccagtctgatcgcgcctctggatgtcgatcagaccgggccctggaccgaacatttgatcctcctgtatctagtgctgcaactaatccccaagttcccccacatgttcctaatgcttataatgatgttggtagggggtatcctcccgatactaggcaagtccaatataaccatattgcgccgcaaacacaacctattaggccaccaaatccaccaccaaatcaacataggcctgataatatggaggaaataattggtgggattattagggataaattcgggattgaaactaggaatcttgctaaggtttaccaaaagccgtatcctgactattatgataatatgccgtttcctcgtaattatagagttcccaaatttaccaagtttagtggtgaagatggtaggaccacatgggagcatgaaagccgggttaaggataataaaaaaattgttagaccatatgagaaaaagcctaatgttaatgtgattgattaccctgaggctagtgatagtgaagatgagggtgatcatgatatgtatgttgctgaatggtcatggactaacaaaaacaagccttttgtttgttctaacctaatgccgactcctcgcaaagatcggcaaagtgaggttaaatatagttttgatgtggccaagtatgataagatttttgattatcttttacaagaaaaacaaattagattacctaaaggccatatcataccatctcaagaagaattgaaacgtcgagcttattgtaaatggcatgattctcattctcattccactaatgattgcaatgtgtttcgacgacaggttcaattggccatagatgaaggacgattgaagttcaccgatggctccaagatgaagcttgatcatgatccttttccggtgaatacaattaatttcaatgacaagaaggtgttgattcggccggagcaagccgaatctactaaaggaaaaggagtaatcattggtgaaccaaggccaaagataatagtgccaaagaacccagaggtttgtgtttgtaaagagaataaaagtgaagcttcaacttctaaagctcctaggaagaccaaagtgacccttgatatgcttttggagaaatatgaaaagcaaggtagtgagagagctcgcaacaaggggaaaatacagagatcacctcctagggagcgatttggtcactcgccaagacggtcgcattcacctccatatcatcattcacaagacataccatggggtccctatccaatgccgccgccgggttatccttatccttattacatgccatggggggcaacgccgccaatgttcaatcatatgcctccaatgcaattcaatcaagggtggggaggaccaaggaggccaattcatgagcgtttgtcttcaccaaacaacggccggttttatggtaagaaccgggccaatgaggaaagcgcatctggctggtctgaccggtggtctacgtccggtctgaccaggctccagcgccggtttgataggaggtttgcaaagggcgatgtgagggcttcatcgtcatcaactagacctaatagggggcattatttacctcctggaacagagccgaaacctaggaggatgcctaagtatttaacggctactcaaaggagaaggttgcaatgtcttcgggcccaagaaataagagagaaaaaggctgaagagcaaagggataaaaggttcaatgagttgcgaccaccaccggtatggaggcgtaaaaccatagagaaggaagaaccggttgttgtagagaagaaggaagaacaatcgattgctaaagatgagtcatctccaaaagaagacatggatatcaacaaggtatgtatgttgcctatggagttttgtgctatggatgaagccgaggttgctcaattttcactaggtcctaaagatgtggtttttgagaagcccgatgaatcaaaccgtcatatgaagcctctctatctcaaatgtcatactgatggaaagccggtatctaggatgcttgtggatggaggtgccgctgtgaatttgatgccatactcgttgttcaagaagttggggcgtgaagatgatgagttgaagaagactaacatgattctcaatggcttcaatggtgaaccaacggaggcgaagggtatcttttcggcggagcttaccgtggggaacaagacgttaccaaccgctttcttcatcgtcgatgtgcaagaggctaatttagagtggttacaaaagagggtgcaagaatatcggtctacaaagaacgatattggtgaaactattgaagattttgatgaagtggagaagcttggacaagggtttacatcggccgatccattggaggaagtagacatagttgatggaaccaaaccaaggccgacttttgtaaacaaaaatatgagagccgattataaggttaatataatcgagctacttacagagtatgttgattgctttgcatgggagtaccatgagatgccgggtcttagccgtgagcttgttgagcatcggcttccaattaaaccgggttttaggccttataaacaaccacctcgtcgttttaatcctttgctatatgaccgagtcaaagaggagattgatcggttgttgaaggcggggtttattgggccatgtcgttatgcggagtgggtttcttgtatagtcctggtggagaagaaggggagtgccacggccatcgtgctgttggcatggagatatatcaaaccgtcaacgcgagaacgagcggctgcatgggaggatcagtccagcaccatcatcgttctgtttccagcaccatcatcttcctgctactaccgtctcctctttgctacttacatcggaaagttgtgccgcctcttctttgctacggttgcacatacaccatcaagggcgtcagtcccgacgccgtcaggctacgactatttccgttctctgttcttcagagagcgaagcagtggttctatgccaaccttgctgctgtcaatacctgggacaaaatgctctacggcattcctctcgaaattcttcccgatgggcaaaaccaatgcccttcgtggaaggatttcaagtttccagcaaacaagggatgagtctattccggaagcatgggaacgactgcaggagtacgtagctgcatgtcctcatcttgggatggacgactggctgatcctgcaaaacttttattatggactcaccccgatgtcccacgatcacctggacgcggcagctggaggagcgttcttctctaaaacggttcaaggagccgttgatctaatagagaagatggtctccaatatgggttggagggaggaacgactccagacccgtcagcgaggcatgctacttgctgctaagctggacctcctcatgaaacgattggacgaccatgagaaacggccacaaggcaccctcaaggccttggacactcacgccacatgtgaggtctgcggcaacacgggtcattctgggaatgactgcccggaaacccgtgaggaggcgatgtacatgggcaacaacaacaacgggtatcatccataa

SEQ ID NO: 14799 - DNA, 1458 bp, Oryza sativa
  Clone ID: TFbOSC401095j.C1.o8.fg
atgaaacctggagaagctttggatgactatctttcgaggtttaataaaattttgagtgatcttagatctgttgattcttcttatgatgctaattatccacaatctaagatttctcgccactttttgaatggtcttgacatgtctatttgggagatgaaagttacatctattcaggagtctgtgaacatgtctactttgactttggattcactttacacaaaactaaaaactcatgagatgaatattctttctcgaaaaggtgattctaagtctagtgcttcggttttgtcttcaacttctttggatgttggtgcttcttcatcgaagtcttctgttcttgctttatttaatgccatgtccgatgatcaactcgaacagttcaaggaggaggacttggttttgttatctaataaattttctcgagctatgaaaaatgttaggaacaggaaaagaggagaaccgaatcgttgttttgagtgtggtgcaattgatcatcttcgctcgtattgtcctaagcttgggagaggcaagaaggaagatgatgataaagtcaaagaggatgacatcaacaagaagaagaacacaaaggagaagaagaaacattgcatgcagtggttaatccaagaaatcatagcagcttttgatgaatcggaaggtgaagatgagagcaaaggtaagcaaattgttgatctagcttttattgctcgtaatgcaagttgtgatgttgatgaatctgaagatgataatgaagaaaagcttagttataatcaattagaatatgctgcttacagatttgctaagaaagttcaaacatgttctattgtgcttgatgagaaggataacactattgagattttaaatgctgaaattgatagattaaaatcttcgattcgtgacgatgataattgtcaatcttgtgaagttttattttctgaaattaatgctctgcgagatgtcaattctgttaattgcaaaaaattggaatttgagattgaaaaatctaaaagacttgcccataaacacaaaaaggaaagcgaaattgcttttgcaaaacgacgttggcaaaaatcgggttttaattcgaggaccacggttagaccgacactgatcagtcggtcagaccggctagcggttagaccgcagttgaaccggcggttagaccggttgccaggcccggtcagagcgcaggcacaacggcggtcagaccggcctcggggtgattttgcacgaaattcaaatcggacttttgtgaagcaaaaagagattatcgtcgaagtggttttggagataatcaattttcaggagatgaacagggtttgctgttttgtcgggaccggtgactcgatgccccgggagagtatttgcgatgggccgggagtcggcttggtggtaagacgatgtccgtggtggtcagatatcatgcgggatactaaggctagagttgatgcacatggttga

SEQ ID NO: 14800 - DNA, 863 bp, Oryza sativa
  Clone ID: TFbOSC403480j.C1.o1.fg
atggtgctactcggggtggccgatacagagccgacggagccgtattcggtcagaccgaggcgatggcggtctgaccgagccaagaagtgcattgctctccaagccgaagttgaagataagagcaagggcaaggtgaatgaagtcaatgaggacttggaggaagagattgcccttcttgctagaaggttcaatgatctcttgggaaggagaaaggagagaggaaggggctccaactcaaataggagtagaaatagaagacccaacaagactctctccaacttgaggtgttttgagtgtggtgagaagggacactttgtttccaagtgccctttcaaggatgatgatggagacaagtcatccaagaagaagagtggaggctacaagctcatgaagaagctcaagaaggaatgcaagaagattgaggcattcatcggggaatgggactcaaatgaggagagctccgcctcatccgggtccgaggaagaaggtggtgatgatgcaagctccaagaagaagaagatgaccgttgttgccatcaaggaggctccatcactcttcgctccactttgtctcatggcaaagggttcctctaaggtaacatctcttagtgatagtgagagtgatgatgattgtgatgatgtttcctatgatgagcttgtgagtatgtttgaggagctccatgcttatagtgagaaggagattgtcaagttcaaggctctaaagaaggatcatgcttctttggaggtcttgtatgaggagctaaagacctcttatgagagactcaccatttctcatgagaagcttgcatgcctgcaggtcgactctagaggatccccgggtaccgagctcgaattcgccctata

SEQ ID NO: 14801 - DNA, 2181 bp, Oryza sativa
  Clone ID: TFbOSC900207j.C1.o16.fg
atggtaatgccggcaccgccgaggggttgggacttctcccctggtgatgcagttcgagaggaagttcgtcttcgatttcgttctccggtgcatttctctttgaagttcagccctatgcactaccggttagctgttgatctcctgagagctaatttccggttaaccaattcttctgtggctttggctttaagagccgccattggtggttctcctgcggatctcaatgtccagcatttgttagaccggagtttttcttttgatgttttctctaagcaagttggtctatggatttatcgtcttagatctttttcctgtgatgatttttcccttcgcttttatctctggagaaatgggggtcctaattggcagtgggaatttgagtcttggagccgtgattgtgctgaggagtgggcattggtgccttctaagaagaggtcagtgcacaaaagttctaaggttcagaaagacaaatcttatgcccaagctgttcaacaaagagacgtctcggttaaattcgtgtttcaatgtttgaaggcccttctccaggagagaagatcggttttcacgagacttcaagggttgaaggttcctattgccggtgaaactctggcgaccaagacggtggagccaatcacgaaggatgatcctatttctctgcgttacttgaattcaaatttcttgccttcctgtgtgcgttgtttggataagggccatattgcttctaattgctctgggcctgttcggtgtcattcctgcctggaggctggtcatatgtcctgcttctgtgccactaggcccactaaggcccatcaacctgtggggaagtttccgaaactgagttctgaggataacttagtttggagatctaaatcttctccggccaaaaagacggcggtttctccccatataccttcctctcccaggaacactgttcaatctaatccgcaaaatttcccctcgcttgcaatggctgatctcaaccctaccccgcaatgttttcttcgtcaagcgcaagtggttcatcaaggtggtaacttgcgtgtgccgcgtgttgatctcaccatcccacagcatccgcctcgaagacatgaggatgtttgcatcaccattgtagagccggccatccctgagcatgaatgggatcatcaccgggcgcttatctcggattatatctttgaagtacacatgtatgaggttcgtactgcttaccgtcacccttcgacagttggtatgttccagcttcgttcagtcatgcatagagatgccttagtaaactctccccctgctgcatatgatgggatgcatactgttgagcttgtgaagcatgaccaagggcagaactggcgtgcttgccactttaatcgagaaggctggtttcttctcttggatttcccgctagattttgttgatcgtcaccatataaatctagcgcttgatagagatcagatgttgggaagagtgtttgtgagagcaaagtatagggatcttgactctgtcccccgaaagatagtgttacaggaacctttgggtaatggtggtggagatggagattttgcaaacatcccacctgaagatgatttacctcctgctggaccacagcctgggcctaatgatgataatgccgatgacccagatgatggaaatatttggcaactaggacatcctggtaatcaggggggaggtggtgtttgggatgatctcgtgcaacagcaacaggctgcggaagcagaaatagaggatgcttggggtcaggatcacccaatgggccaggtcgaagaaaactcggggcaattgattatcttgcctaatcaagaggagcaggagcttaatctgattgatcaagagcaacaagtgcagctgtttctggccaggctcaaggatatagctgacagggaaggaccaaagcacccatctttttatcctatggcaggattgctggagaaaattgaccatctatgcaaagctaaagaaatcatgcaggcagctcaaattcctagccccacatctctgccattcagttcccctttcatgaccctggtactcctaaagcggaaggcaatgtttgatcatgctcctcctgtagtaaaaagagcacattctagctgggctttattgtcttccccctctgatgatgggcattctgatcaggagattttagatgttgcacctttgcaagcctag

SEQ ID NO: 14802 - DNA, 4536 bp, Oryza sativa
  Clone ID: TFbOSC407447j.C1.o1.fg
atggctactcctgttaggttttcaactaagcctcatgttttcgatggaacggatttttctcattggtgtagtaggatgcaatcttatattatggctgaagattatgatatttggagaaaagtttctcatccttatgttattcctgaagctattaatacagctgctgaaaaaactgcttttgaacaaaattgcaaagctcgcaacattcttttgagcggtatttctcgttcggattatgatcgtgttgcacatcttcaaactgctcatgaaatttggaatgctttgagtaactttcatcaaggaacaaataacataaaagaacttcgtcgtgatattttcaaaaaggagtatattaaatttgagatgaaacctggagaagctttggatgactatctttctaggtttaataaaattttgagtgatcttagatctgttgattcttcttatgatgctaattatccacaatctgagatttctcgtcactttttgaatggtcttaatatgtctatttggaagatgaaagttacatctattcaggagtttgttgacatgtctactttgactttggattcactttacacaaaattgaaaacacatgagatgaatgttctttctcgaaaagttgattctaagtcgactgctttggtttcttctacttcctctttggatgttgatgcttcttcatctaaaccttcttttcttgctgtttttaatgccacatccgatgatcaactcgaacaaatcgaggaggaggatttggctttgtttgctaaccatattgctcgagctatgaataatgctaggaacaggaaaagaggtggtccaaatcggtgctttgaatgtggttcaattgatcatctccgttcgcattgtcctaatcttaggagaggcaaaagagaagacaaagatgttgagaggacaagcaacaacaagcccaacaacaacaagccgcaaggttcatctcaagcgaggaagttcaaggagaatcttagaagagcttttgatcaagtctatgctgcttttgagccatcaagtgatgtagatggtgagagtggagatgatggtaagggaaagaacatctccggtgtttgcttcatggcgcgtggtgaatcggatattgagtatgaagatcatgaggtaagtgcttttgaagaagctattaatattttgagtgcaaaaaatatgaagtgtgagaagatgtatagaaaacaggaatttatcattgaatctcttaaatctgaaattgatagattaaaatctcttattcctaatgatgatgattgctcaaattgtgaggttttaatgaatgagatttcaaaaattagagatattaatgctgcacatgatttgaaaaatagatcttctcttgcttgtagttttgctttgcatacacgcactttggatgagttgtttttaactaaaaagttgttgcaaaaatatcaaattgcttttcatgctagtttgatgtttaacatgatttctgctaaaaagtttaaacaacctcatgatgttttggattgcttaacatattgtgaaaattgtgctaatttggaaaaagaggtttcttatttgaaaaattctttgcaaagattttctgatggtaaaaagaacctcaacatgattttgaatcaatctaaggtgttggtgctagaagtggttttggtggcaaggaaggagaacgtgtggatcgtggattccggatgttcgcggcacatgaccggtgataaaaattggttctcctccctcaaaaaggcatccaagactgaatcgattatctttggtgatgcttctacaagtgccgttctcgctacaggtttggtaaaggtaaatgaaaaatttgaattgaagaatgtagctttggttgagaacttaaagtacaatttgttttctgtttcacaaattgttgatgaagagtttgaggttcactttaagaaaactggaagtaaagtttttgattctcgtggtgattctgtgctgaatatttctcgctatggaagagtgtttaaagctgattttgaaaatcctgtttcacctgtgataacatgtttggttgctaagtttgataaagatgtgatgttttggcatcgtagacttggacatgttggttttgatcatctcactaggttaagtggtttggatcttgttcgtggtttgcctaaacttaagaaagatcttgatttggtttgtacaccgtgtcgtcatgctaagatggtttctacttcacatgctcctattgtttctatgatgacggatgcaccgggacaactattacataaggacaccattggtccggctagagtgcaatctgttggaggaaagtggtatgtgtttgttattgttgatgatttctctatatattcttgcgttttctttatggcaactaaggatgaagcttttcaacactttcgtggtttgtttcttcgactgaatcttgaatttcctggttctttgaaaagaattcgaagtgataatggtggtgagtttaaaaatgcttcttttgaacaattttgcaatgaaagaggtcttgaacatgaattttcttctcctcgtgttcctcaacaaaacggtgttgttgaaaggaaaaaccgtgttttggctgagatgactagaacgatgttggatgaatataaaactcctagaaaattttgggctgaggctattaacactgctttctatatttcaaatcgagttttcttgcgttctaaacttggaaaaacgtcttatgaacttcgatttggtcatcaacccaaagtttcacatttgcgtgtttttggttgcaaatgctttgtcttgaaatctggaaatttggacaagtttgaggcacgttctactgatggattgtttcttggttaccccgcacatactcgtggctatcgtgtacttattttagggactaacaatattgttgagacttgcgaagtttcttttgatgaggctagtccaggaactagaccagaaattgcaggtacactgtcacaggttcagggggaggatggtcgtatttttgaagacgagagcgactacgacgacgacgacgaggatgtgtggtcagaccggccagggtcgtcggctgagggttctgttgatgctgatcgagatggtcctccagaaattactacttcgaccagtactgatacagaacatggatcaacttcagaagtcaccgctcctttgcacattcaacgacgacatccgccggaacaaattattggtaatataggtgagcggactacaaggtctaaggtaacgactcatgatgtttgtacaaattctgcatttgttgcttcttttgaacccaaagatgtgtcacatgcattaactgatgaatcgtggattaacgccatgcatgaagaacttgaaaattttgagagaaacaaagtttggactttagttgaaccaccttctggacataatattattggaaccaagtgggttttcaaaaataaacaaaatgaggatggtttgattgtgagaaacaaagctagacttattgctcaaggttttacccaggtggagggtttggattttgatgaaacttttgctcctgttgctagaattgaggcaattagacttttgttggcttttgctgcttcaaaaggttttaaattgtatcaaatggatgttaaaagtgcttttctaaatggttttatacaggaggaagtttatgtcaaacaaccaccaggttttgaaaatccttattttcccaaccatgtttttaaattgtctaaagctttgtatggtttgaaacaagctcctagggcatggtatgatagacttaagaactttttgcttgcaaaaggttttacaatgggaaaggttgacaaaacgctttttgttcttaagcatggtgataatcaactgttcgttcagatttatgtggatgatatcatctttggttgttcaactcacgctttggttgtagattttgctgagactatgagcagggaatttgagatgagcatgatgggtgagttatcgtactttttgggattgcaaattaagcaaacacctcaaggtacttttgtgcatcaaacgaagtatacgaaggatcttttgagacggttcaagatggagaatagcaagccaatttcaacaccaattggttctacagctgcgttggatcctgatgaagatggtgaagctgttgatcaaaaggagtatagaagtatgattggatttttgttgtatctaactgcttctaggccagacatacaatttgctgtgtgtttgtgtgcgtgctttcaagcttctcctcgtgcttcacatcgtcaagcggtcaagcgaataatgaggtatttgaatcatacacttgagtttggaatttggtattctacttcatcttctatatgcttaagtggatatttcgatgctgattttggtggttgtagaattgataggaaaagtactagtggaacatgtcattttcctggtacatcattgattgcatggtcttctaggaaacaatctagtgttgctcaatcaactgctgaatctgaatatgttgctgctgctatttgttgttcacagattctttga

SEQ ID NO: 14803 - DNA, 2085 bp, Oryza sativa
  Clone ID: TFbOSC32096j.C1.o1.fg
atggaggaaaaatactctgcgaaaccatttgttttcgatggacacaattttgtcatttggaaggcacgaatggaggcctacctccagtcgcaagggcataatgtgtggaataaggttaaatctccttatactgtgcccgatgatgctgacatcacgcctgcaaatatggctcaggttgattttaattatcgtgcaagaaatgcaatcattggtggaatttcttctggtgaatttaatcgtgttcaacaccacaagtccgctcatgacatgtggactgctctgtgcaatttccatgagggaaacaatgatattcaattggttcgtcagaatcaatttcataaagaatatcaaagatttgagatgcacccaggagagtccattgattcttatttcaaacgttttggagaaattatttcgaagttgagatctgttggaaaagaattttctgataatgataatgctcgccatcttttgaattgtcttgattatggtgtttgggaaatgaaagttacttccatcacagagagtgcacctctgagtgaccttaccatggacaagctttactcaaagctaaaaacccatgagatggatgttttccatcggaaaggcctcaaacactcgatggctttggtagctgatccctctggtagtacttcttctaatgactcagcctttgtgtatggtggcttctctcttgccgctttacactcagtcactgaggagcaattagagaagatccctgaagatgatcttgctctttttgctagaaaattctcaagagcttacaaaaatgtgagagatagaaaaagaggaaaaaccaatgaaccatttgtgtgttttgagtgtggagagcctaaccacaaaagagtgaattgtcccaagttgaagaagaagagtgacaagacgaccaagaagcccgagggacaagggcgaaaggggaagaaggatttgatgaagaaggcgatccacaaggtcttggcggctcttgaggaggtgcagcttagcgacatcgactccgacgacgatgatcaagaaaagggggacaaggacttctccgggatgtgctgtctcgccaacaacgaggacttcatcaacctgtgtctcatggcgcttgaggataaggatgactcatcggagcatcctgaggtatgtcttgatgatatcccttccttggatggttctctttgtgatgattcttgctcagataatgactctgttgatgatgaactaagcaaagaaagaatggcacacttgatgattgaaattagtgataagtataggtcttctaagtataaaattgagaaactaaaatctgaaaatgatggaatggcgctagaaattgctaggcttcgatccatgattcctgaggaggatacctgttctacttgtgcttcatatctttctgaaattaatctcctcaaggataagttgaaatcatgtgctttaggagctgggaatccttctagtgctagtgctgcttgctctacttgctatgaaatgaaagttgatatgggtttgcttgagatggaattgaaagaactaaaagaaaaatttgttcatgataggattggtaggtgtgaaaattgtcccattctcactagtgacaatgatgaattaagacaacaagttgccatgcttaggaccaagaatgatttgttagaatcttttgctactaaggaacctattcattcttcatgtgctaattgtgctatcctggaaactgaactaaaagatgctaaaactgtcattgattctatcaaatctattgattcttgttcttcatgcatttctctgaaagttgatcttgagtctgctaagaaagagaactcatacctacaacaatctttagagaggtttgctcaaggaaagaaaaagttgaacatgatcctagaccaatccaaagtgtccataaacaatcaaggtataggctatgattttgctgagtctttgaggataggtacccatgagattttaggtgtcacagatgggatgatagaactagctcaaaaacctataaccttcaagtctgcaggtttcattggaaacactagttctagtacacccaaaacctcagaaccaaagatg

SEQ ID NO: 14804 - DNA, 6438 bp, Oryza sativa
  Clone ID: TFbOSC400300j.C1.o25.fg
atggaggaaaaatactctgcgaaaccatttgttttcgatggacacaattttgtcatttggaaggcacgaatggaggcctacctccagtcgcaagggcataatgtgtggaataaggttaaatctccttatactgtgcccgatgatgctgacatcacgcctgcaaatatggctcaggttgattttaattatcgtgcaagaaatgcaatcattggtggaatttcttctggtgaatttaatcgtgttcaacaccacaagtccgctcatgacatgtggactgctctatgcaatttccatgagggaaacaatgatattcaattggttcgtcagaatcaatttcataaagaatatcaaagatttgagatgcacccaggagagtccattgattcttatttcaaacgttttggagaaattatttcgaagttgagatctgttggaaaagaattttctgataatgataatgctcgccatcttttgaattgtcttgattatggtgtttgggaaatgaaagttacttccatcacagagagtgcacctctgagtgaccttaccatggacaagctttactcaaagctaaaaacccatgagatggatgttttccatcggaaaggcctcaaacactcgatggctttggtagctgatccctctggtagtacttcttctaatgactcagcctttgtgtatggtggcttctctcttgccgctttacactcagtcactgaggagcaattagagaagatccctgaagatgatcttgctctttttgctagaaaattctcaagagcttacaaaaatgtgagagatagaaaaagaggaaaaaccaatgaaccatttgtgtgttttgagtgtggagagcctaaccacaaaagagtgaattgtcccaagttgaagaagaagagtgacaagacgaccaagaagcccgagggacaagggcgaaaggggaagaaggatttgatgaagaaggcgatccacaaggtcttggcggctcttgaggaggtgcagcttagcgacatcgactccgacgacgatgatcaagaaaagggggacaaggacttctccgggatgtgctgtctcgccaacaacgaggacttcatcaacctgtgtctcatggcgcttgaggataaggatgactcatcggagcatcctgaggtatgtcttgatgatatcccttccttggatggttctctttgtgatgattcttgctcagataatgactctgttgatgatgaactaagcaaagaaagaatggcacacttgatgattgaaattagtgataagtataggtcttctaagtataaaattgagaaactaaaatctgaaaatgatggaatggcgctagaaattgctaggcttcgatccatgattcctgaggaggatacctgttctacttgtgcttcatatctttctgaaattaatctcctcaaggataagttgaaatcatgtgctttaggagctgggaatccttctagtgctagtgctgcttgctctacttgctatgaaatgaaagttgatatgggtttgcttgagatggaattgaaagaactaaaagaaaaatttgttcatgataggattggtaggtgtgaaaattgtcccattctcactagtgacaatgatgaattaagacaacaagttgccatgcttaggaccaagaatgatttgttagaatcttttgctactaaggaacctattcattcttcatgtgctaattgtgctatcctggaaactgaactaaaagatgctaaaactgtcattgattctatcaaatctattgattcttgttcttcatgcatttctctgaaagttgatcttgagtctgctaagaaagagaactcatacctacaacaatctttagagaggtttgctcaaggaaagaaaaagttgaacatgatcctagaccaatccaaagtgtccataaacaatcaaggtataggctatgattttgctgagtctttgaggataggtacccatgagattttaggtgtcacagatgggatgatagaactagctcaaaaacctataaccttcaagtctgcaggtttcattggaaacactagttctagtacacccaaaacctcagaaccaaagatggtacctatgactagcaagtctaagcctgtagagttacctagacccaaaaatccaaaacaagttgagcacaagcaaaaccagagacaaaccaagcctgtagagaaaaccaagtatgagtgcacctattgtgggaaagctggtcatttggattttggagtagggagaagtaattcttggcttgtggactccggttgctcacgccacatgaccggtgaagccaagtggtttacttctctcactcgtgcatccagtgatgagaccatcacttttggggatgcgagcagtggacgcgtgatggctaaaggaacaatcaaggtcaatgacaaattcatgctgaaagatgtggcactagtaagtaagcttaagtacaatttgctctctgtttcacaactctgtgatgaaaatctggaagttcgtttcaaaaaggacaggtctcgagttcttgatgcttctgaatctcctgtttttgacatttctcgagttggtcgagttttctttgctaacttcgactcttctgctcctggtccttctcgttgtctcattgcctcagagaatagggatttgtttttctggcatcgacgtcttggtcatattggctttgaccacttgtctcgcattagtggtatggatttgattcggggtttgcctaagttgaaagttccgaaagatcttgtgtgtgcaccatgtcgtcatgggaaaatgacatcttcttcccacaagcctgttacaatggttatgacagatggaccgggacaactgcttcacatggatacggttggtcctgctcgggtccagtcagttggggggaagtggtatgtcttggttgttgtggatgatttctctcgctactcttgggtctattttcttgaatcaaaggaggaaacatttggcttctttcagtctcttgctcgtagtttggctttggagtttcctggtgctcttcgagccattcgcagtgataatggctctgaattcaaaaattctgcatttgaatctttctgtgattcttctggagtcgaacaccagttttcttcgccatatgtcccacaacagaatggggtggttgagaggaagaaccgcacccttgtggagatggcacgaactatgcttgatgagtttacgactccaagaaaattctggactgaagctatttctgctgcttgttttatctccaatcgtgtgtttttgagaactatcttgcacaagacgccatatgagctcagatttggtcgtcgaccaaaagtttcacatctcagggtcttcggttgcaaatgctttgttcttaaatctggaaatttggacaagtttgaatctcgatcattggatggcattttccttggctatgctactcattctcgggcttatcgagtttatgttctttcaaccaacaaaattgtggagacttgtgaagtcacttttgatgaggctagcccaggagctagaccagaaatttcaggtgttccagatgaaagcatctttgtggatgaggattcagatgatgatgacgatgattctattcctccacctctagacagtacaccaccagtgcaagaaaccggttctccttcgactacatcaccttcaggagatgcaccaactacatcatcttcagcagctgaggagattgatggtggcacatcaggaccgacagctccccgacacatccagaaccgacatccgcctgactcgatgatcggaggcctgggtgaaagggtaactagaaatcggtcttatgaacttgtcaattcagcttttgttgcctcttttgagcccaaaaatgtttgtcatgctttatctgatgagaattgggttaatgccatgcatgaagagttagaaaattttgaaagaaacaaagtttggtctttggtagaacctcccttgggttttaatgtgattggaacaaaatgggttttcaaaaacaaactaggtgaagatggttcaattgttcgaaacaaagccagactggttgcacagggtttcacccaagttgagggcttggactttgaagaaacttttgcaccagttgctagattagaagctattcgaattcttttggcttttgctgcttcaaaaggtttcaagctttttcaaatggatgtgaaaagtgcttttctgaatggagttattgaggaagaggtctatgtcaaacaacctcctggttttgaaaatccaaaatttccaaatcatgtgttcaaacttgaaaaagctctttatggtttaaaacaagctcccagagcctggtatgaaagattgaaaacctttttgcttcaaaatggttttgaaatgggggctgttgataaaactctttttactcttcatagtggtattgattttcttcttgtccagatatatgttgatgacatcatatttggtggctcctctcatgcacttgttgcccagttttctgatgtgatgagcagggaatttgaaatgagcatgatgggagagctgactttcttccttggacttcaaatcaagcaaaccaaggaaggaatctttgtacatcagaccaagtactccaaagagctcctgaagaagttcgacatggccgactgcaagccaatcgccactcccatggcaactacttcatcgcttggtcctgatgaggacggtgaagaagttgaccagcgcgagtacagaagcatgatcggctccctcctctacctgactgcgtcaaggccggacatccacttctccgtgtgcctgtgcgcgaggtttcaggcttctccaagaacatcacatcgccaagcagtcaagcgcatgttccgctacatcaagtctacacttgagtacggtatttggtactcctgctcttctgccctttcagttcgagctttttcagatgctgattttgctgggtgtaagattgatcgcaaaagtacttctggcacttgtcattttcttggcacttctttggtctcttggtcctctcgtaagcagtcttctgttgctcaatcaacagctgaggctgagtacgtagctgctgctagtgcatgtagtcaagttctttggatgatttcaactctgaaagattatggtctgtctttctctggtgttcctctgctttgtgataatacaagtgcaatcaatattgcaaaaaatccagttcaacactccaggaccaagcacattgagatacggtaccactttctccgagacaatgttgagaaaggtaccattgtgctagaatttgttgaatctgaaaaacaattggcagacatttttacaaaaccacttgatcgctctcgttttgagttcttgcggagtgagttaggggtgatcggggtcgatcttggtcaacggcggatcgggactagactcagggaggagttgaggtccaaagcgatcaaggatgccggggaggccaagccaatccagccgttccacgtggcccaagatggtgaatggctcggctcggcaggcctgcatcgtccaagcagcgacggcccaagacggcggcccatggcgcatgggctcaggagatccggcttctctaatagccgcgattctatgtttgagttagctcgtaacaataaagaagttcacttaaacatcaatgggatttcagatctctttccaggtgaaagtcatattggaatatcagtagctgatgccactgattacaccaaaaccgtgcaaatcagtagggaaatttgtcagatgatgaagggctatatgatctacactgtctcatcaactgtccatcttttcggtgtccatgccattttacttttatggaacttcgacttaccaagtttcttgactctggtgattgctgcttttaattactgctgtggacagtgcaaaattgaacataaatcactgatggacaccgatgaggaaattagagctgctttgttccttcagatgagcattgtgaatcaggctgttgcactgtttgcttattcagatgattgctgccatatcagatgtcctggacctgttgtaacatttgcctttatttttacccagatggtggcaacccgtaaagctgtaggaggtgacttggattttgctattgcaaagggtgttggttggctcaaggctggattgatatggctgtacaactttgtcctgctctttgtccctgttgatttgtcagatatggaagcatgcaaagatgactggagaaaaattgttgacgaagcgttcagccatcctacatacaattctgctctgaattctggaggcgacagcagttataacaaggcggccacaaacttcagcatgcgtgcgtcatcatgtaaaagaatgcagctttaccctctgagttgtcattcaggcatgtatgacctagttggctgggaggctatccaactagatgcatcaactggtgtctgcctggctgcctga

SEQ ID NO: 14805 - DNA, 6774 bp, Oryza sativa
  Clone ID: TFbOSC401249j.C1.o19.fg
atggaggaaaaatactctgcgaaaccatttgttttcgatggacacaattttgtcatttggaaggcacgaatggaggcctacctccagtcgcaagggcataatgtgtggaataaggttaaatctccttatactgtgcccgatgatgctgacatcacgcctgcaaatatggctcaggttgattttaattatcgtgcaagaaatgcaatcattggtggaatttcttctggtgaatttaatcgtgttcaacaccacaagtccgctcatgacatgtggactgctctgtgcaatttccatgagggaaacaatgatattcaattggttcgtcagaatcaatttcataaagaatatcaaagatttgagatgcacccaggagagtccattgattcttatttcaaacgttttggagaaattatttcgaagttgagatctgttggaaaagaattttctgataatgataatgctcgccatcttttgaattgtcttgattatggtgtttgggaaatgaaagttacttccatcacagagagtgcacctctgagtgaccttaccatggacaagctttactcaaagctaaaaacccatgagatggatgttttccatcggaaaggcctcaaacactcgatggctttggtagctgatccctctggtagtacttcttctaatgactcagcctttgtgtatggtggcttctctcttgccgctttacactcagtcactgaggagcaattagagaagatccctgaagatgatcttgctctttttgctagaaaattctcaagagcttacaaaaatgtgagagatagaaaaagaggaaaaaccaatgaaccatttgtgtgttttgagtgtggagagcctaaccacaaaagagtgaattgtcccaagttgaagaagaagagtgacaagacgaccaagaagcccgagggacaagggcgaaaggggaagaaggatttgatgaagaaggcgatccacaaggtcttggcggctcttgaggaggtgcagcttagcgacatcgactccgacgacgatgatcaagaaaagggggacaaggacttctccgggatgtgctgtctcgccaacaacgaggacttcatcaacctgtgtctcatggcgcttgaggataaggatgactcatcggagcatcctgaggtatgtcttgatgatatcccttccttggatggttctctttgtgatgattcttgctcagataatgactctgttgatgatgaactaagcaaagaaagaatggcacacttgatgattgaaattagtgataagtataggtcttctaagtataaaattgagaaactaaaatctgaaaatgatggaatggcgctagaaattgctaggcttcgatccatgattcctgaggaggatacctgttctacttgtgcttcatatctttctgaaattaatctcctcaaggataagttgaaatcatgtgctttaggagctgggaatccttctagtgctagtgctgcttgctctacttgctatgaaatgaaagttgatatgggtttgcttgagatggaattgaaagaactaaaagaaaaatttgttcatgataggattggtaggtgtgaaaattgtcccattctcactagtgacaatgatgaattaagacaacaagttgccatgcttaggaccaagaatgatttgttagaatcttttgctactaaggaacctattcattcttcatgtgctaattgtgctatcctggaaactgaactaaaagatgctaaaactgtcattgattctatcaaatctattgattcttgttcttcatgcatttctctgaaagttgatcttgagtctgctaagaaagagaactcatacctacaacaatctttagagaggtttgctcaaggaaagaaaaagttgaacatgatcctagaccaatccaaagtgtccataaacaatcaaggtataggctatgattttgctgagtctttgaggataggtacccatgagattttaggtgtcacagatgggatgatagaactagctcaaaaacctataaccttcaagtctgcaggtttcattggaaacactagttctagtacacccaaaacctcagaaccaaagatggtacctatgactagcaagtctaagcctgtagagttacctagacccaaaaatccaaaacaagttgagcacaagcaaaaccagagacaaaccaagcctgtagagaaaaccaagtatgagtgcacctattgtgggaaagctggtcatttggattttggagtagggagaagtaattcttggcttgtggactccggttgctcacgccacatgaccggtgaagccaagtggtttacttctctcactcgtgcatccagtgatgagaccatcacttttggggatgcgagcagtggacgcgtgatggctaaaggaacaatcaaggtcaatgacaaattcatgctgaaagatgtggcactagtaagtaagcttaagtacaatttgctctctgtttcacaactctgtgatgaaaatctggaagttcgtttcaaaaaggacaggtctcgagttcttgatgcttctgaatctcctgtttttgacatttctcgagttggtcgagttttctttgctaacttcgactcttctgctcctggtccttctcgttgtctcattgcctcagagaatagggatttgtttttctggcatcgacgtcttggtcatattggctttgaccacttgtctcgcattagtggtatggatttgattcggggtttgcctaagttgaaagttccgaaagatcttgtgtgtgcaccatgtcgtcatgggaaaatgacatcttcttcccacaagcctgttacaatggttatgacagatggaccgggacaactgcttcacatggatacggttggtcctgctcgggtccagtcagttggggggaagtggtatgtcttggttgttgtggatgatttctctcgctactcttgggtctattttcttgaatcaaaggaggaaacatttggcttctttcagtctcttgctcgtagtttggctttggagtttcctggtgctcttcgagccattcgcagtgataatggctctgaattcaaaaattctgcatttgaatctttctgtgattcttctggagtcgaacaccagttttcttcgccatatgtcccacaacagaatggggtggttgagaggaagaaccgcacccttgtggagatggcacgaactatgcttgatgagtttacgactccaagaaaattctggactgaagctatttctgctgcttgttttatctccaatcgtgtgtttttgagaactatcttgcacaagacgccatatgagctcagatttggtcgtcgaccaaaagtttcacatctcagggtcttcggttgcaaatgctttgttcttaaatctggaaatttggacaagtttgaatctcgatcattggatggcattttccttggctatgctactcattctcgggcttatcgagtttatgttctttcaaccaacaaaattgtggagacttgtgaagtcacttttgatgaggctagcccaggagctagaccagaaatttcaggtgttccagatgaaagcatctttgtggatgaggattcagatgatgatgacgatgattctattcctccacctctagacagtacaccaccagtgcaagaaaccggttctccttcgactacatcaccttcaggagatgcaccaactacatcatcttcagcagctgaggagattgatggtggcacatcaggaccgacagctccccgacacatccagaaccgacatccgcctgactcgatgatcggaggcctgggtgaaagggtaactagaaatcggtcttatgaacttgtcaattcagcttttgttgcctcttttgagcccaaaaatgtttgtcatgctttatctgatgagaattgggttaatgccatgcatgaagagttagaaaattttgaaagaaacaaagtttggtctttggtagaacctcccttgggttttaatgtgattggaacaaaatgggttttcaaaaacaaactaggtgaagatggttcaattgttcgaaacaaagccagactggttgcacagggtttcacccaagttgagggcttggactttgaagaaacttttgcaccagttgctagattagaagctattcgaattcttttggcttttgctgcttcaaaaggtttcaagctttttcaaatggatgtgaaaagtgcttttctgaatggagttattgaggaagaggtctatgtcaaacaacctcctggttttgaaaatccaaaatttccaaatcatgtgttcaaacttgaaaaagctctttatggtttaaaacaagctcccagagcctggtatgaaagattgaaaacctttttgcttcaaaatggttttgaaatgggggctgttgataaaactctttttactcttcatagtggtattgattttcttcttgtccagatatatgttgatgacatcatatttggtggctcctctcatgcacttgttgcccagttttctgatgtgatgagcagggaatttgaaatgagcatgatgggagagctgactttcttccttggacttcaaatcaagcaaaccaaggaaggaatctttgtacatcagaccaagtactccaaagagctcctgaagaagttcgacatggccgactgcaagccaatcgccactcccatggcaactacttcatcgcttggtcctgatgaggacggtgaagaagttgaccagcgcgagtacagaagcatgatcggctccctcctctacctgactgcgtcaaggccggacatccacttctccgtgtgcctgtgcgcgaggtttcaggcttctccaagaacatcacatcgccaagcagtcaagcgcatgttccgctacatcaagtctacacttgagtacggtatttggtactcctgctcttctgccctttcagttcgagctttttcagatgctgattttgctgggtgtaagattgatcgcaaaagtacttctggcacttgtcattttcttggcacttctttggtctcttggtcctctcgtaagcagtcttctgttgctcaatcaacagctgaggctgagtacgtagctgctgctagtgcatgtagtcaagttctttggatgatttcaactctgaaagattatggtctgtctttctctggtgttcctctgctttgtgataatacaagtgcaatcaatattgcaaaaaatccagttcaacactccaggaccaagcacattgagatacggtaccactttctccgagacaatgttgagaaaggtaccattgtgctagaatttgttgaatctgaaaaacaattggcagacatttttacaaaaccacttgatcgctctcgttttgagttcttgcggagtgagttaggggtgatcggggtcgatcttggtcaacggcggatcgggactagactcagggaggagttgaggtccaaagcgatcaaggatgccggggaggccaagccaatccagccgttccacgtggcccaagatggtgaatggctcggctcggcaggcctgcatcgtccaagcagcgacggcccaagacggcggcccatggcgcatgggctcaggaggtgcaggcagcttgcatgcgcaaggacgcgcgcggaaaaaccgtacgcggcaacccccgtttcgcgtgactcgatcggaggcgggtgcaggagcgcgggacccacacgcgattttgcaagcgcgcgcgggagcggctcagcgggacgcgtggcggcttcgggctggttgggcgctggcgagcgcgcgctgaggaaaaggagacggaacgcgcacgacgcggctgggcaacgtggcaagtttggattcgtcaagacggagagcacgcggattcatcagcaagaagaccatgctttgccggtgcacttcatgacagttcttcaattgcctaagtgggcggtgaaagacatagagcgtaagtgtcgcggtttcctttggaaaggccaagaaaaagtcaatggtggtcactgtctggtctcctggcgcaagctctgtatgcccattgagaaaggcggcctcggggtgatggacctagatctgttcgggcaagcgttgaggttgaaatggcatgccaagagccttgagcagaaaggaaggccgtggactctggtgggttcgttgtctgctgcggccctatgcgagttctttcagctctgggacgaggtcagaaacaccacgctgcagaatggtgatgactctatccgatggaaggtctctcccgacgggcaattctcagcatcggcaacttacaacttctttttcacgaccaaagaggactgtcctgtgggcgacctcttgtggcactcaagagcaccttccagggttcgattcttcatgtggctagctctcaaaggaaaatgcttaacggccgacaatcttgctaaaagaaattggccccacgaggatcactgcgttctttgccaaagagaagaggaagattgccagcacctgtttgctgactgcagctttacctctgcggtctggggattgatcaggagcagagtgaatttcaacttcccgattcccaccgaggaaaactgcccactaatgtgctggtggcttcagccgagagcccgttgccggcagctagccaacagaacggtttacacttcagctgcacaaattacagttattcgaagaggatctatcacctatggcatctgtcaacagagttacctgggcgtcgtcatgctggatgctacccgtgcagatcagacaaacaacaagaacaggctacaagatacgcaacatgtccatacatatgagtaa

SEQ ID NO: 14806 - DNA, 4914 bp, Oryza sativa
  Clone ID: TFbOSC412801j.C1.o4.fg
atggctcaggttgattttaattatcgtgcaagaaatgcaatcattggtggaatttcttctggtgaatttaatcgtgttcaacaccacaagtccgctcatgacatgtggactgctctgtgcaatttccatgagggaaacaatgatattcaattggttcgtcagaatcaatttcataaagaatatcaaagatttgagatgcactcaggagagtccattgattcttatttcaaacgttttggagaaattatttcgaagttgagatctgttggaaaagaattttctgataatgataatgctcgccatcttttgaattgtcttgattatggtgtttgggaaatgaaagttacttccatcacagagagtgcacctctgagtgaccttaccatggacaagctttactcaaagctaaaaacccatgagatggatgttttccatcggaaaggcctcaaacactcgatggctttggtagctgatccctctggtagtacttcttctaatgactcagcttttgtgtatggtggcttctctcttgccgctttacactcagtcactgaggagcaattagagaagatccctgaagatgatcttgctctttttgctagaaaattctcaagagcttacaaaaatgtgagagataaaaaaagaggaaaaaccaatgaaccatttgtgtgttttgagtgtggagagcctaaccacaaaagagtgaattgtcccaagttgaagaagaagagtgacaagacgaccaagaagcccgagggacaagggcgaaaggggaagaaggatttgatgaagaaggcgatccacaaggtcttggcggctcttgaggaggtgcagcttagcgacatcgactccgacgacgatgatcaagaaaagggggacaaggacttctccgggatgtgctgtctcgccaacaacgaggacttcatcaacctgtgtctcatggcgcttgaggataaggatgactcatcggagcatcctgaggtatgtcttgatgatatcccttccttggatggttctctttgtgatgattcttgctcagataatgactctgttgatgatgaactaagcaaagaaagaatggcacacttgatgattgaaattagtgataagtataggtcttctaagtataaaattgagaaactaaaatctgaaaatgatggaatggcgctagaaattgctaggcttcgatccatgattcctgaggaggatacctgttctacttgtgcttcatatctttctgaaattaatctcctcaaggataagttgaaatcatgtgctttaggagctaggaatccttctagtgctagtgctgcttgctctacttgctatgaaatgaaagttgatatgggtttgcttgagatggaattgaaagaactaaaagaaaaatttgttcatgataggattgagaggtttgctcaaggaaagaaaaagttgaacatgatcctagaccaatccaaagtgtccataaacaatcaaggtataggctatgattttgctgagtctttgaggataggtacccatgagattttaggtgtcacagatgggatgatagaactagctcaaaaacctataaccttcaagtctgcaggtttcattggaaacactagttctagtacacccaaaacctcagaaccaaagatggtttctgctttagaaaggctagaaaagagcgacaagaacgtcttaggactagaagagctactagagtccctgagaggttcgagtgattttggagtagggagaagtaattcttggcttgtggactccggttgctcacgccacatgaccggtgaagccaagtggtttacttctctcactcgtgcatccggtgatgagaccatcacttttggggatgcgagcagtggacgcatgatggctaaaggaacaatcaaggtcaatgacaaattcatgctgaaagatgtggcactagtaagtaagcttaagtacaatttgctctctgtttcacaactctgtgatgaaaatctggaagttcgtttcaaaaaggacaggtctcgagttcttgatgcttctgaatctcctgtttttgacatttctcgagttggtcgagttttctttgctaacttcgactcttctgctcctggtccttctcgttgtctcattgccacagagaatagggatttgtttttctggcatcgacgtcttggtcatattggctttgaccacttgtctcgcattagtggtatggatttgattcggggtttgcctaagttgaaagttccgaaagatcttgtgtgtgcaccatgtcgtcatgggaaaatgacatcttcctcccacaagcctgttacaatggttatgacagatggaccgggacaactgcttcacatggatacggttggtcctgctcgggtccagtcagttggggggaagtggtatgtcttggttgttgtggatgatttctctcgctactcttgggtctattttcttgaatcaaaggaggaaacatttggcttctttcagtctcttgctcgtagtttggctttggagtttcctggtgctcttcgagccattcgcagtgataatggctctgaattcaaaaattctgcatttgaatctttctgtgattcttctggagttgaacaccagttttcttcgccatatgtcccacaacagaatggggtggttgagaggaagaaccgcacccttgtggagatggcacgaactatgcttgatgagtttacgactccaagaaaattctggactgaagctatttctgctgcttgttttatctccaatcgtgtgtttttgagaactatcttgcacaagacgccatatgagctcagatttggtcgtcgaccaaaagtttcacatctcagggtcttcggttgcaaatgctttgttcttaaatctggaaatttggacaagtttgaatctcgatcattggatggcattttccttggctatgctactcattctcgggcttatcgagtttatgttctttcaactaacaaaattgtggagacttgtgaagtcacttttgatgaggctagcccaggagctagaccagaaatttcaggtgttccagatgaaagcatctttgtggatgtggattcagatgatgatgatgatgattctattcctccacctctagacagtacaccaccagtgcaagaaaccggttctccttcgactacatcaccttcaggagatgcaccaactacatcatcttcagcagctgaggagattgatggtggcacattaggaccgacagctccccgacacatccagaaccgacatccgcctgactcgatgatcggaggcctgggtgaaagggtaactagaaatcggtcttatgaacttgtcaattcagcttttgttgcctcttttgagcccaaaaatgtttgtcatgctttatctgatgagaattgggttaatgccatgcatgaagagttagaaaattttgaaagaaacaaagtttggtctttggtagaacctcccttgggttttaatgtgattggaacaaaatgggttttcaaaaacaaactaggtgaagatggttcaattgttcgaaacaaagccagactggttgcacagggtttcacccaagttgagggcttggactttgaagaaacttttgcaccagttgctagattagaagctattcgaattcttttggcttttgctgcttcaaaaggtttcaagctttttcaaatggatgtgaaaagtgcttttctgaatggagttattgaggaagaggtctatgtcaaacaacctcctggttttgaaaatccaaaattttcaaatcatgtgttcaaacttgaaaaagctctttatggtttaaaacaagctcccagagcctggtatgaaagattgaaaacctttttgcttcaaaatggttttgaaatgggggctgttgataaaactctttttactcttcatagtggtattgattttcttcttgtccagatatatgttgatgacatcatatttggtggctcctctcatgcacttgttgcccagttttctgatgtgatgagcagggaatttgaaatgagcatgatgggagagctgactttcttccttggacttcaaatcaagcaaaccaaggaaggaatctttgtacatcagaccaagtactccaaagagctcctgaagaagttcgacatggccgactgcaagccaatcgctactcccatggcaactacttcatcgcttggtcctgatgaggacgatgaagaagttgaccagcgcgagtacagaagcatgatcggctccctcctctacttgactgcgtcaaggccggacatccacttctccgtgtgcctgtgcgcgaggtttcaggcttctccaagaacatcacatcgccaagcagtcaagcgcatcttccgctacatcaagtctacacttgagtacggtatttggtactcctgctcttctgccctttcagttcgagctttttcagatgctgattttgctgggtgtaagattgatcgcaaaagtacttctagcacttgtcattttcttggcacttctttggtctcttggtcctctcgtaagcagtcttctgttgctcaatcaacagctgaggctgagtacgtagctgctgctagtgcttgtagtcaagttctttggatgatttcaactctgaaagattatggtctgtctttctctggtgttcctctgctttgtgataatacaagtgcaatcaatattgcaaaaaatccagttcaacactccaggaccaagcacattgagatacggtaccactttctccgagacaatgttgagaaaggtaccattgtgctagaatttgttgaatctgaaaaacaattggcagacatttttacaaaaccacttgatcgctctcgttttgagttcttgcggactttcatttgcttaagtagcttgtgtgatcatgttatgctgttcaagcgtgttgaaacctgcttaaattaa

SEQ ID NO: 14807 - DNA, 1815 bp, Oryza sativa
  Clone ID: TFbOSC7033j.C1.o1.fg
atggctttggtagctgatccctctggtagtacttcttctaatgactcagcctttgtgtatggtggcttctctcttgccgctttacactcggtcactgaggagcaattagagaagatccctgaagatgatcttgctctttttgctagaaaattctcaagagcttacaaaaatgtgagagatagaaaaagaggaaaaaccaatgaaccatttgtgtgttttgagtgtggagagcctaaccacaaaagagtgaattgtcccaagttgaagaagaagagtgacaagacgatcaagaagcccgagggacaagggcgaaaggggaagaaggatttgatgaagaaggcgatccacaaggtcttggcggctcttgaggaggtgcagcttagcgacatcgactccgacgacgatgatcaagaaaagggggacaaggacttctccgggatgtgctgtctcgccaacaacgaggacttcatcaacctgtgtctcatggcgcttgaggataaggatgactcatcggagcatcctgaggtatgtcttgatgatatcccttccttggatggttctctttgtgatgattcttgctcagataatgactctgttgatgatgaactaagcaaagaaagaatggcacacttgatgattgaaattagtgataagtataggtcttctaagtataaaattgagaaactaaaatctgaaaatgatggaatggcgctagaaattgctaggcttcgatccatgattcctgaggaggatacctgttctacttgtgcttcatatctttctgaaattaatctcctcaaggataagttgaaatcatgtgctttaggagctgggaatccttctagtgctagtgctgcttgctctacttgctatgaaatgaaagttgatatgggtttgcttgagatggaattgaaagaactaaaagaaaaatttgttcatgataggattggtaggtgtgaaaattgtcccattctcactagtgacaatgatgaattaagacaacaagttgccatgcttaggaccaagaatgatttgttagaatcttttgctactaaggaacctattcattcttcatgtgctaattgtgctatcctggaaactgaactaaaagatgctaaaactgtcattgattctatcaaatctattgattcttgttcttcatgcatttctctgaaagttgatcttgagtctgctaagaaagagaactcatacctacaacaatctttagagaggtttgctcaaggaaagaaaaagttgaacatgatcctagaccaatccaaagtgtccataaacaatcaaggtataggctatgattttgctgagtctttgaggataggtacccatgagattttaggtgtcacagatgggatgatagaactagctcaaaaacctataaccttcaagtctgcaggtttcattggaaacactagttctagtacacccaaaacctcagaaccaaagatggtacctatgactagcaagtctaagcctgtagagttacctagacccaaaaatccaaaacaagttgagcacaagcaaaaccagagacaaaccaagcctgtagagaaaaccaagtatgagtgcacctattgtgggaaagctggtcatttggattttggagtagggagaagtaattcttggcttgtggactccggttgctcacgccacatgaccggtgaagccaagtggtttacttctctcactcgtgcatccagtgatgagaccatcacttttggggatgcgagcagtggacgcgtgatggctaaaggaacaatcaaggtcaatgacaaattcatgctgaaagatgtggcacta

SEQ ID NO: 14808 - DNA, 704 bp, Oryza sativa
  Clone ID: TFbOSC19190j.C1.o1.np
aggtttaacaaaattttgagtgatcttagatctgttgattcttcttatgatgttaattatacacaatctgagatttctcgccactttttgaatggttttgacatgtctatttgggagatgaaagttacatctattcaggaatccgttgatatgtctactttgactttggattcgctttacacaaaactgaaaacacatgagatgagcattctttctcgtaaagttgattttaagtcgagtgctttggtttcttcctcaacttctttggatgttgattcttcttcatcgaagtttccgcaattgctttgtgtaatgccatgtccgatgatcaactctaacaattcgaggaggaggacctggttttgttatctaacagactttctcaagctgtgactaatgttaggtacaggaaaagaggtggtccaaatctttgctttgaatgtggtggtacggatcactttcgttcgcgttgtcctaagcttgggagagcaaggagggaagataatggtgatgagaagaccaatgataacaagccgaagggtacagtcaaagggaggaagatcaaggagactctcaagaaggcttttgatcaagtctacgccgtgtttgagccactaagcgatcgtagatggtgagagtggagatgaagataagggaaagaacatctccggtgtttgcttcatggcgcgtggggctgcaggaat

SEQ ID NO: 14809 - DNA, 465 bp, Oryza sativa
  Clone ID: TFbOSC23526j.C1.o1.fg
atggccgtgactagaccaccgctaggccgccgcctaccgcgcgattccggcgggcccggttgcgccgtgcccgtggaggccgggcgcaaggaggaggaggagcagaagcagcgcggaaggaggcacccgaggctgaaccggccgccatcgaggagtagggcataccaagatattttgatcctgggagataccttgctgaggagggaggatcatgtagttgtgagctatccaatgaaaaggcggaagaagccttgctttgtttgtgggttgtttggacacaattcaaagcagtgcatgcaggttgactgttttggtgtgttttatgaagcaaggtcgaatacaagaatcaataggatgaaaattatcaatgcagtatccaaatctgttcctcaacctcacaaggttgaccttaacagtccaaacaggattattattgtgcagattgagaagtgtaatggtccataa

SEQ ID NO: 14810 - DNA, 4989 bp, Oryza sativa
  Clone ID: TFbOSC400151j.C1.o49.fg
atggcatcccatgaagatccgcgcgatcgtcatcgtgatgaaggtggtgcaacaaccgatgaggaaccgattgaagatctgggcggggcttcggaggaggaagacgatgaagatgcaattgtggtagactttgatgaggctaaaaagcatattgatacacagtatgtggccattgggaagttcttctcaaggaggactttcagcgcaaagggactgtttgaagccatgcaaaaggcatggggcttgagacaaggcatggagtacaaacgcctgcatgataaccgatttctactggaattccaatctgcaggggatttcaggtttgcgactggaggcggtccttggatctatcaaggggatgctttcctgatcacggagtatgatggcaagtctagaccttcggatgtgaaactgaactcgctaccagtttgggtgagaatttacgatctacccctgtctatgatgactgaaacaatgggtaaattgattggtgcaaggctgggtgaggttcgtaaggtggcggtggatgatcagggaagagcatgggatgattttatgagagttcgggcggagcaccctgtggataaaccactgacgtgttggctgaaactgaaagacaaggagtcatcttcggtggttcagaggtatgatgtcaagtatgagaggatccctcggttttgcttttactgtggccacattggtcacatggagagggaatgtgatttaccctcggataagcaaacggtgaggtttggccttaatctcagggcgtcaccttataagcagtttgaacatcgtagctgggctctgcctggtaaagttgacaacaacgcgaagagaaatctatggttcccaggtgagaaccagtccaagccagctcctgcgggaagccaaaataaagatggcccatcaggcaaggaagataggaagaagaactcgccagaggaaaatgctccagtaaaggaaaattttgctaaccgggatgagatagaggcagagatccctacggtgcaggaagagttgaagggtttaaatgctaggaacccaggaaaatccagggaggatggtgaggtcaggaagctagctgaacagtgggagcatatggggaaaactcaagaagatcagcctaccttccacgcagcttcacagcaagctaaggagggacaaataaggagtgagactgcaggggagacttgggtgtctagcaaagattcaatcaatcagtacgaacagcttgatgaaggtgctgggaatggccgtgaggaggtggacgaacatgttccacccctatcaacgatccatgaagatatctctcttataaaccagcttagagatgaggaacttggtgagggacataaggaaaatatcgatgatggggtaaaacctgtgctaggaaagaggagtatggataaatctctccttggcccaggatatgatggaccttcgtttgatgttctagttggaggtgataagattggggctgcggaattgtgtagcagtgcctggagaaggaacggggaggggggggatggactagccctcttttgggatgacacagtacaagtggatcttctatcctacaacttcagatatattgatgtgctcattaaggacgaaagctgccctgtgcaatggcgatgcacctttgtgtatggtgagcccaaagctagcgaaaggcataacatgtggactcttcttcgtcgcatcaaatcaaattctactgctccatggtgcttagtgggcgactttaatgaagctatgtggcagtttgagcatttttctgaccacaagagaagggagaagcagattatggatttccgggaagtcttgtcgcactgcgatgtgtttgatttaggtttcacgggtgccccctggacttttgataacaagcaaaaaggaaggaataatgtgcgagttcgactggatcgtgcagtagcaagccagagttggtcttctctctttcctgctgcagaagtgattcaccttactgtgtccagttctgatcacagtcctattcttctccaagcctcccgagtggatcgcatcaagaaaggggatcggtgtctgcgacttggagccgtgataaatttggttaagttagcaaagatattaaagaaacaaggaatcgattggcagagcttcagatggcaggcaggtgtgctagtgatcaagactatctcgatatatccaggaagctggatactcttgtatagggaggaaatgcaatggctgcagagatcaagaatctcttggttgaaggaaggtgaccgaaacacatccttttttcataggaaagcggcttggcgccacaagaaaaacaagattaataggctgcagagaagtgatggaacctggtgtgataagagggaggagatggaagatatgacatcaaatttcttcaaagagctttacactaatgacccttctgtcgagccagaaccattacttgatttggtacagcccagagtcacgtcggagatgaataagctgctttgtaaagaattctctgatgacgaaatttcaaatgctttgttccagatgggtccgttaaaagcgccggggccagatggttttccggcaaggttctttcagaagaattgggatgtattgaaacgggacattattgcggctgttaagctgttctttgaacagagaagaatgccacaaggtgtaaatgacactgccattgtgttaattccgaaaaagaaagagccaaaggatttgaaagattacagaccaataagcctttgtaatgtgatttacaaggtgattgctaagtgtttggtgaataggatgcggccgttacttcaggatgttatcgtgccagcgcaaagcgccttcattcccggccagatgttcactgacaatgctctcatagcttttgagtgcttccatgccatcaatcggtgtaaatcggttgagtctcaattctgtgcttacaagttggaccttacaaaggcgtatgatagggtggattggagatacctagagggagctcttcttaaggttggtttttgttctcaatgggttcagctattgatgacatgtgttacctctgttagctatgctgttcgcttcaacggatctatgcttgaatccttcaaaccgaccagaggcctccgacagggtgatcccctgtcgccctatttgttcctctttgtggcagacggtttatcaacggcgctgagtgaagctgaaagatcaggacggttacaacctctaaaagtctgcaggagagcccctggaatttcccatctcttgtttgcagatgatagcctgttgttctttaaatcaaatatggaacagactaatgtggttaagagtgctcttactttgtatgagcaaagcacaggccaactcctgagcccggccaaatgttctttgatgtttggaaagcattgtggggatgctctgcagtctgacatcagatcccttttgcaagttcaacacacttcctttgaagataaatatcttggtctgcctacaccgatgggtagactgaaggcaggaagacaccaatctttgaaggagagatttgagaaaagattaacggattggaatgagaaatacctctctatgggagggaaggaagttttaattaaatcagtcctacaggccattccgacctatgtgatgagtgtgtttaagcttccagcagggctctgtgaggaatatatgcagctgatccggaaattttgggacttaaagctttttaaccaggctctgctagcttggcaagcatggcggctgatccagtttcccaacagtttgtgtgctcaaattttaaaggcaaaatattaccccaatggggacttgtgtgatactactttccttgtggactcttcagaaacttggaagggggtggtccacgggttagagctgctgaaacaaggtctaatttggtggattggatcaggaagcaaagttagaatctggagggataactggataccgagagagcataccctaagggttttgggaaagactgttagattgagaatcaaatgggtctcggatcttatggttccacatcagcaaatttggaatgaagagctagttcgtcgaatcttctatcccccggatgctgaggaaattttgaggatccaattgccacatagccctgaagaggacttcattgcttggcactatgataaggtgggtatgttcactgttttttctgcttacaaattagccctacaggcccagatcagagctgacgaagaggttgcacaatgctcaaatggcgatggtgataggaagttgtggaagaacatttggaatgtgcaagtgccgcagaaaataaggatttttgcctggagagtatcaagagattgtctagccacacaacataataaacatcgacgacagattgtacaaaagccaaactgtgagatatgtggggcagaagtggaagatgcgtttcatgctacggttgcatgcacgaaagcagctgcgctgagggcagagatgcggcagaatcggtggctaccgggggaacaggagttctctcagttaggacctgactggctgctacatcttataaaccgtgccgacgatcagacgagggcgttaatattcctgctgttatggaattcgaggggcgaagttctgttgtcttcttggaagtttctcaggcgatgtgtgtcagcggaggaagcagagctgcttgcgtgctatgaagggctgaagctagctgctgaatggattcccatgccagttatgcttgaatatgactgtgccacagcgattgcgaggttgttgtccactactgaagagagatcaagatggtcttttctgctgcgagcagcaagatcagttatagggttaattaaggaagtgcgtttgatgcactgtaatagagagtgtaatagggtcgcacatgaacttgctcagattgctatccgttcggggcaaagcgcggtttggcgtaataatgcaccgaattgtgttatgcaatgtctgcagcatgactgtaatcctgttacgtaa

SEQ ID NO: 14811 - DNA, 3960 bp, Oryza sativa
  Clone ID: TFbOSC403264j.C1.o7.fg
atgagtgcatctccttcggtggcggcttcttcttcctcaggacaagagcaaggaagtctgaaggtctatggacggcgccatgactcccaccgacgtcggctaaccctagcaccaattccttcgccgaatctgattgcaaccatggctgccacaacttctgctcctgattctcccgctcaagttcatcacaacggctcaacggctctcgccggcatggaggttataggactgaaaacgcatgactctcaatcaggagagtccgatctctccctaatccaagggttctgggacgagattggttttcccactcctgcttctcgttggtgggaacaaaaaagcccgatagtgtcaggggtgactccgactgccccacctatcaccgaggacgatcagtggaccagagtctcatcaaaacagaagacaaaatccactgagtgccatcgccgtggatgggtaatgcgtccatggaagcggccaccggttttcccgaggttcgggggcaaccatgccggtgggtctgggactgggggatcgggagggcgttggcatggaggcgccgggcagtctcaatgcaatagcaacagatggtttcctcagggaaacaatgctgggggtcatcacaggcgagaccatgatgatctcccgtgtccggaccagcaagatcagaagcccaaacctcgggggaaggggatggcggcgcaaggccagcaaacggagaaactggaccaaacaacagatggtgggcagccacatcctactgtacaagcaactaaggccaagaagccgaggccacctcactgtcaccagtgcaaaacgagtggtcacatagcgcaggtatgtaaagcggacatcgattgctatgtatgtaacaagaaagagtcacatctagctgtcaagtgcccgctgctcaaattgccgaaacctacatgctctctttttggatttgggaaaaccgagttcggttttatccaaatcagtgattttgggatgaatgtacaggaggcttcattggttccaacagctttggtctctattcgtggcggctccttgacgcctgaaatagttcagactgagttagctcatcgaatcagaccggattggaagtgggaggcagtccttcatgctgagaattccttccttgtcgcttttccttccattgaggaattgaagaggatggatgatgtggaattccgtctaaaaaatcatggtgtgtcaatgacaataatcgagtggaaaacgactgatgagctgattccggcatatgagttggatgaagtgtgggtgcatgtgtcgggtgtgcctagcccatggcatcattacttggctttttgggcacttggttgtgttattggagctactcaggaagtagatatgctcacctacaggcggacgggagtgattcgtgtgaaggaggatcatgaaaactcgtcaaaggatggctctcatgatcaggcacacaagagggctaagaattcagcttctccaacaatatcaaaggaacaaaaatcagatgttacagccatgcaactagttctaacaccgtttggaaattgtcggcctccaccaccacctcgtctggtgatcgcaaatgggatagcttacaccattgttcacaccaaatcaggtgcaacagtggtgggtgaggtaataacagcagcagaaaaggtggatgaaatttatttgtctcaaccagtggacagtcctacacccgatcaaccttgtttgctgccaccggagttggaacgttggtccttgctgtcctctcagccggctgcagctgccaagatcaccggcgaggcctctttggcagctaccactgctgcactctccctagctgtacctcagatggctacacctacctcaaccgatgtcaatcgcagcaaggaccaactgagcaagacatcttctacacctcgttgtcgtagtgtgagatccaatgttgagaacatggatggcatcgctgcgggggatgatgactcactgctcaaggcaatgaagaggaaagcattgcgcaatttggatgacagctttgttggacgggagaaaaatccaaatcttcttcaaaaagaaaagagcgaaaggctcgttcccaaaatccaaaagcctctaaatctgtttcctcatgaaagaggggtatcagaccacacgcctttgctccttgacacaggggaagcggccttcacgggaaacattaaacagtttaaattggaactgggttggtttctacgtgatgacttctatgatcgtgttctcgagatatggaacaaactagtcaagggtcgtaatgcggtccaaagatggaataacaagatgagcgctttacgtcgccatcttagaggttgggctgctcataccagtggcgtctttaagcagaaaaaggcaaatttgcaaaacacaattgattctctagacatcgcagtagaggtacgactcctttcggatcaagaaagaattcttcttgatcaatcgagggattctttggcaagtctactccgtgaggaggagattaaatggaagaagaggatctttttcctagaccaggatgaagggaaaattgagggggttgaggccttgaaaacttatattacgagtttttataggaaactttttggaccaccagaggagaactcgttttcgcttgatgagtccataattggtgatatggctcaagtttcacaagctgaaaatgattttcttactgctcctttttcggaagaagaagtgaaagaagccatctttgcgatggagcataataaagctcctggactagatggtttcccagctgaattttaccaaaaattttgggatgttattaagcatgacctgatgaacctttttaatgaattccatactggtagcctcccaattttcggactaaattttggggtacttactctagttccaaaagttaaagaagcaaatcaaatccaacaatacagacccatatgcttgttaaatgtcagctataaaatattcactaaggtggctacaaaccgaattagctcggttgctaaccatttagtgaacccgacccaaacagttttcatgcgtggacgaaacattttagatggagttgtcatcatacatgaaacagttcatgaactacataggaagaagttgagtggggtgatattcaaaattgacttcgaaaagacgtatgacaaggttaaatggccttttctgctacaaactctgcgtatgaaagataaaaagggccttcggcaaggagaccctctctccccaatcctattcaactttatcgctgatatgctagccacattgataaacagagccaaaacacaagggcaaattgatggagtcataccacatttgattgatgggggactctccattctacaatatgctgatgacacagtgctgtttgtgaatcatgaccttgaaaaagctcagaacatgaagtcagtgcttctagctttcgagcagttgtcgggtcttaagatcaattttcataaaagtgaactgtattgttttggtgaagcacttgattatagtgatcaatacaaccagctctttggctgccaggtcggcaacttcccattccgttatctgggcattctgatccattataggaagttgagaaatgcggaatggaaagaagtggtcgagagatttgagaagaaattgagtagctggaaaggaaaacttctttcgttgggaggacgacttactttgattaactcggggatggacataagaagaaataccggcttgctaagtgggacattatttgtcgtcccaaagaacaatggggggctaggaattcatgacctcgagataaagaataaagtgttgattagttatcaccttagttacccggtggctacgtacctgggctatcctccaccaaccgggattgcgggatactattatggtggtatctcgacgtttggaccaggtggcacaggagttttttacccaggagcatgggtggcgatctag

SEQ ID NO: 14812 - DNA, 3669 bp, Oryza sativa
  Clone ID: TFbOSC419806j.C1.o3.fg
atggcgaggacgacggccggcggagtggaacagggcatcggctacggcgtagcggagctggcggccgaagcaggtgggcgagcgcgcggtggccggcggggtggagttgggcgcgtcggcgacggcgggcgatcgcacggcggctggcggggcggggcggagtggagcggcgtcgggagaacgggggatgaggccggcgggagaggggggatagatgtcggacatctatatgcagagattattggtttacttgacaagatcatggcagctcctgcagcatccaattttaacttgcggtctattattgagaaagagaagttgactggaacaaacttcatggattgggagcatgaaaagcgatgcaatgattatcttgatataagctgtctcatgcttgctactatgtcccctaagcttcaaaggcaatatgaggcattggatgctcatacgataatcacgggactacgtaacatgtctgaagaccaagcaagagctgagaggtctaatacctcaaagtccttgtttgcgtgcaggcttgcagaaggtaatccagtgagcccacatgtgatcaaaatgattggttacaccgagagtctggataagcttggctttccccttaaccgagagttggttactgatttgattctccagtcgcttcctcccagctttgagccgttcataatgaatttcaatatgaacaacctgaacaggaccttggcagaattgcatgggatgctaaagactgccgaggaaagcattaagaaaaactccaaccatgtgatggttatgcataagcgcaagcccaacaacaagaagagtggtcaaaagagaaagctaaactctgatgagatcacgagtactagcaactctaagaccaaggttcaaaagacagggcccgctaaggatgcagagtgcttcttttgcaaggagacaggtcattggaagagaaactataagaaatacctagagcagctcaagcagaagcagcaggatggaaagagttccacctcaggtattaatgttatagaaattaatcttgctacttcctctactgattcttgggtatttgatactgagtcagttgctcacatatgcaaatcgttgcaggggctgaaaagaagtaggagcttagcaagaggcgaagtggacattcgtgtgggcaatggagcaagagttgctgctgttgcggtcggcactatgccattatctttaccatcaggaatagttttggagttaaataattgttattgcattcgagctttgtgtaagaacgttatctctgcttcttgtttgcaagcagagggttatggttttagatctgtggacaatggttgttcagtctattataatgacattttctatttccatgtacccatgatgaatggcttatatattgtgaatcttgatggatgttcagtctataacattaatgcaaaaaggcaatgtcctaattatttgaatcccacttttatttggcattgtcgcttgggtcatataaatgagaaacgcatggagaagcttcatagagatggacttctacactcttttgattttgaatcatttaagacatacgaatcttgtttacttggcaaaatgacaaagggacctttcacgggtcaaagtgaaagggcaagtgaactattgggactagtacatactgatgtatgtggaccaatgagctcaactgccagaggtggttttgggtactttattacctttaccgatgactttagtaaatatggttatgtctacttaatgaggcataagtctgaatcctttgaaaagttcaaggaatttcagaatgaggtacaaaatcatttgggcaagacaatcaagtatctacgatctgatcgtggtggagagtacttgagcctagaatttggcaatcatcgaaaggaatgtggaattgttccacaactcactccgccaggaacgcctcagtggaatgcggtgtctgaacggaggaatcgtacattgttggacatggtgcgatcaatgatgagccaaactaatctaccgctaagcttttcgggttacgctctagagacaactgcgttcacactaaactgggttccatcaaaatcagtggataagacaccatatgagatatggactgggaatcgtcctagtttgtctttcctaaagatttggggctatgagataaatgcttctttgtgggggtatcctaaggaaacgaaaggatattatttttataatcgggaagagggcaaagtgtttgtcgcccgacacggtgttttcttggaaaaagagtttatttcaagaaaggatagtgggagcatggtgcgacttgaagaaattcagaaaacaccggaaaatgcttcaacgtccatacaaccacaacaagctgagcaagatgttgttcaacaggttgaacaagttgttgttgaaccagttgtggaagcaccggcttcacgaaggcccgaaagaattcggcgtacacctgcgaggtatacgttgttaactataggacaacgtgatatattgttgttagacaacgatgaacctactacctatgaggaagcaatgaaaaagacagatgtagatggaaatgttcacatctacaaggcacgattggtggcgaaaggtttcagacaaattcaaggtgttgattatgatgaaactttcttgccagtcgccatgctaaaatctattcggattgttttagcgattgctgcctatttcgattatgagatatggcaaatggatgtcaaaacagctttcctcaatggaaatctcgatgaggatgtgtacatgacacaacccaagggttttgttgatccacaatcagctaaaaagatatgcaaattgcagaaatccatttatgggttgaagcaagcatctcggagttggaatattcgttttgacgaagtagttaaggcgttgggctttgtcaaaaatgaagaagtgccttgtgtatacaagaagattagtgggagcgcactggtgtttctaatcctatatgtagatgacatattattgattgggaacgatattcctatgcttgaatccgttaacatatcgttgaaaaatagtttttcaatgaaggacttaggggaagcagcatatattctgggcataaggatctatagagatggatcaaagaggctaattggattaagcgagagtacatacattgacaaggtgttgaagatgttcaacatgcaagattctaagaaaggtttcttaccgatgtcacatggcattaatcttaacaagaatcagtgtcttcaaacgactaatgagcaaaacaagatgagtgtgattccatatgcctcggcaatcggatccatcatgtatgctatgctatgtacacgtccagatgtttcatatgtacttagtgcaacaagccgataccaatcagatccaagtgagagtcactggatagctgtaaagaatatcctgaagtacttgagaagaactaaggatatgtttctagtctatggaggacaggaagagctcgttgtaaatggttacaccgacgcaagcttccaaaccgacaaagatgattttagatcgcagtctggatttgtgttctgcctgaatggaagcgctgtgagttggaagagttccaagcaagatacagcggctaattctacaacagaagccgaatacattgccgcttctaaagcagcaaaggaagctgtttag

SEQ ID NO: 14813 - DNA, 2550 bp, Oryza sativa
  Clone ID: TFbOSC900099j.C1.o2.fg
atggccagctcttcctctgccgtctccaatccactcttcggcttccaaatctctgagaaactaggggaacagaaccatgcgctttggagtgcgcagatcgagcgcaagaagggcgagaagggcgacaaggtgatggtggtcacaaatccagcgtaccaggagtggtttgccacggaccagcaggtcctcggcttcctcttctcatctctgtcgtgtgacgtcctcacccaggtcgccacatccaagacggcgcgtgatgcatggcgcgccatagagagcatgttcatgtctcagacacgagcacgctctctcaacatcaagctttctctctgcacaacacagaaagatgatgaatatgaacctgctatctctggactggtgacaagagtagaacctgttaccgtcgcagaattgtactctattttgttgaactatgagaacaggggcagcaacaatcagcagcgcgtcgacaacagacccgtgtgccaagtttgctacaaaatgggtcacgttgcctctgaatgctggcattgtttcgatgactcctacgtgcctgatgaaaggcatgttgctgctgctacccatgctgcctatggagtggataccaactggtatcttgacacgggcgcaacagatcacatcaccggcgaactagacaagctggcggttcgagagagatacaaggggaacaatcaaattcatgcggcaaatggcgcagtttttgataagttccatgaatttcagaatttggttgagagactctttgatcgcaaaattatagctgttcaaactgactggggtgattggtatatcccatcacatttcttgtccctatgcctaatgaatctaatgaagaaaacgcaggagaaattgatgcctcagggggagacgtacgcactggagattgagccgccaacatcctctgcgccgactcgtcctcacactcggctgagcagtggtatctggaaagaaaagaaagggagaaatgtaaatgactgcaagtgggtctacaagatcaagagaaaagcagatggaacactggatagatacaagggtcgattggtggcaaaaggcttcaagcaaaggtatggcatagattatgaggacacttttagtcctgttgttaaagctgttactatcagaacagtcctatctattgttgtatctagaggatggagtctaagacaactagatgtacaaaatgccttccttcatggagtcttagaagaagaggtatatatgagacaacctccagggtatgagaaatcctccttacctaattatgtttgcaagttagataaggctttgtatgggttgaaacaggctcctagagcatggtactcaaggttaagtactaaattacaggagttaggtttcaaagcctcaaaggcagatacatctctatttttctatagtaaaggaggagttacaatgtttctgcttattcatgttgatgacattattgtagccagttatgtgcctagtgcggttccagccttgctacaggatcttggaaaggagtttgctctgaaggatttaggtgagctccactattttcttggtattgaggtaaagaagatgactaatggcattctgttaagtcaagaaaagtatgcaacatatgtgattcgcaaggtaggaatgaatgattgtaaaccagttactactccattatctacctctgaaaaattgtcagtaaatgagggaagtctattaggaccaaatgatgccacacaacatagaagtgttgttggggctttacagtatttaacactgacaagacctgatatttctttcccagtgaataagactttgttaaaagagtcagagatacaagcccctgcagcagccaagattttgtgcgataatattggagcaaagtatatgtcatcaaatctagtggttcatgtaagcacaaagcatatagaagttgattatcattttgttagagaaagggtagcaaggaagctactagagattgagtacatctcaactaaagatcaaatagctgatggtttcaccaaggctcttgcgatattattagtcaaagtggcatctcagagactgtaccgaagtccaaaaatatttatattttgggatggagggagtattaggacactcaaagattgtggtctttgctgtgagacacccgaagatcgtgtatttgctcgtggacactgtaaaaaagtggcgtggtggcagacttccgtgaggcggccggcagaggagcagggggcggcggcgctggagagagggagagagatggccgacgcgatggcgagcacgttcttgtcctccagcaacgccggcgtgccgacgtcggaccacgaccaggccacgttcttcttgtcccggaagtccagcaggatgatgaaggaggtgtctcatgtctgtccgtggtggcaacatggtcgctgccatgagcgtgctcgtgccatcgagccattggagcttgtcggcgtcgccgagtgcacagcccggcggctcgtagaagaagtcggcctactcgccggtggtgcagtcccagacgccgatgccacctatagctga

SEQ ID NO: 14814 - DNA, 1761 bp, Oryza sativa
  Clone ID: TFbOSC900367j.C1.o13.fg
atggccgtgactagaccaccgctaggccgccgcctaccgcgcgattccggcgggcccggttgcgccgtgcccgtggaggccgggcgcaaggaggaggaggagcagaagcagcgcggaaggaggcacccgaggctgaaccggccgccatcgaggagtagggcataccaagatattttgatcctgggagataccttgctgaggagggaggatcatgtagttgtgagctatccaatgaaaaggcggaagaagccttgctttgtttgtgggttgtttggacacaattcaaagcagtgcatgcaggttgactgttttggtgtgttttatgaagcaaggtcgaatacaagaatcaataggatgaaaattatcaatgcagtatccaaatctgttcctcaacctcacaaggttgaccttaacagtccaaacaggattattattgtgcagattgagaagttcatgactacttcgtttcacaatattatatgtatggttggagtgatcgagagttcttctcttcaagcaaagaatatgctggaccgaccaaacgtggcgacctccgtccctcgatgctacaccgacctcgggctccggagacgtcccaacaacctcgacgacgcagcgccgccaagcccgccgacgagggccctcgctgccaaacgcctagaccacccgcgcctgttgtccctttgcggtcgcccgtctctcgctcgagagatggaaagagaaacggaagagagcgagaggaatggaatagagtttttacttccaaggccagtacgcgacttcatgatggctggtgctgccaatgatgagtggcgtggagtattatttcattgctttgattctgctggcgctttggaatattctatggcaaatgcgggttctaggttctcttttgctactgaagtatgtgccaaactaatgaacggagcaagatatgcagttgctgatcccccattggactccgaggaccacaaagagtttgaaaatatcgtagtctctgatgcggtaatcatacttgacctgatttttgatgttgtgcatgatgatgcggtgctaaatgtgatgatgatcaacaatggagctgatgcaactggttggcgtttctatactgatgacgatttgaccaggacaccagagaacaatgtgcaatcgcttgtcttgcctaatggcattgcattgcctactttcgagatcaatggtgggattcgattcagacgccgtgtcgtcttgccgccggtgcttatggaagaagatggggtaatatatcatttcctgcagtacaaattcctaccaaacgttagagccaccgttagggctagcattctgtcaggccttgctcatggtgaagctctcgaagaactagccatagatgctcgggcccaacactttgcagccattgccggtcctgaaggacatgatctagaccctgaacagtgggctgctcttctcttgcctgagccagcagatggaggggaggggcacttggatggtgaagctgctgtaggaggggaggggcagttggacggtgaagctgctgtagaggtaggggaggaggttcttgaggtggctgtggaggtaggggacgaggtggttcttccagccctttatggatttgtcgatgatgatgagtatcggtctaccgaagatgatgactatgttccagatgaagaggagtctcattcttcggatgatgattttgttccagatgaaagtgatgatgactatgtgccacatcatgaggggtacgaatcaagtgattaa

SEQ ID NO: 14815 - DNA, 1275 bp, Oryza sativa
  Clone ID: TFbOSC24698j.C1.o2.fg
atggcccgcacaacggcaaatgcgacggcgtcgatggcacggctcggcgcggcggctagtggcgaccagagcagcggcggcggcggcggagaggagggcgacggcgctagggtgatagagagcatgggaggactcagcgaaatggggaaaaagagaaaggggatggcggtgcaattggtcagcatgagggacaatttcatcggatcaggatctcaacagtttcatggatcaactcagcacaactctatgagcttcccatgtcaacctttcgaagatcagcctcaatccaaagtcatggctaatcagactcagacagtggaagaattgttgcgacagatgcgacgtcggtaccagatataccagatgcagcagatgcaacggcaatgtcaggagccgcgtcaaggccaccagccacaaatgcaagtccaggtgccaacccggaacctgaatcagagtcagagtcaggagttcccaatatcggcacctaagacccctgtcaaaatgttgtccagatccccgaagataacttcagccaactcaccgtcggaccaaaggaaaataagtgctacctgttatgactgtggtgagcaaggtcattatcccaactctggagcgaacaggacagtaaaatggaagatggataatggcaggaccatgttcatcaccagttcagaatttactcctgaagatgtagcaaggatacccaagcgtcagagaggaagaaataccttccgaggagcgcgtcagctaacccggcatctcataaagtacggtccgcccagacccgaagatgatgaatcaggagagcggttctctgctgacgacgacgatgatgatgatgatgatgatgatgacgatgatgatgcgacccttaacagtttcatggaaagaggattggagttcaaagcatgtactagatgtgggatagtcggacacactgctagtttatgcctccccacatgccgttgtggtgaatacacccattactcagatgcatgccctttgaggaaggtcacatgtttcttgtgtgaaggaacagatcatgtgcctaaggactgtcagttgaacgcggtcatagctaagaccaagaaagaacaagggacaaccgtgcaacccattcgtcaaccaatggcagtcgacaacaacagtcacaacccttctgctcttcctccaactccagctccagtggaaaccaaccatggaagaagcaacgtcaccaaggatgttcataagtcactacttgttccagtttcagctgtcaatgtgcataactag

SEQ ID NO: 14816 - DNA, 1161 bp, Oryza sativa
  Clone ID: TFbOSC900368j.C1.o18.fg
atggcacctcaaccaacctgtcagacttgtgtccgcaactaccttggttctaaggaagacccagctttgtcagaaaatccaaatcaactagctgaacaagtcaccaaccaagttgccaagactgataatactgttcctggaccaaacaaggaagttgcaaccagaaatcaacactcctcaatggatatttatcagattctagccaatcagactcagatgctacaagaaatagctcaaaatttggcttctatacaacaacaactgctactaccacagcccaaggtgaatccagacaagagtaagaatgaggccgcagaaatacaaggaacacaatcagtagaaggcactgatacccataaagagaagaacaaagaattcttaaatgtgatgattacagggatgaaaaccccacttcaagctaataattgccccaaccttcagaactcaatcaataaatccgtatcgcgagaaaatagcatgattaaagaaggaagttgtcacaaaagaaagaccttgccatcagaagttgacatgcaagatgtcccacaatgtcagacaatgcaatcttgccaaaacctacccaagtcccccaccctcaaatcaaagaagatcagacacgttcccggattcatatgcttcatttgccacaaaattggccattacatgagacactgcccccaaaaaccctatatggatgcaccactacaagctaatatgagcacctcaaggatgcccttctatccccaaggaagcccaaattcgccaaatgttaatgcagtacgttcaaccttccctgatgacaaaagagcaaaagcatcctgcgacatgtgccaagacatccaagaaaagaaagagatgcaagaatacaagagatgcaaagtaatgtccctagagattcaagcaaaagaagatttgtgtcgaaaaacaaactcgccagcacaatactatcagaaagcatctcagcattcaactagttccggttctacgtctcgttcgactatgtcagaacctggtcagcaagccacaatgatcaacagtaatagccatgaaggaagcaactccgtaccatgccctacaccttcaaaaagacgtggttataaggcaggagtcgaatgtttcatctgccatgagatgggacactattcatggtgctgcccttag

SEQ ID NO: 14817 - DNA, 5079 bp, Oryza sativa
  Clone ID: TFbOSC900114j.C1.o4.np
attccgtcgtttccgagagtccgtttttgccggagaagagtttgaagagttccaaggccagcaggcaagctcctggtttggaatggtatattcctggtttggagatagaactgtgagccggggtggttgttcagaatggttgggcctatgcaacaggatgccgcgctacaagcctgagtacttgttggtgttgagggttttgtccaggagttgcgtacaatgtcctttgtcatggatttgggactgcccctttttatgcccagattcctcatgatcgtcatgagagaagtgccgagtcaaagtcaccttgaacagtaatagtgaagatatccctcagtgatgttcaaagctggaggaagaaactacatccatgcatgtcagaagtggcaaggatcgccataggagagcttcgcgatcgctacagtgatcattggccgacactgagtatcgctaccatcctcgtcaaccacagggaagtaccgtggcagttaccttgagactgaaggaattgagaatgatgctaccacaggcatttggtggagatgctgtgggctatggatgaaagtcgtgcggagatgtgttagcagctcaagatcgtgaagaccggaatcgtggtaagatttgcagctagaagacaaagtggatcgtttggagaaggaactagctgtattgaaggagaagcaccaccgcagaaggccaggattcgtctcaccgcaaggaagaagctctatttgtccctcgctatcaattggcgccaaagatggtgaacactccagcaacgggaatggccccagtaacaataacaacggagagaatcccactttgctcaagttcttgctcaacagacacagctaatgaacatgatgatgcacaactccagaaccagcaaaaccaaggaaataaccatgcacctccccagacaagttagcagaatttcttcgtgtgaggccgcctgttttctctagcaccctaatcctgttgaagctggtgattggctgcatgccatagagaagaagttgatttgcttcagtgcactgatcaggagaaggtctcatttgcatcacatcgttgcatggccctgcctctgaatggtgggatcacttccgtctgaacaggctactgctgaacctatcacttggcttgaattcaccgctgctttccggaaacgcatataccatcgggagtggtgtctctcaagaagaaggaattcaggtgctcactcagggatctcgctctgttacggagtatttgcacgagttcaatgtcttgctcgttatgctccggaagatgtgcgcaatgatgaagagcgccagagaagttcttggaaggacttaatgatgagctttcttacccactcatgatggggattatcatgatttccagaagttagtggataaagctattcgccagaggaaaagtacaatcgtatggagcaaaagaaacgccggattgctcaattaagacacaacaggggaataatcagaagccgcgtcttactttaggaccccgtctatgccacagggaggttcttcgtctgttgttcgtccgcagcgtcagtcttcaacaacaatgctggcaacaacatccgtaatcaagctccacatccgttgcagctccagcacagcaacaacctgccaagagggagcaaggcagcagcccgtggtgtgtttcaactgtggagacccaggacattatgctaacaaggtccgaagccccgacgcgtgaaagttgtccctgtccagagcaactctacgtaccagcatcaaaggcccgtgttaatcatgttgctgctgcagaagctcagatgctccagatgtgattttgggtacgttccttgttaacttagttcctcaacagtgcttttcgattctggtgctacacattcattcttatctatgagtttgcgggaaatcatgggatggaagtagaagatcttagacgtcctttgaggttagtaccccaagtaatcaagcactctctttgcaacgtagcccctcttcagaatagaaattcaaggagtaccattcctggccaatcttatcttgttgaatccaaagaccttgatgtcatcctagggatggactggttagccagactaaaggtgtgatagactgtgctaacagaaaagtaactctcaccagcaatatggtcgagttgtaactgttcatgcattgtcttctgagtctttaaggtcagactgaaccagataactttggaagagatttctatagtccgggagtatccgatgtgttcccatatgatttacctggtatgccgcccaaaagggatataagttcagaatagatttggtacctggaacaactccgatccataagagacctatagaatggcagccaatgagttggcagaagtcaagaggcaagtagatgtttgcttcagaaaggatacatcagaccgagttcatcaccatggggagctcggttatttttgtggaaaagaaagaccatacccagagaatgtgtgtggatatcgtgcactaaatgatgtgactatcaagaataagtatccactacccaaattgatgatttgtttgatcagcttaaaggtgctactgttttctccaagtagatcttcgatcagggtatcaccagttaagaatcaaagaggaagatatcctaagacagcttttaccactaggtatgggttgttcgaatgtactgttagtcttttggacttaccaatgcccccgctttcttcatgaacttgatgaataggtgtttatggaatacctagacaagtttgtggcggtctttattgatgaattcttatctactctcgaaccaaagaagagcatgaagaacatcttcgcctgcactagagaagttacgagaacatcaactgtatgctaagtttagcaaggtgaattttggttgtctgaagtgaagttccttggtcacgtcatctcagcggaggagttgccgttgatcctagtaatgtggaatccgtaaccaactggaacaaccgaagacagtttcagagatccgcagtttcctaggcctcgcaggaattatcggaggtttatagagaatttttccaagattgctaagcccatgaccgactgcttcagaaagatgtgaagtacaagtggtcggaagaatgtgagcgagttttcaagagttgaaaagtcgcttgatatcagctcctattttgatttacctgatccaaagaagggtttccaagtgtattgcgatgcatccaaactgggttaggttgtcttctaatgcaagatggaaaggtggttgcctatgcattcgtcagttacgtccgcatgagaagaactaccctactcatgatcttgagtagctgtagtagttcatgcgttgaaaatttggcgtcattatcttttcggactcgtacagaggtatataccgatcacaagagtttaaagtatatctttatcagccggatctgaacatgagacaacggagatggttggaactaattaagattatgacataggaattcattatcacccgggaaaggctaatgttgtagcgacgctcttagtagaaaaggctattgcaatgctacggaaggacgacagcgccattggaattatgcaaggaatttgaaagattaaatttgggaattgtcgtagaggtttcgttgcagccttagaagcgaagcccactctaattgatcagttagagaagcccaaattaatgatcctgatattcaagagatcaagaagatatgagaagaggaaaagctatcggtttcttggaggatgagcacggaacttatggttgggtgagagaatctgtgtccccgacaacaaagatttaaaagagcaattctgaaagaagctcatgatactttatactccattcaccctggtatactaagatgtaccaggatctcaaggaaagattttggtgggcaagtatgagcgtgaaatcgcagaatacgtagcagtatgtgatgtttgtcagcgagtaaggcagaacatcagaaacccgccggtttgttgcaggctttgaagattctgaatggaagtgggaagaaatcggtatggattttatcactggtttacccgaacgtcatcaggtcatgactctatttgggtgatagtcgacagacttacaaagtagctcatttcattccggtaaagacaacctattccggaagtcgctagcggaattgtacatggcaaggattgtgtgtttgcatggcgtccctaagaaatagtgtctgatcgaggcagtcagtttacctcaaatttttggaagaacttcaggaagagatgggttctaagctgaactttagtactgcttatcatcgtagacagacggacaaaccgaaagggtgaatcagattttagaagacatgtgagagcttgtgctttagatttcgatggaagttgggataagaatctacctatgcagaattttcgtacaacaacagttatcaagctagtcttcagatggtccttacgaagcactgtatggtcggaagtgtcgcactccgcttttgtggatcaaacgggagaacgtcaggttttcgggacggatatcctaagggaagcgaagaaaaggtaaagatcattcaagaaagattgcgagtggctcaatctctcataagagttatgccgacaatcgccgcagagatctaagttttgaaggaattatgtgtatcttcgtgtcacgcctcttagaggagttcatcgtttccaaccaaaggaaaattggcaccgcgttttgtgggaccttataagattgtcataaaagaggagaggttgcttatcagttggagttacctcaatctttggcagagtccataatgtgttccatgtgtcgcaattgaaaaagtgtttaagggtcctaccgaagaagctaatctcgaacagatagaagtccaagaggatctgtctatgttgagaaaccaatccgtattttggaaacagatgagagaagaaccggaatcgagttatccgcttttgcaaagtccaatggagtaatcactcggagaagaatcaacttgggaacgagaagatgaattgaagtcagctcatccgctctgttcgccagttcttccgaatctcgaggacgagattctgtt

SEQ ID NO: 14818 - DNA, 1236 bp, Oryza sativa
  Clone ID: TFbOSC417493j.C1.o3.np
atggatgaagtcgggtgtcgatggacattctccagggcaaatgaaggctacacgagctgcggcccggtagtcgagatgtcatatggcagagggttggtgccctgctgctaggggctcagttctgcctgcctgtcccgggtatcccggccgtaggtgggattgggtcggtactcttgtctaaggctaggatgggttggaaactatgtcacgtcttccgtccgtataccgtggtggtagattgcttaacaactaaaatgtggaatggttggcctgggttggcttgggacgagctgggacccagggtcgggttgccagttcggtctaaatcatcgtaggccttgggttaaggcagtactagatggtcaggtcagtgaagaagaagacatcgtcagttgtttgtcgaaactccagaaggctgttggatccgtcagcgcagcgaaggaagcagtgaagccagctgtgaagcaggacaaaagacttagatctgttaaggtcctatccttagtttctaatctgtctctcccctttgttttccctctctccctctccaaatctttgcaacagatggctgacaatgagaaaggcaataaggtcagaagtcaggacattggtaccttaagctcccgagtgaatgaagcaccagacaccagttgtgtgacactggtccaacacctgattaaccagaaccgattgcttatagagatactacagcagcatcagacgccaattctgaacctgagtcaaatacaacctcaagtgcagttggaggcagtccaagcactcacaccacaagtcagcatgccgccagcatcccgaaggacccatggtgacgtgccacatgttgacccaaaagaagcaagtaacatttgctttatgtgtgatgagcaagggcactatgcaagggagcgtcctcagcagaaaagaaaaacaccaatgcgaaccgaagatgaagtccgtaagatgatcattactagcacagaatggcctccaccaggaatgaccagacgtcagagaagaaataccttccgaggtgcaccacagttgacagagcatcttttagctaatggaggtagagtgtctgatagtgaagattcagatcaagtctcctcagatgatgaagatgaaatggaatgtaaggcatgctctcgttgtggagaaatcggtcattgtcgcgacacatgtggaagtacggtagtgctttgcaacgaggacgacgaacgagaacggcttgacgga

SEQ ID NO: 14819 - DNA, 3849 bp, Oryza sativa
  Clone ID: TFbOSC10615j.C1.o9.fg
atggctggttttgccgatgcactgaggccggataaattcaccggtgtgcattttaagagatggcagatcagggtcactctgtggctgacagctattaaatgcttctgggtgagtactggcaaacctgaaggagttcttactgctgaacagcagaagcaattcgaggaagccactactctctttgtgggatgcattcttagcgttcttggcgatcgtctggtcgaggtgtatatgcatatgaccgacgctaaggagttgtgggatgcactgaatactaaattcggtgctactgatgctagcaatgatctgtatatcatggagcagtttcatgactacaagatggctgacaaccgctctgtagtcgaacaggctcatgagatacaaaccatggctaaggaactcgaactccttaagtgtgtcttacccgacaaatttgtggctgggtgcattattgcgaaactacctccatcttggagaagtttcggtactgcactcaaacacaagagacaggaatactccgttgaggggttgatagcgtctcttgatgttgaggagaaagctcgggaaaaagatgccgcgtctaagggcgatggtgggcagtccagtgccaatgttgtgcacaaggcccagaacaagagcaaggggaaatacaaagctcagcagaccaccaacttcaagaagcagaagaagaacaacaataatcctaatcaggatgagaggatttgctttgtgtgtggtcaagttggtcatctggctaggaagtgtccacagcgcaaggggatgaaggcacctgcagggcagacttctaagtctgctaatgtgaccattggcaacactggagatggaagcgggtatggtaatttacctactgttttttcagttaatcaatctactaattggtgggttgatactggggccaatgtcgcacggggttccaccgtcctaatggggaatgggtcacatgcttctgttcatggtgttggcacggtagatctgaagtttacttcgggaaagatcgtgcagctgaagaacgtgcagcatgtcccttctatcgacaggaatcttgttagtggctcccgtctgactagagacggatttaagttggtttttgagtctaataaagtagtcgtgtctaaacatggatattttattggtaaagcaacccgcaagcctcacaaggctgccgaggagagaaacttggcaccactagaactcctacattcatatctttgtgaaatgaatggggtgttgacgaagggtggaaaacgatatttcatgacattcattgatgatgctactagattttgctatgtgtacttgttgaaaatgaaagacgaggctctagactattttaaaatttataaggcagaagttgaaaatcaacttgacagaaagataaaaaggcttaggtctgatcgtggtggaaagtttttctcgaacgagtttgacttattctgtgaggaacatggcatcatacatgagaggacgcctccctattctcccgagtctaatgggattgctgaaaggaagaaccgcacactgactgacttggtgaatgccatgttggacaccgcgggactgcctaaggcatggtggggggaggcattgttgacctcaaatcatgtgttaaacagagttcctaacagaaataaggacaaaacaccatatgagatatggattggtagaaaaaccatcactttcttatttgcgcacatgggggtgcttggcgaaagtcaatttaaatccgaggtaccggacatgcatgttggtacaattatggagtctcgtgatgctatcttctttgagagctttttcccaatgaaggatacacatagtggttcgaaccaaccatctgaaataattcccagttcaatcacaccaccagaacaaactgaacatacacatgaacttgtctctgaggaggatgttagtgaagctcctcgaaggagtaagagacaaaggacggctaagtcttttggtgatgatttcactgtgtacctcgtggatgacactcctaagtcaatttcagaagcatatgcatctcctgatgcagactactggaaggaggctgtccgtagtgaaatggattccattgtcgctaacgggacttgggaggtgacagagcgaccctatgggtgtaaacctgtggggtgcaagtgggtgttcaagaagaagcttaggcctgacggtactattgaaaagtacaaggctcggcttgttgctaagggctatactcagaaagaaggcgaagatttctttgacacttactcacctgttgctagattgaccacaattcgtgtgctactttccctagcagcctcacatggtcttctcgttcatcaaatggacgttaagacagcttttcttaatggagagctggatgaggagatctatatggatcaacctgatgggtttgtagttgaaggtcaagaaggaaaagtgtgcaaattgttgaagtctttgtatggtctgaaacaagctcctaagcaatggcatgagaaatttgacaaaacattgacatctacaggctttgcagtcaatgaggcagataaatgtgtgtactatcgccatggtgggggtgagggagttattttgtgcttgtatgttgacgacatactgatatttgggacaaaccttgaggtgataaatgatgttaaatcattcttatctcaaaattttgatatgaaggatttgggagtagctgatgttatcttaaacattaagctaattagaggtgagaatgggattacactcttgcagtcccattatgtggagaagatcttgaatcgctttggctacattgatagtaagccttctccaacaccttatgatcctagcttgttgcttcgcaagaacaagagaattgctaggaatcaactggaatactcccaaatcattggctcgttgatgtacctggctagtgcaactaggcctgatatctcctttgctgtgagcaagttgagccgatttacctctaatccgggagatgatcactggcgtgcgcttgagcgagtaatgcgctatctgaaaggtactgtggaattggggcttcactatactgggtatcctgcggtactggagggttatagtgattctaactggatctctggtgtggatgagatcaaagccactagtggatatgttttcacactgggtggtggtgctgtttcatggaggtcttgcaaacagaccattttgacgaggtcaaccatggaagcagagctaacggcactggatactgctactgttgaggcagaatggctgcgtgatctattaatggatctgcctgttgttgaaaaaccggtgccggctatccttatgaactgtgacaatcaaacgacatgtgaaaagacgattgaagtctgtcaggaaattaagaaactccggagttataacgttggattacatccaaacagcgagaaacctggcagatcccttcacgaagggactatcacgaaatgtgatagacaatgcatcgaaggagatgggtttgagacccatagcattcttgaaagaactcacctttgtgagcttgactgttggtcgcagtctatgaagattttgggtgaatcttctaggaagcttactaaagacctaggaattaaatcattatatgtctataatctcaacaaaaaccacttaatcttaagtgtgcactgcaatgattggaaggcctactcttgtaccacaatgatattcagccagtgtgctagaaaccagaaaagcagcgctattccgagtgtcacagtgattggtcgacgcaaggccataacaatatgtatctctacatcgagccagagacctatcccgctgataatcgagcaaaatgattggtcaatgttctcctga

SEQ ID NO: 14820 - DNA, 2061 bp, Oryza sativa
  Clone ID: TFbOSC14490j.C1.o1.fg
atgaagtccaatagaggagtgtctttcagcacaaagaatgcagcaagtggaagcaaattcacatcaagaggtagtggaaatagaggtgcattttctagctcaagtggtggtgcacgatctagcaattatggtacttccagtgggaaagatttggctgctccaaatgagaggaaaaatgcagcaaacacatcatctacttcagtgggttcttccaccaagagtagtggaattcaatgcttcaaatgtggtggtcgtggtcatgttgctagagagtgtccaaacaatagaaccatcgttgtgaatgatcaaggagagtatgaatctactagtgaggaagaacaagaagatagtgaagaggagaataatcttgagaaggatatctgtgaatttgaatctggtgctgctcttgttgtaactcaaattttgagtgtacaaatgagtgatgctgaaaatggacagcggcacaatctttttcaaactagagctaaagtgcaagataaagttgtcaaggtgatcattgatggtggaagttgccacaatcttgctagcaaagaaatggttgaaaagcttggtttgaagctgctaaaacatcctcatccatatcatgtgcaatggcttaataattcaggttctattaagattgcacaaagagtaaaagttcctttcaagattggtgaatatattgacaccatggagtgtgatgtggcacctatgacagtgtgtcacatgctgttgggaagaccatggcaatatgatcggtcatctctacattgtggtagaaccaatcaatacaccatcaagtggaagggcaaggagttgattcttaaacccatgacaccgcagcaaattctagctgagcacttgcaaaagagctctgaagtgaggaatgagagtgcaaaagaaggacagaaaaataatttgagtgccccccacaaatcggaatatgaagatgtctttccagaggaaacacctgttggacttcctccattgcgtggcattgaacatcaaattgatctcatccctggagctacacttccaaaccgtccagcataccgcaccaaccctgaagaaactaaggaaattcaaaggcaagtacaagcacttttagataaaggttatgttcgagaaagtttaagtccttgtgctgtccctgtgattttggtgccaaagaaagatggttcatggaggatgtgtgtagattgtagagccataaataacatcactgttcgctatcgtcatcctattcctaggctagatgatatgctagatgaattgagtgggtctatgatattttcgaaaattgatttgagaagtggtttccatcaaattagaatgaaaattggagacgaatggaaaactgcttttaaaacaaagtttgggttgtatgaatggttagttatgccttttggtttgactaatgcacctagtacattcatgagattaatgaaccatgtcttaagagcatttattggaaaatttgttgttgtgtactttgatgatatcctaatttacagcaagacattggaggaacatgttgctcatattcagcaagttttggatgtactcaggaaagaacaattatatgctaaccttgagaagtgcacattttgtacagatcaggttgtgtttcttggttttgttgtttcaggtttaggaattcaggttgatgaatcaaaggtgaaagcaataaaggattggccaactcctgaaaatgtaagccaggtgaaaagttttcgtggacttgctggtttttacaggagatttgtcagaggtttcagcaccatagctgcaccattgaacgagttgacaaagaaaggtgttgccttccaatggggagaaccgcaagagaaagctttccaagaattgaagaaaagattgtccgaaggccccttgcttgtgttgccggatttcactaaaaccttcgaggttgaatgtgatgcaagtgggattggtattggaggcgttctcatgcaaaatggacagcccgttgcatatttcagtgagaagttgggggatcctctagagtcgacctgcaggcatgcaagcttgagtattctatag

SEQ ID NO: 14821 - DNA, 4212 bp, Oryza sativa
  Clone ID: TFbOSC400860j.C1.o8.fg
atgtcggctccaacgccgcgtgtgtcgcggtcccgtgaaccgcaccagcgacgtatctcccgttcacctccacaccgtcgtggtcgccggcggcctggcgaagaccgtgaacttattccggtccagtgtgtggtgaaggaggtgggcggctcagccaactatccactgctgacgaagactaactacggagattgggctctcatgatgaaggtcatgctgcaagcgcgcggcctgtgggatgccgttgagcatggtgatgccgatttccaggcggatcgaatggcgatggaggccatactccgggcgatgccgccggagatgttagcttcactcgccgtcaagccctcggccaaggaggcgtgggacgcgatcaagacgatgcgagttggcgtcgatcgtgtccgcaagtcgaaggcgcaaatgctgcagaagcagtatgatgcgatggagttcaaggacggggagaccgtcgaggaattctcgttgcgcctcaacggactcgtcaccaacctcgccacgcttggagtccatcttgaagaaggaaaggtggttgaaaaattccttaactctgttccagatcatctctcgcagatcgctttgtccattgagacgttgcttgacctcgatgagctcacgctcgaggaggtcaccggccggctccgaaacgctgaggagaagctgcctgccaagagctctgctgccggtgggaaactgtttctcactgaggagcagtggactgcccggtggaaggagaaacaggccgcggaaagttcctctgggaaggcgaagtccggcggtggcaaccgtcgtcggcgtggtggcaagaagaaagctgaagctgctgcgcacgatggagatcgtgccgggcgcgacacgcaggaagggcgggaaccaaaccgcgacaagtgccgcaattgcggccgcacggggcactgggctaaggactgccggcagcccaagcggcctgccgaggcctaccaggccctggcggatgaggacgatgacgagccggccctcctcatggcccatgtcgtcgacgctgctcctgtgtctgcgtcgtcttcatctgcgccacctgcttcttcgccgccatcgcagcctgacaagacgatcgagctcgtcgagccaaaggtgttcgcgcaccttctcacggagaaacaaaccgacggcggcgtctggcatctcgacaccggagcaacaaaccacatgacgggcattcgcgaagttttcgctgagctcgacctgtctgtgcggggctcggtgcgattcggcgacggctccgtcgtcggaattgagggtcgtggcaagatcatttttgagtgcaggaatcaggagcaccgagcgttgacgggggtgtattacatccctaaactcaacgccaacttgataagtttgggccagctcgatgaaaatgggtgcgacgtccgtatctaccacggtgtttgcacgatacgggacccggcggcccagctgctcgcacgcgttcagcggacgcggaatcgcctgtacttgatcaagctcaccattgggcaaccggtgtgcctcgcggccaaggcgcaggagtgcgcctggctgtggcatgcgcgctacggccacctccacttcgacgctctgcgacgactggcgagccgcgacatggtgcgcggcatgcccgacatcgatcatgtcgagcagctgtgcgacagctgcgtcatatctaagcagcgacgcaccccgtttccacgccgctccatgtttcgtgctgaggatcgccttgagctggtgcatggcgatctgtgtggtcccatctcgccggcaacccctggaggcaagactcatttcctcctgcttgatgatgcgagcaggtacatgtggatcactctgctgggatgcaagagcgaggcggctgatgccatcaagcgctttcaggcgcgagccgaggcggaatccaagcagaaactgcgcatcctccgcaccgacaacggtggcgagttcacctcggtggaattcgccacctactgcgccgaacagggagtctcacgccacttctccgcgccctactcgccccaacagaatggcgtggtggagcgccgcaaccaaaccatccttgggatggctcgcagcttgttgaaagccaagaacatgccggcacgctattggggggaggctgtcacgacggcagtttttctgctcaatcgcgcgccgacaaagagcttggccaacatgacaccttatgaggcgtggcatgggaagaagccggcggtgggttacctgcgcacgttcgggtgcctggcctatgtcaaggacgtgcggcctcacctccccaagctctctgaccgcagcaagccgatggttctcatcggatacgccgacggagccaaggcgtacaaggtgttcgatccggtgtctggacgagtgcaggtctcgcgcgacgtgattttcgacgagggcgctgggtgggactgggatgcggcgggcgctgcagccgtccccggcggcggaggttgctcagacttcaccgtcgagtacctgacaacgggcacatcaccgtcggcttcgacctcggctccatcatctgcatcttcgggcgcttccgctatgggtgatctactgggcgacgcacttacgcctgggttcgcaacccgggatccggaggagggggagcttcatctccttgcggccgaggaaccagcctcgttcactgaggctgaacagcggcaggagtggaggcgggctatgctggatgaaatcgcctcaattgaggagaacaacacatggcgccttgtcgatctcccgtccggccatcgtgcaattggcctcaagtgggtcttcaagctcaagaaggatgcagaaggcagagtggcaaagcacaaggctcgcctcatcgcgaaaggctatgtgcagcaacccggcatcgactttgaggaagtgttcaccccggttgcacggctggaatctgttcggttgttgctcgctcaggccgcgcaggcaggctggacagtgcaccatatggacgtcaagtccgcgttcctcaacggtgagctagccgaggaggtctacgtcaagcagccgcccggtttcgtcaaggaaggccgtgaacaccaagtccttcggcttgacaaggcgctgtacgggctgcgccaagcgccccgtgcgtggaactccaagctcgaagccaccctgctgtctctcggcttccggcggaacgactgcgaacatgcggtctatgttcgaggtaacaccagtgcacggttgctcgttggtgtttatgtcgacgatctaatcatcacagggacaaaggaggatgagatcgttcgattcaagggcgaaatgaaggcgttgttcaagatgagtgacctcgggcttctcagtttctacctgggtatcgaggtcgagcaggtggcgggcagcatacggctgtcacaggcagcatacgcacgccgtatccttgagcgagcagggatgctgggatgcaacccgagcgccacgccaatggaacaacgcctcaagctcagcaaaaccagtgctgcggcgtcggtgaaccccacctggtaccgtggcatcgttggctgtttgcggtatctggtacatacgaggccggatatcgcgttctcggtgggctacgtgagccgcttcatggaggcgcccaccaccgagcacgaagcggcggtgaagcgcatactgcgctatatcgccggcacgacggagttcgggtgtcactaccaccagtccagcagccccgttcagttggtgggatacagtgacgcggacatggccggcgacccagacacgcgcaagagtacgaccggtgttgtcttcttcctcgggacaagcccggtcagctggcaatccgtcaagcaaaaggttgtcgcgctttcgtcttgcgaggcggagtacatcgctgcgacaacggctgcatgccaaggcgtctggctctctcagttgctaggagagatcaatcaagaagagccggacgcgttcaagcttctcattgataacaaatcagcaattgccctcagcaaaaatccggtgttccacgagaggagcaagcacatcgctacccgctaccactacattcgagaacgggtggaagatggctccgttcatgtcgagttcgtcgggactgaggggcagattgcagacattttgaccaaggcacttgggcgcacacgttttcaggagcttcgctcccgcattggcgttgccgacgtcaaattcaggtgcaagacttag

SEQ ID NO: 14822 - DNA, 3030 bp, Oryza sativa
  Clone ID: TFbOSC401810j.C1.o53.gm
atggctggttttgccgatgcactgaggccggataaattcaccggtgtgcattttaagagatggcagatcagggtcactctgtggctgacagctattaaatgcttctgggtgagtactggcaaacctgaaggagttcttactgctgaacagcagaagcaattcgaggaagccactactctctttgtgggatgcattcttagcgttcttggcgatcgtctggtcgaggtgtatatgcatatgaccgacgctaaggagttgtgggatgcactgaatactaaattcggtgctactgatgctagcaatgatctgtatatcatggagcagtttcatgactacaagatggctgacaaccgctctgtagtcgaacaggctcatgagatacaaaccatggctaaggaactcgaactccttaagtgtgtcttacccgacaaatttgtggctgggtgcattattgcgaaactacctccatcttggagaagtttcggtactgcactcaaacacaagagacaggaatactccgttgaggggttgatagcgtctcttgatgttgaggagaaagctcgggaaaaagatgccgcgtctaagggcgatggtgggcagtccagtgccaatgttgtgcacaaggcccagaacaagagcaaggggaaatacaaagctcagcagaccaccaacttcaagaagcagaagaagaacaacaataatcctaatcaggatgagaggatttgctttgtgtgtggtcaagttggtcatctggctaggaagtgtccacagcgcaaggggatgaaggcacctgcagggcagacttctaagtctgctaatgtgaccattggcaacactggagatggaagcgggtatggtaatttacctactgtcgcacggggttccaccgtcctaatggggaatgggtcacatgcttctgttcatggtgttggcacggtagatctgaagtttacttcgggaaagatcgtgcagctgaagaacgtgcagcatgtcccttctatcgacaggaatcttgatacacatagtggttcgaaccaaccatctgaaataattcccagttcaatcacaccaccagaacaaactgaacatacacatgaacttgtctctgaggaggatgttagtgaagctcctcgaaggagtaagagacaaaggacggctaagtcttttggtgatgatttcactgtgtacctcgtggatgacactcctaagtcaatttcagaagcatatgcatctcctgatgcagactactggaaggaggctgtccgtagtgaaatggattccattgtcgctaacgggacttgggaggtgacagagcgaccctatgggtgtaaacctgtggggtgcaagtgggtgttcaagaagaagcttaggcctgacgcctcacatggtcttctcgttcatcaaatggacgttaagacagcttttcttaatggagagctggatgaggagatctatatggatcaacctgatgggtttgtagttgaaggctttgcagtcaatgaggcagataaatgtgtgtactatcgccatggtgggggtgagggagttattttgtgcttgtatgttgacgacatactgatatttgggacaaaccttgagtcccattatgtggagaagatcttgaatcgctttggctacattgatagtaagccttctccaacaccttatgatcctagcttgttgcttcgcaagaacaagagaattgctaggaatcaactggaatactcccaaatcattggctcgttgatgtacctggctagtgcaactaggcctgatatctcctttgctgtgagcaagttgagccgatttacctctaatccgggagatgatcactggcgtgcgcttgagcgagtaatgcgctatctgaaaggtactgtggaattggggcttcactatactgggtatcctgcggtactggagggttatagtgattctaactggatctctggtgtggatgagatcaaagccactagtggatatgttttcacactgggtggtggtgctgtttcatggaggtcttgcaaacagaccattttgacgaggtcaaccatggaagcagagctaacggcactggatactgctactgttgaggcagaatggctgcgtgatctattaatggatctgcctgttgttgaaaaaccggtgccggctatccttatgaactgtgacaatcaaacggaaattaagaaactccggagttataacgttggattacatccaaacagcgagaaacctggcagatcccttcacgaagggactatcacgaaatactactccatctcgctcgccggcgtgcaccggcgatcgggagagcaggtctccggaacctctgccttcgacgttctgcaccgggagaaggcggcaataagggacctgctgctgctgctccaacgacatgcctatactgctatcgcggcggctgccgtcgactcgcacttcccgcaagattacctcaaaaatattactccgatgccgtcatggctttacaaccaactgttcgacgtcggggcctgtagatcgcacggacgcccacatagaaggtgtaaagttctaaccggcagctttttagtggctgaagggggagagagggagagagggtcgccggtgctccggtggccgggaggtggcgacgccggcggcaaagcggcaaaaggcggtgatgcaaggcggttccagaggagaagatcgaggagaacttcgcgacggcgccgtggaaaagaagaagtcggcgccagctctgtgctcccattggatgtcgacggcggcgcgagcacgtggcagctgctgctgtgttgggtggcggaggaggagcagcacggcacggcgacggtggcggcgcgacttggtggcgacggcaagacggcggcgacggcgcacaaagccgtgggcggcggcggcgctgtggcttgggcgccgagtgcgcccacagagaggagaaagggcggctcagctggttgggccggcttgggccgtgcgagtgagaggaggaaaggagaaatgcggcccaaactcaaaagggagaaagtctaa

SEQ ID NO: 14823 - DNA, 3180 bp, Oryza sativa
  Clone ID: TFbOSC411095j.C1.o6.gm
atgaagccggagaacgcgttcgtgacggtgcaggaggggacgctgtgcttggcgatcgtggtgacgacgaagcagcagccggtgcccatcctcgggaacctcgcgcagcagaacatccacgtcggctcgccgccgccgactgcgcagggagcggctggccagcggagcatacgagcggcgggcaggcgcgctgcgggagaggaagatggcgccgacggggagcgggacgaggagagcgaggatgccgccgccgtcatcgtccatttgcacagatctcgcgcccgcgccgtcagcggcgtcgccggcgggagtgtgagcgcgggggcagcggcgggtggagcgggcggggacagcttgttcccgcgtcggcgccgtcggccacctctccggctctcccttctcaagcgtcccaaccgccgccgcctcccttctcccgtgtcgtcgtcatcgccgccggcttccgggcctctccgacggtccaaccccgaggtcgcacgcgccaccgcagccaccaccggccgccggacctcctccccacccgccagctgccctgctggctgctgtagagagaagagaactgcgggcgcggccagcggctccgcgcagccagcggcatgtgacgaggaacggcaggctcgcagcggcgtgcgcgcggcggcggacgaccaccccccacccggatccggtagaggcagcagacgatcgccccccgctcggatctggcggcggtggccgtcccccacctggatccggcggtggtggcggcgtgcgggcgggctcggacggtggggagttagcggatccggctaccgcgacggcgacagcaactacggagaccacgacgacgacgacaatgacgaccgcgaggagggcagcgacaatagctttaggatcaaggtcactctgtggctgacagctatgaaatgcttctgggtgagtactggcaaaccagaaggagttcttactgctgaacagctgaagcaattcgaggaagccactactctctttgtaggatgcattcttagcgttcttggcgatcgtctggtcgaggtgtatatgcatatgaccgacgctaaggagttgtgggatgcactaaatactaaattcggtgctactgatgctagcaatgatctgtatatcatggagcagtttcatgactacaagatggctgacaaccgttctgttgtcgaacaggctcatgagatacaaaccatggctaaggaactcgaactccttaagtgtgtcttacccgacaaatttgtggccgggtgcattattgcgaaactacctccatcttggagaagtttcggtactgcactcaaacataagagacaggaatactccgttaaggggttgatagcgtctcttgatgttgaggagaaagctcgggaaaaagatgccgcgtctaaaggcgatggtgcgcagtccagtgccaatgttgtgcacaaggcccagagcaagagcaaagggaaatacaaagctcagcagaccaccaacttcaagaagcagaagaagaacaacaacaatcctaatcaggatgagaagacttgctttgtgtgtggccaacttggtcatctggctaggaagtgtccacagcgcaaggggatgaaggcacctgtagggcagacttctaagtctgctaagtctgctaatgtgactattggcaacactggagatggaagcgggtatggtaatttacctactgacgcacggggttccaccgtcctaatggggaatgggtcacatgcttctgttcatggtgttggcacggtatatctgaagtttacttcgggaaagattgtgcagctgaagaacatgcagcatgtcccttctatcgacaggaatcttgttagtggctcccgtctaactagagacggatttaagttggtttttgagtctaataaagtagtcatttctaaacatagatattttattggtaaaggttatgagtacggaggcctgttccgcttttccctttctgatttcggcaataattctgtgaaccatattagtggcagtgtggatgatgagcctaatgtttggcactcaccctcacatggtcttctcgtttatcaaatggacgttaagacaacttttcttaatggagagctggatgaggagatctatatggatcagcctgattggtttgtagttgaaggtcaagaaggcaaggtgtgcaaattgttgaagtctttgtatggtctgaaacaagctcctaagcaatggcatgagaaatttgacaagacattgacatctgcaggcttcgcagtcaatgaggcaggtaaatgtgtgtactatagccatggtgggggtgagggagttattttatgccagtatgtcgatgacatactgatatttgggacaaaccttgaggtgataaatgagtcccattatgtggagaagatcttgaattgctttgactacattgatagtaagccttctccaacaccttatgatcctagcttgttgcttcgcaagaacaagagaatagctaggaatcaactggaatactcccaaatcattggctcattgatgtacctggctagtgcaactaggcctgatatctcctttgctgtgagcaagttgagccgatttacctctaatccgggagatgatcactggcgtgcgcttgagcgagtaatgcgctatctgaaaggtactgtggaattggggcttcactatactgggtatcctgcggtactggagggttatagtgattctaactggatctctgatgtggatgagatcaaagccactagtggatatatcttcacactgggtggtggtgctgtttcatggaggtcttgcaaacagaccattttgatgaggtcaaccatggaagcagagctgacggcactggatactgctactgttgaggcaaaatggctgcgtgatctattaatggatctgcctattgttgaaaaaccgagcattcttgaaagaactcatctttgtgagcttgactgttggtcgcagtctatggagatttttgattactccatcccgctcaccagcgtgcacctgcgatcgggagagcaggtctccggaacttctaccttcgacgttctgcaccggaagaaggcgacaataaggtttttggaaagcgctttgcgcgactgctccctgttcatccgcgacggctcgtcttcctctttgctcgcgtgctgcgtgccttcgtag

SEQ ID NO: 14824 - DNA, 2892 bp, Oryza sativa
  Clone ID: TFbOSC416211j.C1.o4.fg
atggtggtgcggatcggagaagaagtcgggagtggagcggggaaggcggtggcgtggccaggaaggaggagggcgatgcgtgcgcgaccatgggaggaagtggcggcgcggccgggggaggaggccgatacgcgtgcagctagggaaggagaagattactccatcccgctcgccggcgtgcacctgcgatcgggagagcaggtctccggaacctctgccttcgacgtcctgcaccgggagaaggcggcaataagaaaaatccggttaaatcattatatgcctataatctcaacaatccaaaaaccttattataggcactgtgattttactatggctggttttgccgatgcactgaggccggataaattcaccggtgtgcattttaagagatggcagattagagtcactctgtggctgacagctatgaaatgcttctgggtgagtactggcaaacctgaaggagttcttactgctgaacagcagaacattcttggcgatcgtctggtcgaggtgtatatgcatatgaccgacgctaaggagttgtgggatgcactgaatactaaattcggtgctactgatgctagcaatgatctgtatatcatggagcagtttcatgactacaagatatctaacaaccgttctgtagtcgaacagactcatgagatacaaaccatggctaaggaactcgaactccttaagtgtgtcttacccgacaaatttgtggccgggtgcattattgcgaaactacatccatcttggagaagtttcggtactacactcaaacacaagagacaggaatactccgttaaggggttgatagcgtctcttgatgttgaggagaaagctcgggaaaaagatgccgcgtctaagggcgatggtgggcagtccagtgccaatgttgtgcacaaggcccagaacaagagcaaggggaaatacaaagctcagcagaccaccaacttgaagaagcagaagaagaacaacaacaatcctaatcaggatgagaagacttgctttgtgtgtggccaacttggtcatctggctaggaagtgtccacagcacaaggggaagaaggcacctgtagggcagacttctaagtctgctaatgtgaccattggcaacactggagatggaagcgggtatggtaatttacctactgttttttcagttaatcagtctactaattggtgggttgatactggggccaatgtacatgtttgtgctgacatctcattgttttcttcttatcaggtcgcacggggttccaccgtcctaatggggaatgggtcacatacttctgtttatagtgttggcacggtagatctgaagtttacttcgggaaagatcgtgcagctgaagaacgtgcagcatgtcccttctatcgacaggaatcttgttagtggctcccgtctgactagagacgaatttaagttggtttttgagtctaataaagtagtcgtgtctaaacatggaaattttattggtaaaggttatgagtgcggaggcctgttccgcttttccctttctgatttctgcaataattctgtgaaccatatttgtggcagtgtggatgatgaggctaatgtttggcactcacgtttatgtcatagtaattttggcttgatgtctcggctttccagcatgtgtttaattcctaagttttccattgtcaaaggttctaagtgccatagttgtgtgcaatcgaagcaacctcgcaagcctcacaaggctgccgaggaaagaaacttggcaccactagaattcctacattcagatctttgtgaaatgaatggggtgttgacaaagggtggaaaacgatatttcatgactttgattgatgatgctactagattttgctatgtgtacttgttgaaaacgaaagacgaagctctagactattttaaaatttataaggcagaagttgaaaatctacttgacagaaagataaaaagacttagagttcctaacagaaataagggcaaaacaccatatgaaatatggattggaagaaaaccatcactttcttacttgagcacatgggggtgcttggcgaaagtcaatgtaccaataacgaagaagcgcaaacttggacctaagactgtggactgtgtctttctgggatatgcttatcacagtattgcctatagatttttaatagttaaatctgaggtacctgacatgcatgttggtacaattatggagtctcgtgatgctaccttctttgagagcttttttccaatgaaggatacacatagtagttcgagccaaccatctgaaataattcccagttcaatcacatcaccagaacaaactgaacatacacatgaacatgtcactgaggaggatgacagtgaagctcctcgaaggagtaagagacaaaggacggctaagtcttttggtgatgatttcactgtgtacctcgtggatgacactcctaagtcaatttcagaagcatatgcatctcctgatgcagactactggaaggaggctattcgtagtgaaatggattctattatcgctaacgggacttgggagtgggtgttcaaaaagaagcttaggcctaacggtactattgaaaagtacaaggctcggcttgttgctaagggctatactcagaaagaaggcgaagatttctttgacacttactcacctattgctagattgaccacaatttgtgtgctactttccctagcagcctcacatggtcttctcgttcatcaaatggacgttaagacagcttttcttaatggagagctggatgaggagatctatatggatcagcctgatgggtttgtagttgaaggtcaagaaggcaaggctttaattagcgaagatgttgtcctgcagagcattcttgaaagaactcacctttgtgagcttgactgttggtcgtag

SEQ ID NO: 14825 - DNA, 4365 bp, Oryza sativa
  Clone ID: TFbOSC420023j.C1.o3.fg
atgtcggctccaacgccgcgtgtgtcgcggtcccgtgaaccgcaccagcgacgtatctcccgttcacctccacaccgtcgtggtcgccggcggcctggcgaagaccgtgaacttattccggtccagcgtgtggtgaaggaggtgggcggctcagccaactatccactgctgacgaagactaactacggagattgggctctcatgatgaaggtcatgctgcaagcgcgcggcctgtgggatgccgttgagcatggtgacgccgatttccaggcagatcgaatggcgatggaggccatactccgggcggtgccgccggagatgttagcttcactcgccgtcaagccctcggccaaggaggcgtgggacgcgatcaagacgatgcgagttggcgtcgatcgtgtccgcaagtcgaaggcgcaaatgctgcagaagcagtatgatgcgatggagttcaaggacggggagaccgtcgaggaattctcgttgcgcctcaacggactcgtcaccaacctcgccacgcttggagtccatcttgaagaaggaaaggtggttgaaaaatcccttaactctgttccagatcatctctcgcagatcgctttgtccattgagacgttgcttgacctcgatgagctcacgctcgaggaggtcaccggccggctccgaaacgctgaggagaagctgcctgcgaagagctctgctgccggtgggaaactgtttctcactgaggagcagtggactgcccggtggaaggagaaacaggccgcggaaagttcctctgggaaggcgaagtccggcggtggcaaccgtcgtcggcgtggtggtaagaagaaagctgaagctgctgcgcgcgatggagatcgtgccgggcgcgacacgcaggaagggcgggaaccaaaccgcgacaagtgccgcaattgcggccgcacggggcactgggctaaggactgccggcagcccaagcggcctgccgaggcccaccaggccctggcggatgaggacgatgacgagccggccctcctcatggcccatgtcgtcgacgctgctcttgtgtctgcgtcgtcttcatctgcgccacctgcttcttcgccgccatcgcagcctgacaagacgatcgagctcgtcgagccaaaggtgttcgcgcaccttctcacggagaaacaaaccgacggcggcgtctggcatctcgacaccggagcaacaaaccacatgacgggcattcgcgaagttttcgctgagctcgacctgtctgtgcggggctcggtgcgattcggcgacggctccgtcgtcggaattgagggtcgtggcaagatcatttttgagtgcaggaatcaggagcaccgagcgttgacgggggtgtattacatccctaaactcaacgccaacttgataagtttgggccagctcgatgaaaatgggtgcgacgtccgtatctaccacggtgtttgcacgatacgggacccggcggcccagctgctcgcacgcgttcggcggacgcggaatcgcctgtacttgatcaagctcaccattgggcaaccggtgtgcctcgcggccaaggcgcaggagtgcgcctggctgtggcatgcgcgctacggccacctccacttcgacgctctgcgacgactggcgagccgccacatggtgcgcggcatgcgcgacatcgatcatgtcgagcagctgtgcgacagctgcgtcatctctaagcagcgacgcacctcgtttccacgccgctccatgtttcgtgctaaggatcgccttgagctggtgcatggcgatctgtgtggtcccatctcgctggcaacccctggaggcaagactcatttcctcctgcttgttgatgatgcgagcaggtacatgtggatcactctgctgggacgcaagagcgaggcggctgatgccatcaagcgctttcaggcgcgagccgaggcggaatccaagcagaaactgcgcatcctccgcaccgacaacggtggcgagttcacctctgtggaattcgccacctactgcgctgaacagggagtctcacgccacttctccgcgccctactcgccacaacagaatggcgtggtggagcgccgcaaccaaaccatccttgggatggctcacagcttgttgaaagccaagaacatgccggcacgctattggggggaggctgtcactacggcagtttttctgctcaatcgcgcgccgacaaagagcttggccaacatgacaccttatgaggcgtggcatgggaagaagccggcggtgagttacctgcgcacgttcgggtgcctggcctatgtcaaggacgtgcggcctcacctccccaagctctctgactgcagcaagccgatggttctcatcggatacgccgacggagccaaggcgtacaaggtgttcgatccggtgtctggacgagtgcaggtctcgcgcgacgtgattttcgacgagggcgctgggtgggactgggatgcggcgggcgctgcagccgtccccggcggcggaggttgctcagacttcaccgtcgagtacctgacaacggccacatcaccgtcgcctttgacctcggcgccatcatctgcatcttcgggcgcttccgcgtcaagggcagtcacgccgtcgtccgcctcgacacccgccaccttggcgtcggcctcaacgcccgctacaccgacgttcgtctcaccgccaccaggcgtcgacgagaacctggacgcggagcaggatgattgtccactgcgttatcgcagtatgggtgatctactgggcaacgcacgtacgcctgggttcgcaacccgggatccggagaagggggagcttcatctccttgcggccgaggaaccagcctcgttcactgaggctgaacagcggcaggagtggaggcgggctatgctggatgaaatcgcctcaattgaggagaacaacacatggcgccttgtcgatctcccgtccggccatcgtgcaattggcctcaagtgggtcttcaagctcaagaaggatgcagaaggcagagtggcaaagcacaaggctcgcctcgtcgcgaaaggctatgtgcagcaacccggcatcgactttgaggaagtgttcgccctggttgcacggctggaatctgttcggctgttgctcgctcaggccgcgcaggcaggctggacagtgcaccatatggacgtcaagtccgcgttcctcaacggtgagctagccgaggaggtctacgtcaagcagccgcccggtttcgtcgaggaaggccgtgaacaccaagtccttcggcttgacaaggcgctgtacgggctgcgccaagcgccccgtgcgtggaactccaagctcgacgccaccctgctgtctctcggcttccggcagaacgactgcgaacatgcggtctatgttcgaggtaacaccagtgcacggttgctcgttggtgtttatgtcgacgatctaatcatcacagggacaaaggaggatgagatcgttcgattcaagggcgaaatgaaggcgttgttcaagatgagtgacctcgggcttctcagtttctacctgggtatcgaggtcgagcaggtggcgggcagcatacggctgtcacaggcagcgtacgcacgccgtatccttgagcgagcagggatgctgggatgcaacccgagcgccacgccaatggaacaacgcctcaagctcagcaaaaccagtgctgcggcgccggtgaaccccaactggtaccgtggcatcgttggctgtttgcggtatctggtacatacgaggccggatatcgcgttctcggtgggctacgtgagccgcttcatggaggcgcccaccaccgagcacgaagcggcggtgaagcgcatactgcgctatatcgccggcacgacggagttcgggtgtcactaccaccagtccagcagccccgttcagttggtgggatacagtgatgcggacatggccggcgacccagacacgcgcaagagtacgaccggtgttgtcttcttcctcgggacaagcccggtcagctggcaatccgtcaagcaaaaggttgtcgcgctttcgtcttgcgaggcggagtacatcgctgcgacaacggctgcatgccaaggcgtctggctctctcagttgctaggagaggtcaatcaagaagagccggacgcgttcaagcttctcattgataacaaatcagcaattgccctcagcaaaaatccggtgttccacgagaggagcaagcacatcgctacccgctaccactacattcgagaacgggtgggagatggctccgttcatgtcgagttcgtcaggactgaagggcagattgcagacattttgaccaaggcacttgggcgcacacgttttcaggagcttcgctcccgcattggcgttgccgacgtcaaattcaggtgcaagacttag

SEQ ID NO: 14826 - DNA, 3699 bp, Oryza sativa
  Clone ID: TFbOSC6395j.C1.o2.fg
atgtggggcctacataaatcatatcctccccctctctttctcttcgtgagcgttggacgggagctagcggcggtggccggcgcctcctccaactccatccacagcctcctcctcccctttcccgcggcgtcgttgctggcggcggcggtgcatcagcccgcaagcggcggagacccgggagtggcactggagcggcgacagcgacgtgcgcgcgagggccatagcggcggcggcggcggagatcgaggccgccgtggaaggttggctgttggaaggaagaaaacgagccatgagaacggccgcgtcctcgccaccctcggccccgccaccgcactatccaccgctgcgctcgacgccctctctgccggccacgacgcacctgcctccgcagttctcccgccgtgcccacgaacacgtaagggccgcctgcgtctcgccaccgcgactcacgtcggcatcctctcgaagatggcggcattcggcggtggcttcttctgcacctgcggcggcagcgttgaaggttccggcggccgcgcctcgggcagcggcgggagcgaccgcgggctggtgatccaccgcgtggtcaaggaagcaggaggtgcagcgaactacccgctgttgacaagaaccaactacaacgattggtctttgctgatgaagatcaaactgcaagcccggtgcctgtggggcgccatcgatccaggcggcgtcgagcttcatgaggataggatggcgcttgacgccatttgcagcgcggtgccccccgagatgatctcgaccttggccaccaaggcctcggccaaggaggcatgggattgcatcaggatcctgcgagtcggcgacgaccgaattcgcaaagcaagcgcacagaaggtgcgcatggagtacgagtcgctcgtccttcgcgacggtgagaccgtggaggacttcgccatgcgcctgacctccaccgtcaatcaactcgcgacgctcggcgatcccgagccggcagacaaggtcgtcgagaagtacctgcgcgtcgcccgtcccaggttcacccaactcgtcctttccattgaaactctccttgatatctctacactgtccctggaggaggtgaccggcagactcaaggcagctgaggacgccatgccattgccatcttcgtcctcagacaacgccggcaagctctacctcaccgaggaagaatggctagagcgccacaataaaaaggagcaggaggcaaagaagaactcaggcagcccaagcaaccgtggcaagcggcgaggcggcaaaggccgcaacggcggcggcgctggagtcggcggcgcgaagaatacgaactccggagcggcccgtcgtgaagacaaatgccgcaactgtggcaaatacggccactgggccaaggattgcaggagcaagcccaagcgggatgaacaggcccacgtggcacaagacgacgagcccaccttgcttctcctcacaggaggagtaatcacacatgcatgtgaacaggagcatgcaccagcgccgtctgcgccaactccgtcatccgatcccatctacctggaggaaaagaagctgttcgcggcgctcgacgacgccgcgaagcgtgatccgggccgctggattgtggactccggcgcctccaaccacatgaccggctgccggacggccttctccgacattgacacaggcatcaccggcaacgtccgactaggagacggctccgtcgtccgaatcgaagggcgaggcaccgtgctcttctcctgtaagaatggggagcatcgaaccctctccaacacctacctcattccacgcctcgctgctaacatcattagtgtcgggcagctagacgagaccggtttcaaggtggaggccgaggatggcgttatgcggatatgggatgagcagcggcgcctgcttgcccgtattcaccgcaatcctggacgtctctacgtcctcgacgtcgagctcgcgcgcccggtctgccttacggcacgcatcggcgacgaagcatggaagtggcatgcacggttcggccacattaacttcactgcgctgcggaaaatgggcagagagcagctagtgcgcggtcttccggctgtgtcgcaagttgaccagctttgcgaggcttgcctcgccggcaagcaccgtcggacgccgttcccacagcaggctcaacagcgctccctggagccgctccaactactccacggcgacctctgcggcccgatctcgccaccaactccgagcgacaaccggtcgtcatccaaaagtattggtgggaagacaccatacgagctgtggaacggatcgccgccggccgtccaccacctgcggacgttcgggtgtttggcacacgtcaagaccaccacgccgaatgtcaagaagctcgacgacaggagtaaacccatgatctttgtgggttatgagccggggtcgaaggcgtatcgctgctacgaccctgcctctcggcgcgtgcacatctcacgtgacgtcgcattcgacgaagaggcgcaatggaggtgggacggcgagacggcgagtgagctggacttcaccatcgagtacaccactgtgtaccacccagctgtggtgaacgcgccacgagctgactcggagcagccagagctgccgactccgtccgcgacatcgacaagtccatgcacacctgccgccacggcgggcacaactgcgacatcggcggaattcgcgactccaccaaccatcgccgcggacgacctcgacgccgatcatgatgatgctccgcttcggttccgccgcgtcgacgagatattaggaccggcgaccccgccgggactggctgtgcgcgagttcgatgacgaactcatgatggcaagtgctgaagagccagcgtctctcgccgaggcgcaacagcaagactgttggcgtcaagctatgctggatgagatgaaatcaattgaagaaaacggaacctggctgctcgtcgatcccccacctcgccagcggcccataggactcaagtgggtcttcaagacgaagaaagacgctgccggcaacatcaccaagcacaaagcgcggctcgtcgcaaaaggatacgtgcagcggcagggaatcgactacgacgaagtgtttgccccagttgcacggctcgagtcggttcgcttgctgctggcgtacgcggcgagcgaaggttgggccgtccatcatatggacgtgaaatcagcgttcctcaacggcgagctcaaggaggaagtctacgtcgcgcagccgcccggtttcgtcgtcgacggcaaggaacagaaggtgctgcgcctggtgaaggcgttgtatggacttcgtcaagccccgcgtgcatggtacaccaagctcgacgcgtcgctgctgtcacttgggttccatcgcagtgcctcagagcacgctgtgtacatgcgcggagctaacgcacgtcgactggtggtcggggtgtacgtcgacgaccttgtcatcaccggcggcaaccactccgagcttgatcaattcaagaaggagatgcgggagacgttccagatgagcgacctcgggctacttcggtactatcttggcctggaggtgagtcagaccgacgagggcatcaccctgagccagggtgcgtacgccaagaagatacttgaggcagcaggcatggttggatgcaacccgagccagactccaatggagccacgcctcaaactcacttgtttgtcgatcacttag

SEQ ID NO: 14827 - DNA, 4857 bp, Oryza sativa
  Clone ID: TFbOSC900286j.C1.o13.fg
atgtggggcctacataaatcatatcctccccctctctttctcttcgtgagcgttggacgggagctagcggcggtggccggcgcctcctccaactccatccacagcctcctcctcccctttcccgcggcgtcgttgctggcggcggcggtgcatcagcccgcaagcggcggagacccgggagtggcactggagcggcgacagcgacgtgcgcgcgagggccagagcggcggcggcggcggagatcgaggccgccgtggaaggttggctgttggaaggaagaaaacgagccatgagaacggccgcgtcctcgccaccctcggccccgccaccgcactatccaccgctgcgctcgacgccctctctgccggccacgacgcacctgcctccgcagttctcccgccgtgcccacgaacacgtaagggccgcctgcgtctcgccaccgcgactcacgtcggcatcctctcgaagatggcggcattcggcggtggcttcttctgcacctgcggcggcagcgttgaaggtgggaggagcagcgcgggtgagggaggcggcggtaccaccgatggacgtggtcagcatgccgagccggccgacaacggcactgttggaaataaaccttacacgatgtatctaggaaacctgacaagtggtatcagagctcggttcagagcgtggacgcgagatcgcgctcttgagggtgtcttcatgcctcgaggacgcacgcactccccgcgccggcggtcggcgtcaccgtccgtgcatgtttcaggttccggcggccgcgcctcgggcagcggcgggagcgaccgcgggctggtgatccaccgcgtggtcaaggaagcaggaggtgcagcgaactacccgctgttgacaagaaccaactacaacgattggtctttgctgatgaagatcaaactgcaagcccggtgcctgtggggcgccatcgatccaggcggcgtcgagcttcatgaggataggatggcgcttgacgccatttgcagcgcggtgccccccgagatgatctcgaccttggccaccaaggcctcggccaaggaggcatgggattgcatcaggatcctgcgagtcggcgacgaccgaattcgcaaagcaagcgcacagaaggtgcgcatggagtacgagtcgctcgtccttcgcgacggtgagaccgtggaggacttcgccatgcgcctgacctccaccgtcaatcaactcgcgacgctcggcgatcccgagccggcagacaaggtcgtcgagaagtacctgcgcgtcgcccgtcccaggttcacccaactcgtcctttccattgaaactctccttgatatctctacactgtccctggaggaggtgaccggcagactcaaggcagctgaggacgccatgccattgccatcttcgtcctcagacaacgccggcaagctctacctcaccgaggaagaatggctagagcgccacaataaaaaggagcaggaggcaaagaagaactcaggcagcccaagcaaccgtggcaagcggcgaggcggcaaaggccgcaacggcggcggcgctggagtcggcggcgcgaagaatacgaactccggagcggcccgtcgtgaagacaaatgccgcaactgtggcaaatacggccactgggccaaggattgcaggagcaagcccaagcgggatgaacaggcccacgtggcacaagacgacgagcccaccttgcttctcctcacaggaggagtaatcacacatgcatgtgaacaggagcatgcaccagcgccgtctgcgccaactccgtcatccgatcccatctacctggaggaaaagaagctgttcgcggcgctcgacgacgccgcgaagcgtgatccgggccgctggattgtggactccggcgcctccaaccacatgaccggctgccggacggccttctccgacattgacacaggcatcaccggcaacgtccgactaggagacggctccgtcgtccgaatcgaagggcgaggcaccgtgctcttctcctgtaagaatggggagcatcgaaccctctccaacacctacctcattccacgcctcgctgctaacatcattagtgtcgggcagctagacgagaccggtttcaaggtggaggccgaggatggcgttatgcggatatgggatgagcagcggcgcctgcttgcccgtattcaccgcaatcctggacgtctctacgtcctcgacgtcgagctcgcgcgcccggtctgccttacggcacgcatcggcgacgaagcatggaagtggcatgcacggttcggccacattaacttcactgcgctgcggaaaatgggcagagagcagctagtgcgcggtcttccggctgtgtcgcaagttgaccagctttgcgaggcttgcctcgccggcaagcaccgtcggacgccgttcccacagcaggctcaacagcgctccctggagccgctccaactactccacggcgacctctgcggcccgatctcgccaccaactccgagcgacaaccggtactttctccttctcgtcgatgattacagctgtttcatgtggttgtcactgctcccctccaaggatggggcggcggcagccatcaagcgcatccaagccgcggctgaacgcaagagcggcaagaagctacgtgctcttcgcacggataggggggagagttcctggtccaccacttcgcggattactgcgccgagctgggagtccgacgcgagacgacggcgccctactcgccgcaacaaaacggcgtcgtggaacgtcgcaaccaatcggtggtcgggacggcgcggagcatgctcaaagccaaagggctgccagaccaccacgccgaatgtcaagaagctcgacgacaggagtaaacccatgatctttgtgggttatgagccggggtcgaaggcgtatcgctgctacgaccctgcctctcggcgcgtgcacatctcacgtgacgtcgcattcgacgaagaggcgcaatggaggtgggacggcgagacggcgagtgagctggacttcaccatcgagtacaccactgtgtaccacccagctgtggtgaacgcgccacgagctgactcggagcagccagagctgccgactccgtccgcgacatcgacaagtccatgcacacctgccgccacggcgggcacaactgcgacatcggcggaattcgcgactccaccaaccatcgccgcggacgacctcgacgccgatcatgatgatgctccgcttcggttccgccgcgtcgacgagatattaggaccggcgaccccgccgggactggctgtgcgcgagttcgatgacgaactcatgatggcaagtgctgaagagccagcgtctctcgccgaggcgcaacagcaagactgttggcgtcaagctatgctggatgagatgaaatcaattgaagaaaacggaacctggctgctcgtcgatcccccacctcgccagcggcccataggactcaagtgggtcttcaagacgaagaaagacgctgccggcaacatcaccaagcacaaagcgcggctcgtcgcaaaaggatacgtgcagcggcagggaatcgactacgacgaagtgtttgccccagttgcacggctcgagtcggttcgcttgctgctggcgtacgcggcgagcgaaggttgggccgtccatcatatggacgtgaaatcagcgttcctcaacggcgagctcaaggaggaagtctacgtcgcgcagccgcccggtttcgtcgtcgacggcaaggaacagaaggtgctgcgcctggtgaaggcgttgtatggacttcgtcaagccccgcgtgcatggtacaccaagctcgacgcgtcgctgctgtcacttgggttccatcgcagtgcctcagagcacgctgtgtacatgcgcggagctaacgcacgtcgactggtggtcggggtgtacgtcgacgaccttgtcatcaccggcggcaaccactccgagcttgatcaattcaagaaggagatgcgggagacgttccagatgagcgacctcgggctacttcggtactatcttggcctggaggtgagtcagaccgacgagggcatcaccctgagccagggtgcgtacgccaagaagatacttgaggcagcaggcatggttggatgcaacccgagccagactccaatggagccacgcctcaaactcagtaagttgagcacatctccttgcgtggatgcaactgattacaggaaaattgttgggtcgctgcgctatttggtgaactcgagaccggacttggcgttctcagtgggttatgtgagtagattcatggagaaacccactaccgagcatctggcagccgtgaaacgtgtgctgcgctatgtcgccggcaccatcaatcgcggctgtagctaccggaggaagaaaggagctgttcatctagttggattcagtgacagcgatctcgccggcgacgtcgacacgcggaaaagcaccaccggtgtcttcttcttcctcggtgacaacttgattacctggcaatctcagaagcagaaggttgttgccttatcatcctgtgaagcggagtacattgcggcgacaacagctgcttgccagggtgtgtggctggcgcgtcttcttgccgagctcaagggagaagaagccgacgccgtcacactcaatgtcgacaatcagtcggcaattcaactcagcaaaaaccctgttttccacgatcgcagcaagcatatagagaccagatatcactacatcagagaatgcattgaggaggacagggtgaagatcgagttcgtcagtacaaacgatcaactggcggacattctgacgaagtcacttgggcgtgatcggttcaatgaactgtgcacaaggattggcctcgtcgaagttaaagggacgtgcaaggtttag

SEQ ID NO: 14828 - DNA, 3861 bp, Oryza sativa
  Clone ID: TFbOSC400275j.C1.o2.fg
atggcttctactggagagaacagaggagacaacatcaacggaggcaatacgactacctcaaaatccagcggtgggacgttctcggggtatattttcattctcccgattctattagatgtttctttgttaatactcttcgcaatggcagcattgcgttactatgtaaatgttgatgcttatttcatattaagcatgctcaagttgtatacatctagcactgtcactagatttactcatattgcaaatgtcatgtttattgtcttaatattttggattaaaatatgccgaattataaccaaatttccaacaatccaaaaacttgataggtcttttttggtagttagctttgctgcatcactaaaaccacatgctttcgatggttcaaattataaaaaatggaaagcacgtgcacttttgtggttgacggtgatgcaatgtttctttgtttcacggggcaaaccgagtgaaccgcctctcttccctgaggaggaggctaagttcgaggctacggattgcttgttccgtggagcattgatcagtgtgctcgccgatagtattgtggatgtgtatatgcacatgccttcagggaaggacatgtgggatgctcttgaggccaagttcggggtttccgacgtcgacagcgagctgtatgtcatggagcagttctatgactacaagatggtcgatgactgttctgtagtgggacaggctcatgagaatcagatgttggcaaaggaacttgagaacaacaactgtgagttgccggacaagtttgtggcaggtggcattattgccaaattgccaccttcttggacggactttgctacttctctaaaacacaagaggcaagagttcagtgttactgatcttattggctctttgagtgttgaggagaaggcgagggcacaggacaaccggggcaaaaagatcgagggaggttctagcgccaatttggtgcagaagaagaaccctcacgcatcccacaacaacaacaagaaagtcaaacctgacgtcaaacccaaggctacaaccaattttaagaagaaaggcaagggaaaggcaaaaggagattgctttgtgtgtggcaagcctgggcattgggccaaggattgtcctgagcgcaaggacaagaagtctgcaaacatggttattagtgagggcggaggaacattggggtatggtaaatttttacctacagttctctctgtctgtcactcacttgattggtgggttgatactggtgctaatattcatgtgtttgcggacatttccctattttcttcttatcaagttgggagaggttcctccttgttgatgggaaacggatcgcttgtggctgttcatggtgttggtacggtcgatctgaagtttacttcgggaaagatcgtgcagctgaagaacgtgcagcatgtcccttcaataaagaagaatctagttagcggctctctactgtgtagagatggttttagacttgtgtttgaatccaataaatgtgtcgtatctaaatatggaacgtttattggaaaaggttatgatagcggaggtttgtttcgcttttccttggatgatatgtgtaataaagttgtgaaccatgtaagcgatgatgatgatgagtccaatgtgtggcattcgcaactttgccatgtgaattttggttgtatgacacgcttagccaacatgagtttaattccaaaattcactttagtcaaaggctctaagtgccatacttgtgttcaaacgaaacaacctcgcaagcctcacaagtcatctgaggcgaggaagttggcaccactagaaattgttcattccaatctgtgcgaaatgaacggcgtgttgactaaagggggaaagaaatatttcatgacactgatagatgattgcactagattctgctacgtgtacctattgaaaacaaaggatgaagtattacattactttaagatctataaggctgaggtagaaaaccaactggaaaggaaaatcaaacggttaaggtctgataggggtggagagtatttttccaatgagtttacttctttctgcaaagagtatggaattattcatgagaggacgcattcctattcaccccagtcaaacggggtagccgaaagaaagaaccgcactctaactgagatggtgaatgccatgttagacactgcaggactttccaaggaatggtggggtgaggcaatattgactgcgtgtcatgtcctgaatagaattcctactaagcataaggaagtaacatcattcgaggaatgggaaaggaagaaattaaatctctctcacctgcgcacatggggctgtttggccaagagatgccacatttttgagaatgaatttcctatgaaaaatgcacctagcacttctagtcaagaacctattttatcccctgagcactttgtgctgatagaacacattgatcaaacgcttgaggaaaattctgaggagaataacattgtagcaactcgaaagagtaagagacaaaggactgcaaagtcttttggagatgactacattgtatatcttgtggatgatactccaagaaccattgaagaggcatattcatctcctgacgttgactattggaaggaagcggtacgcagtgaaatggactcaattatgtctaatggtacttgggaagtcatcgagtgtccatatgggtgcaagcctgtaggatgcaaatgggttttcaagaaaaagcttaggcctgacgcctctcatggtctactcgtccatcagatggatgttaagacagctttcctcaatggagagttggaggaggagatctatatggatcaaccagatgggtatgtactagaaggtcaggagggaatggtatgcaagctgttgaagtccttgtatggtctcaaacaagcgcctaagcaatggtatgagaagtttgacaatacacttacatctactggctttgttgtgaacgaagctgacaaatgtgtgtactatcgtaatggtgggggagagggagtgatcttgtgtttatatgtcaatgacatattgatctttgggaccagcctcaatgtgattgaagaggtcaaggactttctgtccaaaagctttgaaaagaaggatttgggagtggctgatgttattcttaacattaaactactgagaggagatgagggtcggattacacttgtgcaatctcactatgtggacaaggtcttgagtcgctttggttatagtgactgcaaggcagctcctactccttatgatcctagtgtgctattaaggaaaaaccgaagaatagcaagggatcaattgagatactcccagatcattggttcattgatgtacttagctagtgcaacgaggcctgacatctcatttgctgtgagcaagttgagccggtttgtttcaaatccgggagatgatcattggcatgctcttgaaagagtaatgcgctatctaaaagggacaatgagctatggaattcactatgccgggtacccaaaagtgctggagggctatagtgattcaaactggatatctgatgctgatgagataaaggccacaagtgggtatgtgttcacacttggaggtggcgctgtttcctggaagtcttgcaagcagatcatcttaacgaggtcaacaatggaaacagagctcacagctttagatactgccacagttgaggccgaatggcttcgtgagctcctgatggacttgccggtggttgaaaaaccaataccagcaatcctgatgaactgtgataatcaaacagtgattattaaagtaaacagttcgaaggacaacatgaagtcatccaggcatgttaaaagaagactgaagtctgtcagaaagcagaaaaactccagagtgatagcattggactatgtctag

SEQ ID NO: 14829 - DNA, 2073 bp, Oryza sativa
  Clone ID: TFbOSC400888j.C1.o10.gm
atggaggatgtagcagaagtggaccttgcggaccctaacccggacatactgctcctccgaaattccgtccgcttgagaacttgcacgggtaggcgggcgatcaagtttctgttcacctgcgcgcacagcgcttcaagcgcgactgctcctgttcttcgtgactactactactgcatcgacgccttcgtcaacatgtcgacggagattggagacaaggaggaggaagataagttcgaggctacggattacttgttccgtgaagcattgatcagtgtgctcgccaataatattgtggatgtgtatatgcacataccttcagggaaggacatgtggggtgttcttgaggccaagttcgaggctcatgagattcagatgctgataaaggaacttgagaacaaccactgtgagttgccggacaagtttgtggctggaggcattattgccaaattgccaccttcttggtcggactttgctacttctctaaaacacaaaaggcaagagttcagtgttactgatctcattggctctttgggtattgaggagaaggcgagggcaaaggacaaccggggcaaaaagatcgagggaggttctagcgccaatttggtgcagaagaataaccctcacgcatcccacaacaacaacaagaaagtcaaacctgacgtcaaacccaaggctacaaccaattttaagaagaaaggcaagggaaaggcaaaaggagattgctttgtgtgtggcaagcctgggcattgggccaaagattgtcctgagcgcaaggacaagaagtctgcaaacatggttattagtgaggaaggaggaacattggggtatgcctctcatggtctactcatccatcagatggatgttaagacagctttcctcaatggagagttggaggaggagatctatatggatcaaccagatgggtatgtactagaaagtcaggagggaatggtgtgcaagctgttgaagtctttgtatggtctcaaacaagcgcctaagcaatggcatgagaagtttgacaatacacttacatctgctggctttgttgtgaacgaagctgacaaatgtgtgtactatcgttgtggtgggggagagggagtgatcttgtgtttatatgtcgatgacatattgatctttgggaccagcctcaatgtgattgaggaggtcaaggactttttgtccaaaagctttgaaatgacggatttgagagtggctgatgttattcttaacattaaactactgagaggagatgagggtgggattacacttgtgcaatctcactatgtggacaaggtcttgagtcgctttggttatagtgactgcaaggcagctcctactccttatgatcctaggacaatgagctatggaattcactacgccgggtacccaaaagtgctggagggctatagtgattcaaactggatatctgatgctgatgagataaaggccacaagtgggtatgtgttcacacttggagaatccttccctggttctgttcacctgcgcgcacaggtgtatgggacgagcaggtgcctccgaaactccgtccgcttgagaacttgcacgggtaggcgggcgatcaagtttttgggtagcgcttcaagtgcgactgctcctgttcttcgcgactactattattgcatcgacgccttcgtcaacatgtcgatggagattggagacaaggaggtgaacgacatcaacggaggcaatactgcctcaaaatccagcggtgggacgttcttaggggagatcttgctctccggacgcaaatttacttgggccaactctatgccgagcccaacttacaaaaacgccgcctccgcgtcagcccgtgcgccgccgtcgctgccgcgagtccagccaagcgccgccgctgctccagtcaccgccgtcgctccggaaggccatcgccaggttcgcaaggtcgccaccgtcctcatcccgtcctccgtttctgccaaagactgccggagcgccgccgccatcgacgacccgaagaccgccgccgcctcgacctcgctgccgtcgtcgtccaagccaccggtgagttgtcgcgtcgcgctttacgcgtag

SEQ ID NO: 14830 - DNA, 2820 bp, Oryza sativa
  Clone ID: TFbOSC400977j.C1.o5.fg
atgtcgacggagattggagacaagatgatgaacgacatcaacggaggcaatactgcatcaaaatccggcggtgggacgttctcggggtatactttcattctcccgattctattagatgtttctttgttaatactcttcgcaatggcagcattgcgttactatgtaaatgttgatgcttatttgatattaagcatactcaagttgtatacatctagcactgtcactagatctactcatattgcaattgtcatgtttattgtcttaatattttggattaaaatatgccgaattgtgaccaaatttccaacaatccaaaaacttgataggtctttttcggtagttggctttgctgcatcactaaaaccacatgctttcgatggttcaaattataaaagatggaaagcacgtgcacttttgtggttgacggtgatgcattgtttctttgtctcacggggcaaaccgagtgaaccgcctttctctcctgaggaggaggctaagttcgaggctacggattgcttattccatggagcattgatcagtgtgctcgccgataatattgtggatgtgtatatgcacataccttcagggaaggacatgtgggatgctcttgaggccaagttcggggtttccgacgccggcagcgagctgtatgtcatggagcggttttatgactacaagatggtcgatgaccgttctgtagtggaacaggctcatgagattcagatgctggtaaaggaacttgagaacaacaactgcgagttgccggacaagtttgtggctggaggcattattgccaaattgccaccttcttggtcggactttgctactcctctaaaacacaagaagcaagagttcagtgttgctgatcttattagctctttaggtattgaggagaaggcaagggcaaaggacaaccggggcaaaaagatcgagggaggttctagtgccaatttggtgcagaagaagaaccctcacgcatcccacaacaacaagaagaaagtcaaacctgacgtcaaacccaaggctacaaccaattttaagaagaaaggcaagggaaaggcaaaaggagattgctttgtgtgtggcaagcctgggcattgggccaaggattgtcctgagcgcaaggacaagaagtctgcaaacatggttattagtgagggcgaagaaacattggggtatggtaaatttttacctatagttctctctgtctgtcactcacctgattggtgggttgatactggtgctaatattcatgagtgtgcggacatttccctgttttcttcttatcaagtcgggagaggttcctccctgttgatgggaaacggatcgcttgcggctgttcatggtgttggtacggtcgatctgaagtttacttcgggaaagatcgtacagctgaagaacgtgcagcatgtcccttcaataaagaagaatctagttagcggctctctactgtgtagagatggttttagacttgtgtttgaatccaataaatgtgtcgtatctaaatatggaatgtttattggaaaaggttatgatagtggagggggaaagaaatatttcatgacactgatagatgattgcactagattctgctatgtgtacctattgaaaacaaagaatgaagcattacattactttaagatccataaggctgaggtagaaaaccaactggtaaatgtacctatagccaaaaagcgtaaacttggaccaaagatcgtagattgcgtgttccttggttacgctatccacagtatgggatataggttcttaatagtaaattctggagttcccgacatgcgtgttggtacaattactgagtccagagatgccacattttttgagaatgaatttcctatgaaaaatgcacctagcacttctagtcaagaacctattttatcccctgagcactttgtgccgatagaacacattgatcaaacgcttgaggaaaatcctgaagaggataacattgtagcaactcgaaagagtaagagacaaaggactgcaaaatcttttggagatgactacattgtatatcttgtggatgatactccaagaaccattgaagaggcatattcatctcctgacgctgactattggaaagaagcgatacgcagtgagatggactctatgtctaatggtatttgggaagtcgtcgagcgtccatatgggtgcaaacctataggatgcaaatgggttttcaagaaaaagcttaggcctgatgcctctcatggtctactcatccatcagatggatgttaagacagcttttctcaatggagagttggaggaggagatctatatggatcaaccagatggatatgtactaaaaggtcaagagggaatggtgtgcaagctgttgaagtccttgtatggtttcaaacaagcgcctaagcaatgtcatgagaagtttgacaatacacttacatttgctggctttgttgtgaacgaagctgacaaatgtgtgtactatcgctatggtgggggagagggagtgatcttgtgtttatatgtcgatgacatattgatctttgggaccagcctcaatgtgattgaggaggtcaaggactttctgtccaaaagctttgaaatgaaggatttgggagtggctaatgttattcttaacattaaactactgagaggagatgagggtgggattacacttgtgcaatctcactatgtggacaaggtcttgagtcgctttggttatagtgactgcaaggcagctcctactccttatgatcctagtgtgctattaaggaaaaacagaagaatagtaagggatcaattgagatactcccagatcattggttcattgatgtag

SEQ ID NO: 14831 - DNA, 1488 bp, Oryza sativa
  Clone ID: TFbOSC401614j.C1.o8.gm
atggtgaaacaatttgtgtcgaatgccttggttgccacaaggagggcattaacagagggaatggtgtacaggacgagcaggtacctccggaactccgtccgcttgagaacttgcacgggtaggcgggcgatcaagtttttgggtagcgcttcaagcgcgactgctcttgttcttcgcggctactgctgctgcatcagcgccgtcaccaagatgtcaacggagattggagacaagaagatgaacgacatcaatggaggcaatactgcctcaaaatccagcaatgggactttctcgggtgtgctcgccgataatattgtggatgtgtatatgcacataccttcagggaaggacatgtgggatgctcttgaggccaagttcagggtttccgacgccggcagcgagctgtatgtcatggagcagttctatgactacaagatggtcgatgaccgttctgcagtggaacaggctcatgagattcagatgctggtaaaggaacttgagaacaacaactgcgagttgccggacaagtttgtggctggaggcattattgccaaattgccaccttcttggtcggactttgctacttctctaaaacacaagaggcaagagttcagtgttactgatctcattggctctttgggtattgaggagaaggcgagggcaaaggacaaccggggcaaaaagatcgagggaggttctagcgccaatttggtgcagaagaagaaccctcacgcatcccacaacaacaacaagaaagtcaaacctgacgtcaaacccaaggctacaaccaattttaagaagaaaggcaagggaaaggcaaaaggagattgctttgtgtgtggcaagcctgggcattgggccaaggattgtcctgagcgcaaggacaagaagtctacaaacatggttataagtgagggcggaggaacattggggtatgtcgtcgagcgtccatatgggtgcaagcctataggatgcaaatgggttttcaagaaaaagcttaggcctgatggtacaattgaaaagtacaaggcaaggcttgtggccaaggtctctcatggtctactcgtccatcagatggatgttaagacagctttcctcaatggagagttggaggaggagatctatatggatcaaccagatgggtatgtactagaaggtcaggagggaatggtgtgcaagctgttgaagtccttgtatggtctcaaacaagcgcctaagcaatggcatgagaagtttgacaatacacttacatctgctggctttgttgtgaacgaagctgacaaatgtgtgtactatcgctatggtgggggagagggagtgatcttgtgtttatatgtcgatgacatattgatctttggaaccagcctcaatgtgattgaggaggtcaaggactttctgtccaaaagctttgaaatgatggatttgggagtggctgatgttattcttaacattaaactactgagagtcactatgtggacaaggtcttga

SEQ ID NO: 14832 - DNA, 3962 bp, Oryza sativa
  Clone ID: TFbOSC401949j.C1.o16.np
cgacaacaccaacggaggcagttctgcctcacaatccagcggagggacctttacagggtcattttcggtagttgactttgctgcaacactgaaaccgcatgcttttgatggttcaaattataagaggtggaaagcacgtgcactattgtggttgacagcgatgcaatgtttctatgtttcacggggtaaacgaagtgaaccacctctctctcctgaggaagaggttaagttcgaggcttcggattgcctgttccgtggagcattgatcagtgtactcgctgacaatatagtggatgtgtatatgcacatgccttcagggaaggacatgtgggatgcacttgaggccaagttcggagttttcgacaccggcagcgagctgtatgtcatggagcagttctatgactataagatggtcgatgaccgttctgtagtggaacaagctcatgagattcagatgctggctaaggaacttgagaacaacaactgtgagttgccggacaagtttgtggcgggtggcattattgccaaattgccaccttcttggtcggactttgccacttctctaaagcacaagagacaagagttcagtgttattgatctcattggctctttgggtgttgaggagaaggcgagggcaaaggacatctggggcaaaaaggtttagggaggttctagtgccaatatggtacagaagaagaaccctcacgcatcccacaacaacaagaaagtcaagcatgatgtcaaacccaaggctacaaccaattttaagaagaaaggcaagggaaaggcaaagggagactgctttgtgtgtggcaagcctgggcattgggccaaggattgtcctgagcacaaagacaggaagtctgccaacatggtcattagcgagggcggaggaacatcggggtacggtaaaattttacctacagttctctctgtttttcattcacctgattggtgggttgatacgggtgctaatattcatgtatgtgctgatattttcctgttttcttcttatcaggtcgggagaggttcctccttgttgatgggaaacgggtcgcttgcggctgttcatggtgttagtatggtcgatctgaagtttacttcgggaaagactgtgcagctgaagaacgtgcagcatgtcccttcaataaagaagaatctagttagtggctctctactgtgtagagaaggttttaaacttgtgtttgaatccaataaatgtgtcgtatctaaatatggaacttttattggaaaaggttatgacagcggaggcttgttccgcttttctttggatgacatgtgtaataataataatgttgtgaaccatattaacgagaatgatgagtccaatgtgtggcattcacgactttgtcatgtgaatttcggttgtatgacgcgcttggctaacatgagtttaaatccaaaattcactttggtcaaaggttccaagtgccatacttgtgttcaatcgaaacaacctcgcaagcctcacaaggcatctgaggcgaggaatttgcacctctagaacttgttcattccgatctgtgcgaaatgaatggcgtgttgactaaagggggaaagaaatatttcatgacactaatagatgattgcactagattttgttatgtgtatctattgaaaacaaaggatgaagcattgcattactttaagacctataaagctgaggtagaaaagcaacttaaaaggaaaatcaaacggttgaggtctgatagggatggagagtatttttctaatgagtttacatccttttgcgaagagtttggaattattcatgaaaggatgcctccctattcaccccaatcaaatggggtagccgaaagaaagaaccgtactctaactgagatggtgaatgccatgttagacactacgggactttccaaggaatggtggggtgagacagttttgactgcttgtcatgtcctaaataaaattccaatgaagcataaggaagtaacaccattcgaggaatgagaaaggaagaaattaaatctctcatacctacgaacatggggctgtttggccaaggtaaatgtacctatagccaaaaagcgtaaacttggaccgaatactgttgattgtgtgttccttggttatgctattcacaacgtgggttatagattcttaatagtaaactctggagtacccgacatgcgagttggtacaattattgagtccagagatgccacattctttgagaatgaatttcccatgaaaatacacctagcacttctagtcaagaaactgtcataccccatgagcactttgcaccgatagaacacaatgatcaaacgcctgagggaaatcttgaggaggataacattgtagatactcgtaagagtaagagacaaagggttgcaaaatcctttggagatgactacattatataactcatggatgacactccaaaaaccatagaagaggcatacttatctcctgacgctgactactggaaggaagcaatacgcagtgagatggactcaattatgtctaatggtacttaggaagtcgttgagcgtccatatgggtgcaaacttgtaggatgcaaatgggttttcaagaaaaagcttaggcttgatggtacaattgaaaagtacaaggcaaggcttgtggctaagggttatacccaaaaagaaggcgatgattttttcgacacctactcacccgttgcccgtttgaccacgattcgagtactacttgtcctggcagcctcttatggtcttctcgtccatcagatgggcgttaagacagcttttctaaatggagagcttgaggaggagatctatatggatcaaccagacgggtatgtactagaaggtcaggagggaatggtgtgtaaattgttgaaatccttgtatggccttaagcaagcacctaagcaatggcatgagaagtttgacaccacacttacatctgctggctttgttgtgaacgaagctgacaaatgtgtgtactatcgctatggtgagggagaaggagtgatattgtgtttatatgtcgatgacatattaatctttgggaccagcctcaatgtgattgaggaggtcaaggactttctgtccaagagctttgaaataaaggatttgggagaggctgatgttattcttaacattaagctactgagatgagatgagggtgggattacacttgtgcaatcccactatgtagataaggttttgagtcgctttggctacagtgactgtaagccagctcctactccttatgatcccagcgtgctattaaggaaaaaccgaagaatagcaagggatcaactgagatactcacaaatcattggttcattgatgtacttggctagtgcaacgaggcctgacatctcatttgctgtaagcaagctgagccggtttgtctcaaatccgggagatgatcattggcaggctctggaaagagtaatgcgctatctaaagggcactatgagctatggaattcactataccggttacccaaaagtactggaagggtatagtgactcaaactggatatctggtgctgatgagataaagaccacaagtggatatgtgttcacacttggaggtggcgctgtttcctggaagtcttgcaagcagaccatcttaacgaggtcaacaatggaagcagagcttacaacaccagatactgcgacagttgaggccgagtggcttcgtgaactcctgatggatttgccggtagttgaaaaaccagtgccagctatcctaatgaactgtgataatcaaacagtgattattaaagtgaacagttcaaaggacaacatgaagtcatctaggcatatcaaaagaagactgaaatctgtcagaaagcagaaaaactccggagtaatagcattggactatgtccaaacggctaaaaatctggcagatcagtttaccaaggggctaccacgtaatgtgatagacagtgcatcaagagaaatgggcttgatacccacc

SEQ ID NO: 14833 - DNA, 3138 bp, Oryza sativa
  Clone ID: TFbOSC413551j.C1.o1.fg
atgttggcaaaggaacttgagaacaacaactgtgagttgccggacaagtttgtggcaggtggcattattgccaaattgccaccttcttggacggactttgctacttctctaaaacacaagaggcaagagttcagtgttactgatcttattggctctttgagtgttgaggagaaggcgagggcacaggacaaccggggcaaaaagatcgagggaggttctagcgccaatttggtgcagaagaagaaccctcacgcatcccacaacaacaacaagaaagtcaaacctgacgtcaaacccaaggctacaaccaattttaagaagaaaggcaagggaaaggcaaaaggagattgctttgtgtgtggcaagcctgggcattgggccaaggattgtcctgagcgcaaggacaagaagtctgcaaacatggttattagtgagggcggaggaacattggggtatggtaaatttttacctacagttctctctgtctgtcactcacttgattggtgggttgatactggtgctaatattcatgtgtttgcggacatttccctattttcttcttatcaagttgggagaggttcctccttgttgatgggaaacggatcgcttgtggctgttcatggtgttggtacggtcgatctgaagtttacttcgggaaagatcgtgcagctgaagaacgtgcagcatgtcccttcaataaagaagaatctagttagcggctctctactgtgtagagatggttttagacttgtgtttgaatccaataaatgtgtcgtatctaaatatggaacgtttattggaaaaggttatgatagcggaggtttgtttcgcttttccttggatgatatgtgtaataaagttgtgaaccatgtaagcgatgatgatgatgagtccaatgtgtggcattcgcaactttgccatgtgaattttggttgtatgacacgcttagccaacatgagtttaattccaaaattcactttagtcaaaggctctaagtgccatacttgtgttcaaacgaaacaacctcgcaagcctcacaagtcatctgaggcgaggaagttggcaccactagaaattgttcattccaatctgtgcgaaatgaacggcgtgttgactaaagggggaaagaaatatttcatgacactgatagatgattgcactagattctgctacgtgtacctattgaaaacaaaggatgaagtattacattactttaagatctataaggctgaggtagaaaaccaactggaaaggaaaatcaaacggttaaggtctgataggggtggagagtatttttccaatgagtttacttctttctgcaaagagtatggaattattcatgagaggacgcattcctattcaccccagtcaaacggggtagccgaaagaaagaaccgcactctaactgagatggtgaatgccatgttagacactgcaggactttccaaggaatggtggggtgaggcaatattgactgcgtgtcatgtcctgaatagaattcctactaagcataaggaagtaacatcattcgaggaatgggaaaggaagaaattaaatctctctcacctgcgcacatggggctgtttggccaagagatgccacatttttgagaatgaatttcctatgaaaaatgcacctagcacttctagtcaagaacctattttatcccctgagcactttgtgctgatagaacacattgatcaaacgcttgaggaaaattctgaggagaataacattgtagcaactcgaaagagtaagagacaaaggactgcaaagtcttttggagatgactacattgtatatcttgtggatgatactccaagaaccattgaagaggcatattcatctcctgacgttgactattggaaggaagcggtacgcagtgaaatggactcaattatgtctaatggtacttgggaagtcatcgagtgtccatatgggtgcaagcctgtaggatgcaaatgggttttcaagaaaaagcttaggcctgacgcctctcatggtctactcgtccatcagatggatgttaagacagctttcctcaatggagagttggaggaggagatctatatggatcaaccagatgggtatgtactagaaggtcaggagggaatggtatgcaagctgttgaagtccttgtatggtctcaaacaagcgcctaagcaatggtatgagaagtttgacaatacacttacatctactggctttgttgtgaacgaagctgacaaatgtgtgtactatcgtaatggtgggggagagggagtgatcttgtgtttatatgtcaatgacatattgatctttgggaccagcctcaatgtgattgaagaggtcaaggactttctgtccaaaagctttgaaaagaaggatttgggagtggctgatgttattcttaacattaaactactgagaggagatgagggtcggattacacttgtgcaatctcactatgtggacaaggtcttgagtcgctttggttatagtgactgcaaggcagctcctactccttatgatcctagtgtgctattaaggaaaaaccgaagaatagcaagggatcaattgagatactcccagatcattggttcattgatgtacttagctagtgcaacgaggcctgacatctcatttgctgtgagcaagttgagccggtttgtttcaaatccgggagatgatcattggcatgctcttgaaagagtaatgcgctatctaaaagggacaatgagctatggaattcactatgccgggtacccaaaagtgctggagggctatagtgattcaaactggatatctgatgctgatgagataaaggccacaagtgggtatgtgttcacacttggaggtggcgctgtttcctggaagtcttgcaagcagatcatcttaacgaggtcaacaatggaaacagagctcacagctttagatactgccacagttgaggccgaatggcttcgtgagctcctgatggacttgccggtggttgaaaaaccaataccagcaatcctgatgaactgtgataatcaaacagtgattattaaagtaaacagttcgaaggacaacatgaagtcatccaggcatgttaaaagaagactgaagtctgtcagaaagcagaaaaactccagagtgatagcattggactatgtctag

SEQ ID NO: 14834 - DNA, 3564 bp, Oryza sativa
  Clone ID: TFbOSC421667j.C1.o33.gm
atggacacttatcctttcagcaatgttgagatagacaatagtggatttcatgtttgtgatcttatatacagctttcggccttcaccgagagaatccttccccggttctgttcacctgcgcgcacaggtgtacgggacgagcaggtgcctccggaactccgtccgcttgagaacttgcacgggtaggcgggcgatcaagttttttggtagcgcttcaagcgcgactgctcttgttcttcgcggctactgctgctgcatcggcgccttcaccaagatgtcaacggagattggagacaataagatgaacgacatcaacggaggcaatactgcctcaaatccagcgatgggacgttctcgggggaaggacatgtgggatgctcttgaggtcaagttcggggtttccgacgccggcagcgagctgtatgtcatggagcagttctatgactacaagatggtcgattaccgttctgtagtggaacaggcttatgagattcagatgctggtaaaggaacttgagaacaacaactgcgagttgccggacaagtttgtggctggaggcattattgccaaattgccaccttcttggtcggactttgctacttctctaaaacacaagaggcaaaagttcagtgttactgatctcattggctctttgggtattgaggagaaggtgagggcaaaggacaaccagggcaaaaagatcgagggaggttctagcgctaatttggtgcagaagaagaacactcacgcatcccacaacaacaacaagaaagtcaaacctgacatcaaatccaaggctacaaccaattttaagaagaaaggcaaaggaaaggcaaaaggagattgctttgtgtgtggcaagcctgggcattgggccaaggattgtcctgagcgcaaggacaagaagtctgcaaacatggttattagtgagggcggaggaacattgtgtgtgggacataggttcttaatagtaaattctggagtacccgacatgcgtgttggtacaattactgagttcagagatgccacattttttgagaatgaatttcctgtgaaaaatgcacatagcacttctagtcaagaacctattttatcccctgagcactttatgccgatagaacacattgatcaaacgcttgaggaaaatcctgaggaggataacattgtggcaactcgaaagagtaagagacaaaggactgcaaagtcttttggagatgactatattgtatatcttgtggatgatactccaagaaccattgaagaggcatattcatctcctgatgtgactattggaaaggaaagaagcggatgcaaatgggttttcaagaaaaagcttaggcctgatggtacaattgaaaagtacaagatggatgttaagacagctttcctcaatggagagttggaggaggagatctatatggatcaaccagatgggtatgtactagaaggtcaggagggaatggtgtgcaagctgttgaagtccttatatggtctcaaacaagcgcctaagcaatggcatgagaagtttgacaatacacttacatctgttggctttgttgtgaaagaagctgacaaatgtgtgtactatcgctatggtgggggagagggagtgatcttgtgtttatatgtcgatgacatattgatctttgggaacagcctcaatgtgattgaggaggtcaaggactttctgtccaaaagctttaaaatgaaggatttgggagtggctgatgttattcttaacattaaactactgagaggagatgagggtgagattacacttgtgcaatctcactatgtggacaaagtcttgagtcgctttggttatagtgactgcaaggcagctcctactccttatgatcctagtgtgctattaaggaaaaaccgaagaatagcaagggatcaattgagatactcccagatcattggttcattgatgtacttagctagtgcaacgaggcctgacatctcatttgctgtgagcaagttgagccagtttgtttcaaatccgggagatgatcattggcatgctcttgaaagagtaatacactatctaaaagggacaatgagctatggaattcactatgccgggtacccaaaagtgctggagggctatagtgattcaaactggatatctgatgctgataagataaaggccacaagagggtatgtgttcacacttggaggtggcgctgtttcctggaagtcttgcaagcagaccatcttaacgaggtcaacaatggaagcagagctcacagctttagatactgccacagttgaggccgaacggcttcgtgagctcctgatggacttgctggtggttgaaaaaccagtaccggcaatcctgatgaactgtgataatcaaacagtgattattaaagtgaacagttcgaaggacaacatgaagtcatccaggcatgttaaaagaagactgaagtctgtcagtaagcagaaaaactccggagtgatagcattggactatgtccagacggctaaaaatctggcagatcagtttaccaaggggctaccacgtaatgcgggcgatcaagtttttggtagcgcttcaagcgcgactgctcttgttcttcgcggctactgctgctgcatcggcgccttcaccaagatgtcaacggagattggagacaagaagatgaacgacatcaacggaggcaatactgcctcaaaatccagcgatgggacgttctcgggcagcagcagcagcaacgcgaacaccctcgcctacatggcagagggcacctacaagaccaacctgctcaacctcgccaaagacctgatcgccaatgtcaccaagacggggtcgcactcggccgccggcgccacggctgggacgacaggtcccgacatcgtctacggcgccgtactctgccggggagactccaccaactgcagcagccgcttacagagagtgctcgacacagccagcatcagtaataatggatctaccagtagtgagagtgactcccagtcccagtcgcacaagagtactgtaaccttgtacgaccatgagttccaggcgctgctaagcttctctgacacggacttcatctccagcttcagcaacgcgccggcgtgcatagtgagcaattacctgaaccctgctgtccctcagagggatgctgatcgcacgcggttcagcgagcttttctctgagctcatggagaggatctccgacgccatggtgagtagtcgggccagctacttgacgggcaaggggaaggggtggttcgacggccaggagagtcagccagtagtatacgggctggcgcagtgcatggacggcatgccgccggagcgttgccggagttgcctgggcggcatcaccgaccaagggaaggagatggtcagcaatggcctgacggaaggcatggtgctcggggtgcgctgcagtctgtggtaccactaccagacggacggagaattcttcgccggcgagccaggggtgttagcgttcctaaacatgccttcttctagagacgaaagcaagttcgggctctgggctacaattggatcgttcttcctcatgaagcaagatttaaactacgactga

SEQ ID NO: 14835 - DNA, 3063 bp, Oryza sativa
  unsure (1)..(3063): unsure at all n locations
  Clone ID: TFbOSC900407j.C1.o4.gm
atggacacttatcctttcagcaatgttgagatagacaatagtggatttcatgtttgtgatcttatatacagctttcggccttcaccgagagaatccttccccggttctgttcacctgcgcgcacaggtgtacgggacgagcaggtgcctccggaactccgtccgcttgagaacttgcacgggtaggcgggcgatcaagttttttggtagcgcttcaagcgcgactgctcttgttcttcgcggctactgctgctgcatcggcgccttcaccaagatgtcaacggagattggagacaataagatgaacgacatcaacggaggcaatactgcctcaaatccagcgatgggacgttctcgggggaaggacatgtgggatgctcttgaggtcaagttcggggtttccgacgccggcagcgagctgtatgtcatggagcagttctatgactacaagatggtcgattaccgttctgtagtggaacaggcttatgagattcagatgctggtaaaggaacttgagaacaacaactgcgagttgccggacaagtttgtggctggaggcattattgccaaattgccaccttcttggtcggactttgctacttctctaaaacacaagaggcaaaagttcagtgttactgatctcattggctctttgggtattgaggagaaggtgagggcaaaggacaaccagggcaaaaagatcgagggaggttctagcgctaatttggtgcagaagaagaacactcacgcatcccacaacaacaacaagaaagtcaaacctgacatcaaatccaaggctacaaccaattttaagaagaaaggcaaaggaaaggcaaaaggagattgctttgtgtgtggcaagcctgggcattgggccaaggattgtcctgagcgcaaggacaagaagtctgcaaacatggttattagtgagggcggaggaacattgtggcctgatggtacaattgaaaagtacaagatggatgttaagacagctttcctcaatggagagttggaggaggagatctatatggatcaaccagatgggtatgtactagaaggtcaggagggaatggtgtgcaagctgttgaagtccttatatggtctcaaacaagcgcctaagcaatggcatgagaagtttgacaatacacttacatctgttggctttgttgtgaaagaagctgacaaatgtgtgtactatcgctatggtgggggagagggagtgatcttgtgtttatatgtcgatgacatattgatctttgggaacagcctcaatgtgattgaggaggtcaaggactttctgtccaaaagctttaaaatgaaggatttgggagtggctgatgttattcttaacattaaactactgagaggagatgagggtgagattacacttgtgcaatctcactatgtggacaaagtcttgagtcgctttggttatagtgactgcaaggcagctcctactccttatgatcctagtgtgctattaaggaaaaaccgaagaatagcaagggatcaattgagatactcccagatcattggttcattgatgtacttagctagtgcaacgaggcctgacatctcatttgctgtgagcaagttgagccagtttgtttcaaatccgggagatgatcattggcatgctcttgaaagagtaatacactatctaaaagggacaatgagctatggaattcactatgccgggtacccaaaagtgctggagggctatagtgattcaaactggatatctgatgctgataagataaaggccacaagagggtatgtgttcacacttggaggtggcgctgtttcctggaagtcttgcaagcagaccatcttaacgaggtcaacaatggaagcagagctcacagctttagatactgccacagttgaggccgaacggcttcgtgagctcctgatggacttgctggcgggcgatcaagtttttggtagcgcttcaagcgcgactgctcttgttcttcgcggctactgctgctgcatcggcgccttcaccaagatgtcaacggagattggagacaagaagatgaacgacatcaacggaggcaatactgcctcaaaatccagcggtgggacgttctcgagcagcagcagcagcaacgcgaacaccctcgcctacatggcagagggcacctacaagaccaacctgctcaacctcgccaaagacctgatcgccaatgtcaccaagacggggtcgcactcggccgccggcgccacggctgggacgacaggtcccgacatcgtctacggcgccgtactctgccggggagactccaccaactgcagcagccgcttacagagagtgctcgacacagccagcatcagtaataatggatctaccagtagtgagagtgactcccagtcccagtcgcacaagagtactgtaaccttgtacgaccatgagttccaggcgctgctaagcttctctgacacggacttcatctccagcttcagcaacgcgccggcgtgcatagtgagcaattacctgaaccctgctgtccctcagagggatgctgatcgcacgcggttcagcgagcttttctctgagctcatggagaggatctccgacgccatggtgagtagtcgggccagctacttgacgggcaaggggaaggggtggttcgacggccaggagagtcagccagtagtatacgggctggcgcagtgcatggacggcatgccgccggagcgttgccggagttgcctgggcggcatcaccgaccaagggaaggagatggtcagcaatggcctgacggaaggcatggtgctcggggtgcgctgcagtctgtggtaccactaccagacggacggagaattcttcgccggcgagccaggggtgttagcgttcctaaacatgccttcttctagagacgcggcggcctcgccgacggcggcgttggacgcgacggtcgcctaccgccctctgggagggcgatttttaaaaatcgccctctccgagggcggcgaaaatgacgtggcagacggccgttcgctctcgggcgacggccgtcaacgaaatttgcagggcggnccccttgccgccctccgctag

SEQ ID NO: 14836 - DNA, 1915 bp, Oryza sativa
  Clone ID: TFbOSC412814j.C1.o3.np
ccccttcagtaagaaaagatttggagaagaagtcttaggttctggtctattctttcctggcttgtttcctctctcacctcaatccctgtaacagatgtttaacagagaaaaaggaaagaatgtcagcgggtatgcctccagtaactcaagttttcaactcaatccaccactagcctcaagagagttaacaagggcacacccttggtccattccaagcatgctgcttagtccacagctaccattggttggaagtcaagaccaaaatcagtatgtgtttgatcgagcatttgccacccaggtcgatgagcttccaataccagaagaggatgtccccttttgtcacgattgtagagagcaaggacactatgccctgaattgtccatgggtatatgccaaagaagctccttcccttggtttaacagtgcagacatcgctaaaccagcctcttcgcaccaagtcaagcttgcagcctagtgtgcaaagcagagagcccaatgaagagaatccattgaatcccgggaattgctttcctcctagcccttcgtaccacgtggggtcacgtactaagcaagccaaaggcaagaagagtaagaatcagaggagaaaagcaccgatgcgaactgaagaagaagtacgtaagatgaccattaccagcacagaatggcctccaccaggaatgacaaaacgtcagagaagaaataccttccggggtgcaccacagttgacagagcatcttttagctaatggaggtagagtgtctgatagtgaagattcagatcaagtctcatcagatgatgaagatcagaagtctccccaaggtttcaaccagaacaaaatggaacgtaaggcatgctctcgttgtggagaaatcggtcatgttgccagctcgtgtgccactacatgcgttcattgtgaggaagaccatccacccgacaggtgtccaatgagcaggatcacttgtttcttttgtcaaggaactgatcatgtaccaaaagattgtcaattcagttttctgctgacgaagaggatggccagccaacccgccagttccaacggagagcagcatcaaggcaacacaaatcctcgccaagattacagtttcagcctaacttcagtgccaggacagaggaatcaaaatgaggaaagaaaatgccgagtccgagaagatatctgttgcttcaattgtcaaggaatgggtcatttcgccgacaagtggccaaaaccgagaaacatagctgccggcacgtcagtccacgcaactccctgcaatcagaagcttgctcctcagcgaattgtcatccatgcatcccgaagcagtcctatagcccccgttgcaacagctccaactccagcgagtacattaccacaaggtgtcaatgctcaatttcagccccagccaccagttgacaagacagcggcattgtacctttggatgttccagcacagcagccaaaaaaaaaatcaagtacaagatgaagaacccgagcaagaccacccaccaggggagtgtcccacccgcaagatcacatgttttctgtgcgaaggtacaaaccatgtgcccaaggattgccaacttagtgtgttgttgaccaagaccgcagaaatccaacgaaccaccctacgattgtctcatcagctagtgagctccaacagcaacatcgacgatatcatccatagcaccaatgctcctcctgctgcacctgactctgcaatcaatcatagcaataataccttcagcaccaaccattctctgcgccgacagcctcagcagagaattgtcgtcgatggaagaagttgtttctctccccgacctactccaggccgagcaaagggcaatcaacctccggagggcgataccaagcagaagaccgtcctccgcttcaaacagcaatcagacggaagcttctcctgtgaa

SEQ ID NO: 14837 - DNA, 1362 bp, Oryza sativa
  Clone ID: TFbOSC23512j.C1.o3.fg
atggctgacaatgagaaaggcaataaggtcaggagtcaggacattggtacctcaagctcccgagtgaatgaagcacaagacaccagttgtgcggcagtggtccaacacctgattaaccagaacaaattgcttatagagatactacagcagcatcggatgccaattttgaacccgagtcagatgcaacctcaggtgcagttggaggcagtccaagcactcacaccacaagtcagcgcaccgccaacatcccagaaggcccctcatgccatgccacatgttgacccaaaagaagcaagtatcatctgttttatgtgtgatgagcaagggcactacgcaaggaactgtcctcagcagaaaagaaaagcaccaatgcgaaccgaaggtgaagttcgtaagatgatcattaccagcacagaatggcctccaccaggaatgacaagacgtcagagaagaaacaccttccgaggtgcaccacagttgacagagcatcttttagctaatggaggtagagtgtctgatagtgaagattcagatcaagtctcctcagaagatgaagatgagaaatctccccaaggtttcaaccaggataaaatggaacgtaaggcatgctctcgttgtggagaaatcggacatgttgccagctcgtgtgcctctacatgcgttcattgtgaggaagaccatccacccgacaggtgtccaacgagcaggatcacttgtttcttttgtgaaggaactgatcatgtaccaaaagattgtcaattcagttttctgctgacgaagaagatggctaaccaacccgccggtttcaacggagagaagcatcaaggcaacaccaatcctcgccaagattacagtttcagcctaactccagtgccaggacagaggaatcaaaatgagaaaagaaaatgccgagtccgggaagatatctgttgcttcaattgtcaaggaatgggtcatttcgccgacaagtgcccaaaaccgagaaacatagctgccggcacgtcagtccacgcaactccctgcaatcagaagcttgctcctcaacgaatggtcatccatgcatcccgaagcagtcctatagcccgcgttgcaacagctccaattccaatgagtgcactaccacaaggtgtcaatgctcaatttcagccccagccaccagctgacaagacagatgccagtatctgcgttgtacctttagaagctccaatacagcagctgagaaatcaagtacaagatgaagaacccgagttggagaagggcattactccaaaaactgtccccgacctccacattttcgccaatttacacgaagcagacattccaatcgtattgtggtcactggagcaaacgccgtacccgtaa

SEQ ID NO: 14838 - DNA, 2169 bp, Oryza sativa
  Clone ID: TFbOSC400750j.C1.o67.np
atctatcacaaaaccacatcatgccctagcgccgccgccgccgcggattgcgccgcatcccgccgtccccgcgcgcattaaagagaggggaatcactccccgtgattccctctcccgtttcccccgatttcccctctctctctccctcggatccgtccggattcatcccgtaatcctcgccggcgacatctatggagcccgagatccccgcgcccgtttccttcctctccggccgcgttctccccctctcggtgctatataattgctccccgagctccgctcttccgtttccgccgctcgccgctcgctctcgccgtcggatccgtgctcgcgccgtgctcctctctctccgccgtcgccgccgaccttcggctcgccgccgacgtcgctccggtcctcctcccggctcggcgccacctccctcggcatcgccgcatcgccgtcgacctcgtccgcgcctccgtttcgctcgccgaccgtcggagcgccgccgtcatcgtcatcccgagccgcgccgccgtctccctccgctccgtccgccgttctcgtcgtcgtcgttgtcccggggtgagccgtggaccgtccccttcgtttcccccttccctcctctctctcgggtgccgctccgccgcgccgttggtcgccggcggcgaccatcggggcgcgggtgcgccgctcccgtcggccgtgccggcgaggccgccttcgggcgcgccctcgcggctgccaagtgggcccggccgtcagccgcccgcgcccgcgggtgcggctgacgcgtgggacccacggcgccgaccgccgccagccgcgtgctcccggtccaccgtggaccgagaggctgacgcgtgggccccactcccgtggacccgggcaaatgaaggctacacgagctgcggcccgatggctgacaatgagaaaggcaataaggtcagaagtcaggacattggtacctcaagctcccgagtgaatgaagcaccagacaccagttgtgtggcagtggtccaacacctgattaaccagaaccaattgcttatagagatactacagcagcatcggatgccaattttgaacccgagtcagatgcaacctcaagtgcagttggaggcagtccaagcactcacaccacaagtcagcgcaccgccaacatcccagaaggcccctcatgccatgccacatgttgacccaaaagaagcaagtatcatctgttttatgtgtgatgagcaagggcactacgcaaggaactgtcctcagcagaaaagaaaagcaccaatgcgaaccgaagatgaagtccgtaagatgatcattaccagcacagaatggcctccaccaggaatgacagaacatcagagaagaaattccttccgaggtgcacaacagttgacagagcatcttttagctaatggaggtagagtgtctgatagtgaagattcagatcaagtctcctcagatgatgaagataaaatagaacttaaggcatgctctcgttgtggagaaatcggtcatgttgccagctcgtgtgcctctacatgcgttcattgtgaggaagaccatccacccgacaggtgtccaacgagcaggatcacttgtttcttttgtgaaggaactgatcatgtaccaaaagattgtcaattcagttttctgctgacgaagaagatggccaaccaacccgccagttccaacggagagaagcatcaaggcaacacaaatcctcgccaagattccagcttcagcctaactccagtgccaggatagaggaaacaaaatgagaaaagaaaatgccgagtccgggaagatatctgttgcttcaattgtcaaggaatgggtcatttcgccgacaagtgcccaaaaccgagaaacgtagctgccagcacgtcagtccacgcaaacccccgcaatcagaagcttgctcctcaacgaattgtcatccatgcatcccgaagcagtcctataacccgcgttgcaacagctccaattccaatgagtgcactaccacaaggtgtcaatgctcaatttcagccccagcaaagaattgtcgtagatggaagaagttgtgtctctccccgacctactccaggccgagccaagggcaatcaacctccggagggcgataccaagcagaagaccgtcatccgcttcaaccagcaatcagaaggaagcttctcctgtgaa

SEQ ID NO: 14839 - DNA, 1685 bp, Oryza sativa
  Clone ID: TFbOSC400773j.C1.o15.np
atggctgacaatgagaaaggcaataaggtcagaagtcaggacattggtacctcaagctcccgagtgaatgaagcaccagacaccagttgtgtggcagtggtccaacacctgattaaccagaaccaattgcttatagagatactacagcagcatcggatgccaattttgaacccgagtcagatgcaacctcaagtgcagttggaggcagtccaagcactcacaccacaagtcagcgcaccgccaacatcccagaaggcccctcatgccatgccacatgttgacccaaaagaagcaagtatcatctgttttatgtgtgatgagcaagggcactacgcaaggaactgtcctcagcagaaaagaaaagcaccaatgcgaaccgaagatgaagtccgtaagatgatcattaccagcacagaatggcctccaccaggaatgacagaacatcagagaagaaattccttccgaggtgcacaacagttgacagagcatcttttagctaatggaggtagagtgtctgatagtgaagattcagatcaagtctcctcagatgatgaaggtgcgaagcctccccaaggttttaaccagaataaaatagaacttaaggcatgctctcgttgtggagaaatcggtcatgttgccagctcgtgtgcctctacatgcgttcattgtgaggaagaccatccacccgacaggtgtccaacgagcaggatcacttgtttcttttgtgaaggaactgatcatgtaccaaaagattgtcaattcagttttctgctgacgaagaagatggccaaccaacccgccagttccaacggagagaagcatcaaggcaacacaaatcctcgccaagattccagcttcagcctaactccagtgccaggatagaggaaacaaaatgagaaaagaaaatgccgagtccgggaagatatctgttgcttcaattgtcaaggaatgggtcatttcgccgacaagtgcccaaaaccgagaaacgtagctgccagcacgtcagtccacgcaaacccccgcaatcagaagcttgctcctcaacgaattgtcatccatgcatcccgaagcagtcctataacccgcgttgcaacagctccaattccaatgagtgcactaccacaaggtgtcaatgctcaatttcagccccagccaccagctgacaagacagaggccagtatctgcgttgtacctttggaagttccaatacagcagctgagaaatcaagtacaagatgaagaacccgagaagaagggcattactccaaaaactgtccccaaccaaggcaaaatcgacctccacattaccgccaatttacacgaagcagacattccaatcgtattgtggtcactggagcaaacgccgtaccaaggagtgaaatcttcaactcggtatcagatgctacacggagtgaaaagtgcaagcaccagttaccaggttgactccaaagagatgaactatgcaaagctctggaactgaagccccatcttcaagtgccgcaacccagtcgaagtcagctaaaggttcaaccagggacaagtcaggtgaagagaagattccatctgcaacaggagatcgagccaagcagtccagagtggagaagttgtgctaggcaagtttgttataagaagacggagcggaagaagtcagacaagaagagaagaccgcccaacctatcttcttgc

SEQ ID NO: 14840 - DNA, 1632 bp, Oryza sativa
  Clone ID: TFbOSC421503j.C1.o4.fg
atggctgacaatgagaaaggcaataaggtcagaagtcaggacattggtacctcaagctcccgagtgaatgaagcaccagacaccagttgtgtggcagtggtccaacacctgattaaccagaacaaattgcttatagagatactacagcagcatcggatgccaattttgaacccgagtcagatgcaacctcaagtgcagttggaggcagtccaagcactcacaccacaagtcagcgcaccgccaacatcccagaaggcccctcatgccatgccgcatgttgacccaaaagaagcaagtatcatctgttttatgtgtgatgagcaagggcactacgcaaggaactgtcctcagcagaaaagaaaagcaccaatgcgaaccgaagatgaagtccgtaagatgatcattaccagcacagaatggcctccaccaggaatgacaaaacatcagagaagaaattccttccgaggtgcacaacagttgacagagcatcttttagctaatggaggtagagtgtctggtagtgaagattcagatcaagtctcctcagatgatgaagatgagaagtctccccaaggttttaaccagaataaaatagaacttaaggcatgctctcgttgtggagaaatcggtcatgttgccagctcgtgtgcctctacatgcgttcattgtgaggaagaccatccacccgacaggtgtccaacgagcaggatcacttgtttcttttgtgaaggaactgatcatgtaccaaaagattgtcaattcagttttctgctgacgaagaagatggccaaccaacccgccagttccaacggagagaagcatcaaggcaacacaaatccccgccaagatcaccgtttcagcctaactccagtgccaggacagaggaatcgaaatgagaaaagaaaatgccgagtccgggaagacatctgttgcttcaattgtcaaggaatgggtcatttcgccgacaagtgcccaaaaccaagaaacatagctgccggcacgtcagtccacgcaactccctgcaatcagaagctcgctcctcaacgaattgtcatccatgcatcccgaagcagtcctataacccgcgttgcaacagctccaattccaatgagtgcactaccacaaggtgtcaatgctcaatttcagccccagccaccagctgacaagacagaggccagtatctgcgttgtacctttggaagttccaatacagcagctgagaaatcaagtacaagatgaagaacccgagttgaagaagggcattactccaaaaactgtccccaaccaaggcaaaatcgacctccacattaccgccaatttacacgaagcagacattccaatcgtattgtggtcactggagcaaacgccgtaccctggtaacttgtctgaggttgactccgaagatatgaatcatgagaagttctgggacggaagcatcactgcactaccgcaacctagtctgagtcagccaaaaggtgcaccctggtccaagtcaggtgaagagaagattccatccgcaacaggaggtcaagccaagcagttccgagtggtgaagttttgctggaagtttgtcaagacgcaacggaagaagtcagacaagaagagaagaccgcccaacctatcttcttgctag

SEQ ID NO: 14841 - DNA, 1284 bp, Oryza sativa
  Clone ID: TFbOSC900156j.C1.o3.fg
atggctgacaatgagaaaggcaataaggtcagaagtcaggacattggtacttcaagctcccgagtgaatgaagcaccagacaccagttgtgtgacactagtccaacacctggttaaccagaaccgattgcttatagagatactacagcagcaccagacgccaattctgaacttgagtcaaatacaacctcaagtgcagttggaggcagtccaagcactcacaccacaagtcagcgcaccgccaacatcccagaaggcccctcatgccatgccacatgttgacccaaaagaagcaagtatcatctgttttatgtgtgatgagcaagggcactacgcaaggaactgtcctcagcagaaaagaaaagcaccaatgcgaaccgaagatgaagtccgtaagatgatcattaccagcacagaatggcctccaccaggaatgacaagacgtcagagaagaaataccttccgaggtgcaacacagttgacagagcatcttttagctaatggaggtagagtgtctggtagtgaagattcagatcaagtctcctccgatgatgaagatgagaagtctccccaaggttttaaccagaataaaatagaacttaaggcatgctctcgttgtggagaaatcggtcatgttgccagctcgtgtgcctctacatgcgttcattgtgaggaagaccatccacccgacaggtgtccaacgagcaggatcacttgtttcttttgtgaaggaactgatcatgtaccaaaagattgtcaattcagttttctgctgacgaagaagatggctaaccaacccgccagttccaacggagagaagcatcaaggcaacaccaatcctcgccaagattacagtttcagcctaactccagtgccaggacagaggaatcgaaatgagaaaagaaaatgccgagtccgggaagacatctgttgcttcaattgtcaaggaatgggtcatttcgccgacaagtgcccaaaaccgagaaacatagctgccagcacgtcagtccacgcaactccctgcaatcagaagcttgctcctcaacgaattgtcatccatgcatcccgaagcagtcctatagcccgcgttgcaacagctccaactccagcgagtgcattaccacaaggtgtcaatgctcaatttcagccccagccatcagttgacaagacagaggccagtatcggcattgtacctttggatgttccagcacagcagccaagaaatcaagtacaggatgaagaacccaagcgtaagaaagttatttacaacggtagtacctgttaa

SEQ ID NO: 14842 - DNA, 2229 bp, Oryza sativa
  Clone ID: TFbOSC29453j.C1.o1.fg
atggctgacaatgagaagggcaataaggtcagaagtcaggacattggtacctcaagctcccgagtgaatgaagcaccagacaccagttgtgtagcagtggtccaacacctgattaaccagaacaaattgcttatagagatactacagcagcatcggatgccaattttgaacccgagtcggatgcaacctcaagtacagttggaggcagtccaagcactcacaccacaagtcagcgcaccgccaacatcccagaaggcccctcatgccatgccacatgttgacccaaaagaagcaagtatcatctgttttatgtgtgatgagcaagggcactacgcaaggaactgtcctcagcagaaaagaaaagcaccaatgcgaaccgaagatgaagtccgtaagatgatcattaccagcacagaatggcctccaccaggaatgaccagacgtcagagaagaaataccttccgaggtgcaccacagttgacagaacatcttttagctaatggaggtagagtgtctgatagtgaagattcagatcaagtctcctcagatgatgaagatgaaatggaacgtaaggcatgctctcgttgtggagaaatcggtcatgtcgccagctcatgtgccactatatgcgttcattgcgaggaagaccatccacccgacaggtgtccaacgagcaggatcacttgtttcttttgtgaaggaactgatcatgtaccaaaagattgtcaattcagttttctgctgacgaagaagatggctaaccaacccgccagttccaacggagagaagcatcaaggcaacaccaatcctcgccaagattacagttccagcctaactccagtgccaggacagaggaatcgaaatgagaaaagaaaatgccgagtccgggaagacatctgttgcttcaattgtcaaggaatgggtcatttcgccgacaagtgcccaaaaccgagaaacatagctgccggcacgacagtccacgcaactccctgcaatcagaagcttgctcctcaacgaattgtcatccatgcatcccgaagcagtcctatagcccgcgttgcaacagctccaattccaatgaatgcactaccacaaggtgtcaatgctcaatttcagccccagccaccagctgacaagacagaggccagtatctgcgttgtacctttggaagttccaatacagcagctgagaaatcaagtacaagatgaagaacccgagtgtaagaaagttattgtttgttacaactgcagtgaagaagggcattactccgaaaactgtccccaaccaaggcaaaatcgacctccacattaccgccaatttacacgaagcagacattccaatcgtattgtggtcactggagcaaacgccgtacccgttcggatatacctgcaaacagttaagaagatccaggaagacatcaatattctagaacataatagtcgatggttggtaattagtcgatcaggtatcagaaaacggtcaaaggtgatatggcagaagaacaatatggatgctccccatctcgaggaagcactaaaccctagtggcatagatacagatagcaagcaatgtatttccctgaaggcagcaagccaaaggacctcatcgtccccagaagcgtccgcaatccacattaaagaataccacctgttagagataagccgaaagatgattgataaaaagagattggcaaagatgttctctagcatgaaagaagtaggccgaaaggtgattgataaacagaaacatgctctgcatcgctcaaggaagacccctgattgtaattgccccgcaacagtcaccttgtcattaagtcagcaagatgacctaggtaaaagtgtttctatgaaggcaaagagtgaaatcttccactcggtatcagatgctacacggagtgaaaaatgcaagcaccggttaccaggcgacgccacgtcctgggagatgatccaacgggaaagaactcatcaagttgataacttgtccgaggttgactccgaagatatgaatcatgagaagttctggaacggaagcatcactgaactaccgcaacctagtctgagtcagccaaaaggtgcaccctggtccaagtcaggtgaagagaagattccatccgcaacaggaggtcaagccaagcagttccgagtggtaaagttttgctggaagtttgtcaagacgcaacggaagaagtcagacaagaagagaagaccgcccaacctatcctcttgctag

SEQ ID NO: 14843 - DNA, 5158 bp, Oryza sativa
  Clone ID: TFbOSC1646j.C1.o1.np
ccttttactttgattttctaaactttatgcaaattaatccaaaaagttgtgctattaattggataaatgtcttaactccctcctttcacttgtctttagatgccgcgctacaagcctgagtacttgtttggtgttgagggatttgtccaggagttgcgtacgatgtcctttgtcataggatttgggactgctcctttttatgcccagattcctcatgatcgtcatgaagagaagtgccgagtcaaagtcaccttgaacagtaatagtgaagatatcccctcagtgatgttcgaagctggaggaagaaactacatccatgtatgtcaggaggtggcaaggatcaccataggagagcttcgtgatcgctatagtgatcagttggccgacactgagtatcgttaccatcctcgccaaccacagggaagtgaccgtggcagttaccttgagactgagggaattgagaatgatgctaccacaaggcatttggttgagatgctgtgggctatggatgaaacccgtgcggagactgtgttagcagctcaagatcgtgaagaccggaatcgtggtaagatttgcaagctagaggacaaggtggatcgtttggagaaggaactagccgcgttaaagggagaagcaccaccgcagaaggccagaattcgtcttaccgcaaggaagagagctctatttgtccctcgctaccaattggcgccaaagttttccccggtttctcttcttgtgctcttgtccctgccagatggtgctcactcgcagcaacgggaatggccccaacaataacaataacaacaacaatggagagaatcccacacttgcccaggttctggctcaacagacacagcttatgaacatgatgatgcagcaactccagaaccagcagaaccagctcaaccaagggaacaacaatgctccaccgccgcagaacaagttagcagaatttcttcgtgtgaggccgcccactttctctagcaccactaatcctgttgaagctggtgattggttgcacgccatagagaagaagttggatttgcttcagtgcactgatcaggagaatgtctcatttgcatcacaccagctgcatggccctgcctctgagtggtgagatcacttccgccttaataggactactgctgaacctatcacttggcttgaattcaccgctgctttccggaagacgcatataccatcgggagtagtgtctctcaagaagaaggaattcaggtcgctcacccagggatctcgctctgttacggagtatctgcacgagttcaatcgtctggctcgttatgctccggaagatgtgcgcaatgatgaagagcgccaggagaagttcttggaaggacttaatgatgagctttcttacccactcatgactcgggattatcctgatttccagaagttagtggataaggctattcgtcaggaggacaagtacaaccgcatggagcagaagaaacgccggattgctcaattcaagacacaacaggggaataatcagaggccgcgtcttactttaggaccccagtccatgccacagggaggttcttcgtctgttgttcatccgcagcgtcagttcttcaacaacaatgctggcaacaacatccgcaatcaagctccacaacctgccaagaaggagcaaggcagcaagctcgtggtgtgtttcaactgtggagaaccaggacattatgctgacaagtgtccgaagccccgacgcgtgaaggttgtccctgtccagagcaactctaccgtacccgcatcaaaggcccgtgtcaatcatgttgctgctgcagaagctcaagatgctccagatgtgattttgggtacgtttcttgttaactcagttcctgcaacagtgcttttcgattctggtgctacacattcattcttatctatgagttttgcgggaaatcatgggatggaagtagaagatcttagacgtcctatgatggttagtaccccaagtaatcaagcactctctttgcaacgtagcccctctgtcagaatagaaattaaaggagtaccgtttctggccaatcttatcctgttagaatccaaagaccttgatgtcatcctagggatggactggttagccagacataaaggtgtgatagactgtgctaacagaaaagtaactctcaccagtaatggtggtcgagttgtaactgttcatgcattgtcttctgagtctttaaggtcaagactgaaccaaataactttggaagagattcctatagttcgggagtatcctgatgtgttcccagacgatttacctggtatgccgcctaaaagggatatagagttcagaatagatttggtaccaggaacaactccgatccataagagaccttatagaatggcagccaatgagttggcagaagtcaagaggcaagtagacgatttgcttcagaaaggatacatcagaccgagttcatctccatggggagctccggttatttttgtggaaaagaaagatcatacccagaggatgtgtgtggactatcgtgcactaaatgatgtgactatcaagaataagtatccgctgcccagaattgatgatttgtttgatcagcttaaaggtgccaccgttttctccaagatagatcttcgatcagggtatcaccagttgagaatcaaagaggaagatatacctaagacagcttttaccactaggtatggattgttcgaatgtactgttatgtcttttggacttaccaatgcctccgctttcttcatgaacttgatgaataaggtgtttatggaatacctagacaagttcgtggtggtctttattgatgacattcttatctactcccgaaccaaagaagagcatgaagaacatcttcgccttgcactagagaagctacgagagcatcaattttatgccaagtttagcaagtgtgaattttggttgtctgaagtaaagttccttggtcacatcatctcagcaggaggagttgccgttgatcctagtaatgtggaatccgtaaccaattggaaacaaccaaagacagtttcagagattcgcagtttcctaggcttcacaggatattatcggaggtttatagataattttttcaagattgctaagcccatgacacggctgcttcagaaagatgtgaagtacaagtggtcagaagaatgtgagcagagtttccaagagttgaagaatcgcttaatatccgctcctattttgattttgcctgatccaaagaagggtttccaagtgtattgcgatgcatccaaacttgggttaggttgtgttctgatgcaagatgggaaggtggttgcctatgcatctcgtcagatacgtccgcatgagaagaactaccctactcatgatcttgagttagctgcagtggttcatgcgttgaaaatttggcgtcattatcttttcggtactcgtatagaggtgtataccgatcataagagtttaaaatatatctttactcagccggatctgaacatgagacaacggagatggttggaattaattaaagattatgacatgggaattcattatcacccagggaaggctaatgttgtagcagacgctcttagcaggaaaggctattgcaatgctacggaaggacgacagttgccgttggagttatgcaaggaatttgaaagattaaatttgggaattgtcagtagaggttttgttgcagtcttagaagcgaagcccactctaattgatcaagttagagaagcccaaattaatgatcctgatattcaagaaatcaagaagaatatgagaagaggaaaggctatcggtttcttggaggatgagcaaggaactgtatggttgggtgagagaatctgcgtccccgacaacaaagatttaaaagatgcaattctgaaagaagctcatgataccttatactccattcaccctggtagtaccaaaatgtaccaggatctcaaggaaagattttggtgggcaaatatgaaacgtgaaatcgcagaatacgtagcagtatgtgatgtttgtcagcgagtcaaggcagaacatcagaaacccgccgatttgctgtagcctttgaagattcctgaatggaaatgggaggaaatcggtatggatttcatcactggtttacccagaacgtcatcgggccatgactctatttgggtgatagtcgacagacttaccaaagtggctcatttcatcccagtaaagacaacatattctggaagtcggttggcggaattgtatatggcaaggattgtgtgtttgcatggcgtccctaagaaaatagtgtctgatcgaggcagtcagtttacttcaaatttttggaagaagcttcaggaagagatgggttctaaactgaactttagtactgcttatcatccgcagacagacggacaaaccgaaagggtgaatcagattttggaagacatgttgagagcttgtgctttagacttcggtggaagttgggataagaatttaccttatgcagaattttcgtacaacaacagttatcaagctagtcttcagatggctccgtacgaagcactgtatggtcggaagtgccgcactccgcttttgtgggatcaaacgggagaacatcaggttttcgggacggatatcctgagggaagcagaagaaaaggtgaaaatcattcaagaaagattgcgagtggctcagtctcgtcataagagttatgccgacaatcgccgtcgagatttgagttttgaagaaggagattatgtgtaccttcgtgtcacgcctattcgaggtgttcatcgttttcacaccaaaggaaaattggcaccgcgttttgtgggaccttataagattgtcagtagaagaggagaggttgcttatcagttggagttacctcaatctttggcaggagtccataatgtgttccatgtgtcgcaactgaaaaagtgtttaagggtacctaccgaagaagctaatcttgaacagatagaagtccaagaggatctgacctatgttgagagaccaacccgtattttggaaatagatgagagaaaaaccagaaattgagttatccgtttttgcaaagtccaatggagtaatcactcggaagaagaatcaacttgggaacgagaagatgaattgaagtcagctcatccgcatctgttcgctagttcttccgaatctcgaggacgagattctgtt

SEQ ID NO: 14844 - DNA, 958 bp, Oryza sativa
  Clone ID: TFbOSC1664j.C1.o3.gm
atggcgacagtgtgcccatgtgcgcggctaccgacgggcatgtcttctgtctacctggtcgtgtccgagtgcgtggccctcgcacctgcctccgaaaccacgcgctgctgcgacgtttgcacggacgggcgggcgatcaggtttttggagagcgtaaggcgcgactactcactgttcgtcaacatctacttcaccttcaccaatatgtcgaacactggagacaacggcaacactggatacaaggagaaggaggctcccgtcaacatcaacggaggcaatactgcctcaaactccaacggaggaccattcttgggtgtactcgctgacaatatagtggacgtgtacatgcacatgccttcagggaagaacatgtgggatgcacttgaggccaagttcggagtttccgacgccggcagcgagctgtatgtcatggagcagttctatgactacaagatggttgatgaccgttctgtagtggaacaagctcatgagattcagatgctagcaaaggaacttgagaacaacaactgtgagttgccggacaagtttgtggcgggtggcattattgccaaattcccaccttcttggtcagactttgctacttctctaaaacacaagaggcaagagttcagtgttactgatctcattggctctttgggtgttgaggagaaggcgagagcaaaggacaaccggggcaaaaatatcgagggaggttctagcgccaatttggtgcaaaataagaaccctcacgcatcccataacaacaacaagaagaaagtcaagcctgatgtcaaaccaaaggctacaaccaattttaagaagaaaggcaagggaaaggccaagggcgactgctttgtgtgcggtaagcctgggcattgggcgaagaattgtcctgatcgcaaggacaagaagtctgccaacatggttattagcgagggcggaggaacatcggggtacg

SEQ ID NO: 14845 - DNA, 846 bp, Oryza sativa
  Clone ID: TFbOSC19218j.C1.o1.fg
atgcaatgcttctatgtttcacagggcaaacgaagtgaaccgcctctctctcctaaggaggaggctaagtttgaggcttcggattgcctgttccgtggagcattgatcagtgtactcactgacaatatagtggacgtgtacatgcacatgccttcagggaaggacatgtgggatgcacttgaggccaagttcggagtttccgacgccgtcagcgagctgtatgtcatggagcagttctatgactacaagatgatgctggcaaaggaatttgagaacaacaactgtgagttgccggacaagtttgtggcgggtggcattattgccaaattgccaccttcttggtcggactttgctacttctctaaaacacaagaggcaagagttcagcgttactgatctcattggctctttgggtgttgaggagaaggcgagagtaaaggacaaccggggcaaaaatatcgagggaggttctagtgccaatttggtgcaaaagaagaaccctcatgcatcccacaacaacaacaacaagaaagtcaagcctgatgtcaaaccaaaggctacaaccaattttaagaagaaaggcaagggaaaggccaagggcgactgctttgtgtgcggtaagcctgggcattgggcgaagaattgtcctgatcgcaaggacaagaagtctgccaacatggttattagcgagggcggaggaacatcggggtatggtcgggagaggttcctccttgttgatgggaaacgggtcgcttgcggctgttcatggtgttggtacggtcgatctgaagtttacttcgggaaagaacgtgcagcatgtcccttcaataaagaagaatctagttag

SEQ ID NO: 14846 - DNA, 1754 bp, Oryza sativa
  Clone ID: TFbOSC31861j.C1.o1.fg
aagaaagtcaagctgatgtcaacccaaaggctacaaccaattttaagaagaaaggcaagggaaaggccaagggggactgctttgtgtgcggtaagcctgggcattgggcgaagaattgtcctgatcgcaaggacaagaagtctgccaacatggttattagcgagggcggaggaacatcggggtacggttattttttacctacagttctctctgtttttcattcacctgattggtgggttgatactggtgctaatattcatgtcgggagaggttcctccttgttgatgggaaacaggtcgcttgcggctattcatgtttttgatattgctgtgtacctattgaaaacaaaagatgaggcattgcattactttaagatctataaagctgaggtagaaaaccaacttgaaaggaaaatcaaacggttgaggtctgataagggtggagagtatttttccaatgagtttacgtccttttgcgaagagtttggaattattcatgagagaacgcctccctattcaccccaatcaaatggggtagccgaaagaatgaaccgcactctaactaagatggtgaatgccatgttagacactgcgggactttccaatgaatggtggggtgaggcaatttttactgcttgtcatgtcctgaataaaattccagtgaagcataaggaagtaacaccattcgaagaatgggaaaggaagaaattaaatctctcatacctacgcacatggggctgcttggccaaggtaaatgtacctatagccaaaaagcgtaaacttggaccaaagaccatagactgtgtgttccttggttatgctatccacagtgtgggctataggttcttaatagtaaactctggagtacccgacatgcgtgttggtacaattactgagtccagagatgccatattttttgagaatgaatttcccatgaaaaatacacctagcacgtctagtctagaacctgttttaccccatgagcactttgcaccgataaaacacaatgagcaaacgcttgagggaaatcctgaggaggatagcattgtagatactcgtaagagtaagagacaaagggttgcaaaatcctttggagatgactacattgtatacctcgtggatgacactccaagaaccatagaagaggcatattcatctcctgacgctgactactggaaggaggcagtacgcatcgttgagcgtccatatgggtgcaagcctgtaggatgcaaatgggttttcaagaaaaagcttaggcctgatggtacaattgaaaagtacaaggcaaggcttgtggccaagggttatacccaaaaagaaggcgaggattttttcgacacctactcaccagttgcccgcttgaccacgattcgagtactacttgctctggcagcctctcatggtcttctcgtccatcagatggacgttaagacagttttcctaaacggagagctggaggaggagatctatatggatcaaccagacaggtatgtactaaaaggtcaggagggaatggtgtgtaaactgttgaaatccttgtatggccttaagcaagcacctaagcaatggcatgagaagtttgaccccacacttacatctgctggctttgttgtgaacgaagctgataaatgtgcgtactatcgctatggtaggggagaaggagtgatcttgtgcttatatgtcgatgacatattgatctttgggaccagcttcaatgtgattgaggaggtcaaggactttctggggatcctctaa

SEQ ID NO: 14847 - DNA, 4791 bp, Oryza sativa
  Clone ID: TFbOSC401054j.C1.o17.fg
atggccgccaaatcctcccacgtcgccgcctctcccgcgcgactccctctcccgcgcatgccgcgctacaagcctgagtacttgtttggtgttgagggatttgtccaggagttgcgtacgatgtcctttgtcataggatttgggactgctcctttttatgcccagattcctcatgatcgtcacgaagaaaagtgccgagtcaaagtcaccttgaacagtaatagtgaagatatcccctcagtgatgttcgaagctggaggaagaaactatatccatgcatgtcaggaggtggcaaggatcgccataggagagctccgtgatcgctatagtgatcagttggccgacacggagtatcgctatcatcctcgccaaccacaaggaagtgaccgtggcagttaccttgagactgagggaattgagaatgatgctaccacaaggcatttggttgatatgctgtgggctatggatgaaacccgtgcggagactgtgttagcagctcaagatcgtgaagaccggaatcgtggtaagatttgcaagctagaagataaagtggatcgtttggagaaggaactagccgcgttgaagggagaagcaccaccgcagaaggccagggttcgtcttaccgcaagaaagagagctctatttgtccctcgctaccaattggcgccaaaggtccgtgtggtggaaaaagaagttaccccagccctagcagatcctccggtcgtcaatatggtgctcactcgcagcaacgggaatggccccaacaacaacaataacaataacaacaacaatggagagaatcccacacttgcccaagtcctggctcaacaggcacagcttatgaacatgatgatgcagcaactccagaaccagcagaaccagggaaataaccatgcacctccccagaacaagttagcagaatttcttcgtgtaaggccgcctactttctctagtaccactaatcctgttgaagctggagattggctgcatgccatagagaagaagttggatttgcttcaatgcactgatcaggagaaggtctcatttgcatcacaccagttgcatggccctgcctctgaatggtgggatcacttccgcttgaataggactactgctgaacctatcacttggcttgagttgaccgctgctttccggaagacgcatataccatcgggagtggtgtctctcaagaagaaggaattcaggtcgctcactcaggggtctcgctctgttacggagtatctgcacgagttcaatcgtctggctcgttatgctccggaagataagttggtggataaggctattcgtcaggaggacaagtacaatcgcatggagcaaaagaaacgccggattgctcaattcaagacacaacaggggaataatcagaggccgcgtcttactttgggaccccagtccatgccacagggaggttcttcgtctgttgttcgtccgcaacgtcagatcttcaacaacaatgcaggcaacaacatcagcaatcaagctccacgccctgttgcagtttcgacacagcaacaacctgccaagagggagcaaggcagcaagcccgtggtgtgtttcaactgtggagaaccaggacattacgctgacaagtgtccgaagccccgacgcgtgaaggttgtccctacccagagcaactctaccgtaccagtatcaaaggccagtgtcaaccatgttgctgctgcagaagctcaaggtgctccagatgtgattttgggtacgtttcttgttaacttagttcctgcaacagtgcctttcgattctggtgctacacattcattcttatctatgagttttgcgggaaatcatgggatggaggtagaagatcttagacgtcctttgatggttagtaccccaagtaatcaagcactctctttgcaacgtagcccctccgtcagaatagaaattcaaggagtaccatttctggccaatcttatcctgttagaatccaaagaccttgatgtcatcctagggatggactggttagccagacataaaggtgtgatagactgtgctaacagaaaagtaactctcaccagtgatgatggtcgagttgtaactgttcatgcattgtcttctgagtctttaaggtcaagtctgaaccaaataattttgaaagagattcctatagttcgggggtatcccgatgtgttcccagatgacttacctggtatgccacctaaaagggatatagagttcagaatagatttggtaccaggaacaactccgatccataagagaccttatagaatggcagccaatgagttggcagaagtcaagaggcaagtagacgatttgcttcagaaaggatacatcagaccgagttcatctccatggggagctccagttattttcgtggaaaagaaagatcatacccagaggatgtttgtggactatcgtgcactaaatgatgtgactatcaagaataagtatccgttgcccagaattgatgatttgttcgatcagcttaaaggtgccaccgttttctccaagatagatcttcgatcagggtatcaccaattgaggattaaagaggaagatatacctaagacagcttttaccactaggtatggattgttcgaatgtactgttatgtcttttggacttaccaatgcccccgctttcttcatgaacttgatgaataaggtgtttatggaatacctagacaagttcgtggtggtctttattgatgacattcttatctactctcgaaccaaagaagagcatgaagaacatcttcgccttgcactagagaagctacgagaacatcaactgtatgctaagtttagcaagtgtgagttttggttgtctgaagtgaagttccttggtcacgtcatctcagcaggaggagttgccgtcgatcctagtaatgtggaatccgtaaccaactggaaacaaccgaagacagtttcagagattcgcagtttcctaggcctcgcaggatattatcggaggtttatagagaatttttccaagattgctaagcccatgacacggctgcttcagaaagatgtgaagtacaagtggtcggaagaatgtgagcagagttttcaagaattgaagaatcgcttaatatcagctcctattttgattttgcctgatccaaagaagggtttccaagtgtattgcgatgcatccaaacttgggttaggttgtgttctgatgcaggatgggaaggtggttgcctatgcatctcgtcagttacgtccgcatgagaagaactaccctactcatgatcttgagttagctgcagtggttcatgcgttgaagatttggcgtcattatcttttcgccttagaagcgaagcccactctaattgatcaagttagagaagcccaaattaatgatcctgatattcaaaaaatcaagaagaatatgagaagaggaaaagctatcggtttcttggaggatgagcaaggaactgtatggttgggtgagagaatctgcgtccttgacaacaaagatttaaaagatgcaattctgaaagaagctcatgataccttatactccattcaccctggtagtaccaaaatgtaccaggatctcaaggaaagattttggtgggcgagtatgaagcgtgaaatcgcagaatacgtagcagtatgtgatgtttgtcagcgagtcaaggcagaacatcagaaacccgccggtttgctgcagcctttgaagattcctgaatggaaatgggaggaaatcggtatggatttcatcactggtctacccagaacgtcatcaggccatgactctatttgggtgatagttgacagacttaccaaagtggctcatttcatcccagtaaaaacaacatattccggaagtcggttggcggaattgtatatggcaaggattgtgtgtttgcatggagtccgtaagaaaatagtgtctgatcgaggcagtcagtttacttcaaatttttggaagaagcttcaggaagagatgggttctaagctgaactttagtactgcttatcatccgcagacagacggacaaaccgaaagggtgaatcagattttggaagacatgttgagagcttgtactttagacttcggtggaagttgggataagaatctaccttatgcggaattcttgtacaacaacagttatcaagctagtcttcagatggctccttacgaagcactgtatggtcggaagtgccgcactccgcttttgtgggatcaaacgggagagcgtcaggttttcgggacggatatcctaagggaagcagaagaaaaggtgaaaatcattcaagaaagattgcgtgtggcccagtctcgtcataagagttatgccgacaatcgtcgtagagatctaagttttgaagaaggagattatgtgtatcttcgtgtcacgcctcttcgaggagttcatcgtttccacactaaaggaaaattggcacctcgttttgtgggaccttataagattgtcagtagaagaggagaggttgcttatcagttggagttacctcaatctttggcaggagtccataatgtgttccatgtttcgcaattgaaaaagtgtttaagggtacctaccgaagaagctaatcttgaacagatagaagtccaagaggatctgacctatgttgagaaaccaatccgtatcttggaaacaaatgagagaagaaccagaaatcgagttatccgcttttgcaaagttaattggagtaatcactcggaagaagaatcaacttgggaacgagaagatgagttgaagtcagctcatccgcatctgttcgccagttcttccgaatctcgaggacgagattctgtttaa

SEQ ID NO: 14848 - DNA, 5061 bp, Oryza sativa
  Clone ID: TFbOSC401161j.C1.o43.fg
atgcacgcccgagccgccgagccgccgccgccggtggtgacgtcatcgccgacgtcatcgtcgccctctcccattccgtcgtttccggagagtccgttttcgcaggagaagagtttgaagagttccaaggccagcaaggcaactcctggtttggaatggtatattcctggtttggagataggactgtgcagccgggatggttgttcagaatggttgggcctatacaacaggatgccgcgctacaagcctgagtacttgtttggtgttgagggatttgtccaggagttgcgtacgatgtcctttgccataggatttgggactgcccctttttatgcccaaattcctcatgatcgtcacgaagaaaagtgccgagtcaaagtcaccttgaacagtaatagtgaagatatcccctcagtgatgttcgaagccggaggaagaaactacatccatacatgtcaggaggtggcaaggatcgccataggagagctccgcgatcgctacagtgatcagttggccgacactgagtatcgctaccatcctcgccaaccccagggaagtgaccgtggcagctaccttgagactgagggaattgagaatgatgctaccacaaggcatttggttgagatgctgtgggctatggatgaaacccgtgcggagactgtgttagcggctcaagatcgtgaagatcggaatcgtggtaagatttgcaagttagaggacaaggtggatcgtttggagaaggaactagccgtattgaagggagaagcaccaccgcagaaggccagggttcgtctcaccgcgaggaagagagctctatttgtccctcgctaccaattggtgccaaaggtccgtgtggtggagaaagaagttaccccagccctagcagatcctccggtcgtcaatatggtgctcactcgcagcaacgggaatggccccaatagtaacaataacaataacaatgaagggaacccaactcttgcccaagttcttgctcaacagacacagcttatgaacatgatgatgcagcaactccagaaccagcagaaccagggaaataaccatgcacctccccagaacaagttagcagaatttcttcgtgtgaggccgcctattttctctagtaccgctaatcctgttgaagctggtgattggctgcatgccatagagaagaagttggatttgcttcagtgcaccgatcaggagaaggtctcatttgcatcacaccagctgcatggccctgcctctgaatggtgggatcacttccgccttaataggattactgctgaacctatcacttggcttgagttcaccgctgctttccggaagacgcatataccatcgggagtggtgtctctcaagaagaaggaattcaggtcgcttacccagggatctcgctctgttaccgagtatctgcacgagttcaatcgtctggctcgttatgctccggaagataagttagtggataaggctattcgtcaggaggacaaatacaatcgcatggagcagaagaaacgccggattgctcatttcatgacgcaacaggggaataatcagaggccgcgtcttactttaggaccccagtccatgccacagggaggttcttcgtctgttgttcgtccgcagcgtcagttcttcaacaacaatgctggcaacaacatccgcaatcaagctccacgccctgttgcagctttgacacagcaacaacctgccaagaaggagcaaggcagcaagcccgtggtgtgtttcaactgtggagaaccaggacattacgctgacaagtgtccgaagccccgacgcgcgaaggttgtccctgcccagagcaactctaccgcaccagcatcaaaggcccgtgtcaatcatgttgctgctgcagaaactcaaggtgctccagatgtgattttggccccttctatcagaatagaaattcaaggagtaccatttctggccaatcttatcctgttagaatccaaagaccttgatgtcatcctagggatggactggttagccagacataaaggtgtgatagactgtgctaacagaaaaataactctcaccagcaatgatggtcgagttgtaactgtgcatgcattgtctcctgagtttttaaggtcaagactgaaccaaataactttggaagagattcctatagttcgggagtatcccgatgtgttcccagatgatttacctggtatgccgcctaaaagggatatagagttcagaatagatttggtaccaggaacaactccgatccataagagaccttatagaatggcagccaatgaattagcagaagtcaagaggcaagtagacgatttgcttcagaaaggatacatcagaccgagttcatccccatggggagctccagtaatttttgtggaaaagaaagaccatacccagaggatgtgtgtggactatcgtgcactaaatgatatgactatcaagaataagtatccgctgcccagaattgatgatttgttcgatcagcttaaaggtgccaccgttttctccaagatagatcttcgatcagggtatcatcagttgagaatcaaagaggaagatatacctaagacagcttttaccactaggtatggattgtttgaatgtactgttatgtcttttggacttaccaatgcccccactttcttcatgaacttgatgaataaggtgtttatggaatacctagacaagttcgtggtagtctttattgatgacattcttatctactcccgaaccaaagaagagcatatagaacatcttcgccttgcactagaaaagctacgagaacatcaactgtatgctaagtttagtaagtgtgaattttggttgtctgaagtgaagttccttggtcacgtcatctcagcaggaggagttgccgtcgatcctagtaatgtggaatccgtaaccaactggaaacaaccaaagacagtttcagagattcgcagtttcctaggcctcgcgggatattatcggaggtttatagaaaatttttccaagattgctaagcccatgacacgattgcttcagaaagatgtgaagtacaagtggtcagaagaatgtgagcagagttttcaagagttgaagaatcgcttaatatcagctcctattttgattttacctgatccaaagaagggtttccaagtgtattgcgatgcatccaaactggggttaggttgtgttctgatgcaagatgggaaggtggttgcctatgcatctcgtcagttacgtccgcatgagaagaactaccctactcatgatcttgaattagctgcagtagttcatgcgttgaaaatttggcgtcattatctttttggtactcgtacagaggtgtataccgatcacaagagtttaaagtatatctttactcagccggatttgaacatgagacaacggagatggttggaattaattaaggactatgacatgggaattcattatcacccgggaaaggctaatgttgtagcagacgctcttagcaggaaaggctattgcaatgctacggaaggacgacagttgccattggaattatgcaaggaatttgaaagattaaatttgggaattgtcagtacaggtttcgttgcagccttagaagcgaagcccactctaattgatcaagttagagaagcccaaattaataatcctgatattcaagaaattaagaagaatatgagaagaggaaaagctatcggtttcttggaagatgagcaaggaactgtatggttgggtgagagaatctgcgtccccgacaacaaagatttaaaagatgcaattctgaaagaagcccatgatactttatactccattcaccctggtagtaccaaaatgtaccaggatctcaaggaaagattttggtgggcaagtatgaagcgtgaaattgcagaatacgtagcagtatgtgatgtttgtcagcgagtcaaggcagaacatcaaaaacccgccggtttgttgcagcctttgaagattcctgaatggaaatgggaggaaatcggtatggatttcatcactggtttacccagaacgtcatcaggtcatgactctatttgggtgatagtcgacagacttaccaaagtggctcatttcatcccagtaaagacaacatattctggaagtcggttggcggaattgtatatggcaaggattgtgtgtttgcatggcgtccctaagaaaatagtgtctgatcgaggcagtcagtttacttcaaaattttggaagaagcttcaggaagagatgggttctaagctgaactttagtactgcttatcatccacagacagacggacaaaccgaaagggtgaatcagattttggaagatatgttgagagcttgtgctttagacttcggtggaagttgggataagaatctaccttatgcggaattttcgtacaacaacagttatcaagctagtcttcagatggctccttacgaagcactgtatggtcggaagtgccgcactccgcttttgtgggatcaaacgggagaacgtcaggttttcgggacggatatcttgagggaagcagaagaaaaggtgaaaatcattcaagaaagattgcgtgtggcccagtctcgccataagagttatgccgacaatcgtcgtagagatctaagttttgacgcaggagattatgtgtaccttcgtgtcacgcctcttcgaggggttcatcgttttcataccaaaggaaaattggcaccgcgttttgtgggaccttataagattatcagtagaagaggagaggttgcttatcagttggagttacctcaatctttggcaggagtccataatgtgttccatgtgtcgcagttgaaaaagtgtttaagggtacctaccgaagaagctaatcttgaacatatagaagtccaagaggatctgacctatgttgagagaccaatccatatcttggaaatagatgagagaagaaccagaaatcgagttatccgtttttgcaaagtccaatggagtaatcactcggaagaagaatcaacttgggaacgagaagatgaattgaagtcagctcatccgcatctgatcgccagtgcttccgaatctcgaggacgagattctgtttaa

SEQ ID NO: 14849 - DNA, 678 bp, Oryza sativa
  Clone ID: TFbOSC413091j.C1.o1.fg
atggagcagttatatgactacaagatggtcgatgaccgttctgtagtggaacaggctcatgagattcagatgctggcaaaggaacttgagaacaacaactgtgagttgccggacaagtttgtggcgggtggcattattgccaaattgccacctttttggtcagactttgctacttctctaaaacacaagaggcaagagttcagtgttactaatctcattggctctttgggtgttgaggagaaggcgagagcaaaggacaaccggggcaaaaatatcgagggaggttctagcaccaatttggtgcaaaagaagaaccctcacgcatcccacaacaacaacaacaagaaagtcaagcctgatgtcaaaccaaaggctacaactaattttaagaagaaaggcaaaggaaaggccaagggcgactgctttgtgtgcggtaagcctgggcattgggcgaagaattgtcctgatcgcaaggacaagaagtctgccaacatggttattagcgagagcggaggaacatcggggtacggtcgggagaggttcctccttgttgatgggaaacgggtcgcttgcggctgttcatggtgttggtacggtcgatctgaagtttacttcgggaaagaccgtgcagctgaagaacgtgcagcatgtcccttcaataaagaagaatctagttag

SEQ ID NO: 14850 - DNA, 6349 bp, Oryza sativa
  Clone ID: TFbOSC414575j.C1.o1.np
aaagaaatttgctggcagcagcagttccactcggcctcgtcttgctccatctcctgcggttcgtcctatggcacctcagccacctcggcagatgtatgtgcctccacgtccgcaaactcagttagttcgtcaagttcctcgcgcagttcaagctgcgggagatgcatctcgtaatgccaatgtcacctgctacaattgcggcaagaggggcattattctcctagctgtccttatccgaagactccagctccaacttttggaaggggccggctcaaccatgtcactgcagaagaagcaaccgacgcacctggtgtcgtacttggtacatttcttgtgcactccattcccttaacagttctttttgattccggtgcaactcattcattcatgtcaaccttgaaagcaaaacaacttgacttgaaaacagaatttcttagcgatgctatgcgcatccaatctcctggatccaccatggtcaccaaacttctatgcaaaggtgtagaacttataatagacggggtaaagtttaaagctaacctcatattattagacaccttgggcctaaatgtcattcttgggatggattggttaactaaacatgagggaaccattgattgtgctcatagaactgtaactcttcgtagcaccgatggtcaatttgttaggtttacctttgaacaaacctccacttcaaatcaaccctctatacaatctctctctataccggagttaaaatcagtacccatcgtgaatgaatattccgatgtgtttcctgacgaattaccagggatgcctccagatcgtgacattgaatttgtgatagatttaatccctgggacagcacctatagccaaaaggccatatcgaatgacttctgaaaatttgatggaattaaagaagcaactcaatgagcaattggctaaaggtttcattcgtcctagttcatctccctggggctgtccagtgttgtttgtaccaaagaaagatggaaccatgcgaatgtgcgtggattatcgacctctgaatgaagtcaccatcaaaaataaatatcctcttcctaggatcgatgatttatttgatcagttaaccggaactcgtgtcttctcaaaaattgatcttagattgggatattttcagcttaaaatcagaccggaggacattcctaaaaccgcattcacaactcgctacggtttatttgaatacaccgtagtctcttttggattaaccattgctcctgcttctttcatgaatatgatgaataaaatcttcatggaatatcttgataaatttgtggtggtattcattgatgatatactcatctactccaagagtgaagaggaacatgcgcaacatttacgtatggtactcgataaactccgtgagcatcaactttatgccaaattctcaaaatgtgaattttggttaaaagaagttgaatttcttggtcatgtactttctgaaggtggtattgctgtgaatccaagaaatgtacagaacgtacttaattggaagcaaccacaaaatgttcctgaaattagaagttttcttggactagctggttactaccgtcgtttcattgaaaatttctccaaaattgctaggcccttgactcaacttcttaaaaaagaaaataaattcatatggtctgaggcatgtgaaacaagttttcatgaacttaaaagaaggctcacaacagccccagtgctagtgatgcctgatgttcttaaaccttttaatgtttactgcgatgcctcacatcatggtctcggttgtgtactgatgcaagaaggaaaagtagtggcttatgcttctcgtcagttacgaccacacgagatcaattatccaactcatgacttagagctagcagctgtggtgcatgctctaaagatttggcgccattatttggtcagtaatcggtgcgaaatctttaccgatcataagagtttgaaatatttctttacccaaccagatctgaacctaaggcaaagaagatggttagaactcattaaagattatgatctcggtattcattatcatcccggtaaagcaaatgtagtagctgatgctttaagccggaagctacatcaccttgccgttattgagacaataaatcagccatcgttgtcctctgaatttcagaaattgaatttgggattggtagaggatggttatgttgctgcactagcattacaacctactctctattctcaaattaaagctgctcagtccattgatgaggaagtagctgaaattatgaaagaaatcaattcaaagccacaatctatatacactcttaattctgatggtatggttatgcttggcaaacgaatctttgttcccaataatcaacaccttcgagaaaccattcttgatgaagcacatcaaacacctttgtctatccatccgggttgcactaagatgtaccaggatattcgcactcaatattggtggcctagcctgaggcgtgacatagcagcatatgttgcaatttgcgatgtgtgccaacgtgtcaaagctgaacatcaacgacccgctgggctactccaacctttgcaagtacctgaatggaaatttgatgaagttggaatggattttattaccggtcttcctaaaacacccaatcatgtgacttatggtggagccaagctagcagagttatatttgactcatattgtaaggcttcatggcgtaccaaaagtcatagtatccgatcgaggaacacaatttacatccagattttggaaaaatttacatgaacttctcggaaccaaattgttcctcagcaccgcctttcatccacaaacaggaggtcaagtggaaagaacaaaccaaatacttgaagacatgctccgagcttgtgtgcttgaacataacactaactgggagaaatgtctatcttttgctgaattctcctacaacaatagctttcaatcaagtatccaaatgtcaccatttgaagctctttatgggagaaattgtaggactcctctttattggtccgaagtaggagaaagacaattctttggacctgctatcattaatgaagctgaaaagaatgtcactcttattcgggaccgattaaaagaagctcaaactcgtcaaaagagctactctgatcgtcgtcgacgagagctaagttttgatgttggtgaccatgtctatcttaaagtatcacccatgagaggcactcaacgattccaaattcatggcaagcttgctccacgatatattgggccataccaaataatatctaagcgtggacaagtagcctatcaattggaattgccatttcagttgtctaatatacatgatgtattccatgtttctcaacttaagaaatgtcttcgaactccgattgagcacacctcacttgaagacattaatctaaagccaaatctctcctatcaagaatacccaattctgaactcgcatgccacgcgtgtgagcacgcgtcgagcacgggagagggcgagctcctcctgtccatctccgccggcgaccatacttaacccgaccggccgttttgaggaagaagcactgcctcacatcctgtggcttatgctgcaacatctaggttatgatcatccaccggagtatcatttcttttctcatgagcggagttcatctctcgagcatatatggctgagctgtgtatacagggactttggacccatgaaccacccctttactttcaagcttgtggttgggatgcaccctcagcaatgcaggaagctgcattacaagcaattgtgtattaccgacattataggccagggttggacgggttctttcatttctttccagctcgcgcaaaccaatcctccgctaattactatccaggtcttgagggaaacatgagagagattgacactccaggactattcttagctggcctggttcgtgctatggatagatatctcgcaaaaactatggtggtcatgcttgatagacgaatagaaccactcgggcatcaaggacattttgataatgccatcatttatgggaatcatgaactccagcctcttacagagactttgcctcctcccatgggtatttatcataatacagctcatgtacttttgtactttgagtgcaggatgacacatactcactctatggctgctcttactgatgatgccaatggtgagggagcgagtcagcctcgcactggcccatattcttctggacgtgccgggggtagtcgccgtgctgccactgcagaacagcatgatgatgaaccatctcttgctcaactcctggctaatcagaaccgactttttgaaaggatggtagcgaactctgaaaacatgggggctgccatggcacagcaggccaatcaagcaccctccaagctagcagatgttcaacgaacacatccacctcatttctcctctgcggctgatccactcgcagcagatgattggcttcgtgatattgaaatcaagctgaacctttgccggtgtgatcctgtagagaaggctacctttgctgcttactacctgcaaggtgcagcagctgcttggtgggagacatacaagactctcattcctcctgacgagccaatcacttggactgttttccgtgagggattcaggtctgctcacatccctgctggtctcatggaaatcaaaaagaaagaatttcttaacttgaagcaaggaaacatgcccttcatggagttcatggaacgcttcaattatctgggtagatatgccgcttctgacttgaacactgaaacaaagaaggttgagctatgcagagatcgtcttgcacctgaactcaagcatgctcttgctgctcatgaaatcaccagcatgaagacactggttgataaagcccttcgtgttgaatcaagtgaaaaggaagtggttgaagaccgtaagcgtaagtgggctgcaattcctcgcgcagttcaagctgcgggagatgcatctcgtaatgccaatgtcacctgctacaattgcggcaagaaggggcattattctcctagctgtccttatccgaagactggaaaatccggaccgtactcacagggagcaccgcagcagcctcgtggggccggctcaaccatgtcactgcagaagaagcaaccgacgcacctggtgtcgtacttggtacatttcttgtgcactccattcccttaacagttctttttgattccggtgcaactcattcattcatgtcaaccttgaaagcaaaacaacttgacttgaaaacagaatttcttagcgatgctatgcgcatccaatctcctggatccaccatggtcaccaaacttctatgcaaaggtgtagaacttataatagacggggtaaagtttaaagctaacctcatattattagacaccttgggcctaaatgtcattcttgggatggattggttaactaaacatgagggaaccattgattgtgctcatagaactgtaactcttcgtagcaccgatggtcaatttgttaggtttacctttgaacaaacctccacttcaaatcaaccctctatacaatctctctctataccggagttaaaatcagtacccatcgtgaatgaatattccgatgtgtttcctgacgaattaccagggatgcctccagatcgtgacattgaatttgtgatagatttaatccctgggacagcacctatagccaaaaggccatatcgaatgacttctgaaaatttgatggaattaaagaagcaactcaatgagcaattggctaaaggtttcattcgtcctagttcatctccctggggctgtccagtgttgtttgtaccaaagaaagatggaaccatgcgaatgtgcgtggattatcgacctctgaatgaagtcaccatcaaaaataaatatcctcttcctaggatcgatgatttatttgatcagttaaataaatttgtggtggtattcattgatgatatactcatctactccaagagtgaagaggaacatgcgcaacatttacgtatggtactcgataaactccgtgagcatcaactttatgccaaattctcaaaatgtgaattttggttaaaagaagttgaatttcttggtcatgtactttctgaaggtggtattgctgtgaatccaagaaatgtacagaacgtacttaattggaagcaaccacaaaatgttcctgaaattagaagttttcttggactagctggttactaccgtcgtttcattgaaaatttctccaaaattgctaggcccttgactcaacttcttaaaaaagaaaataaattcatatggtctgaggcatgtgaaacaagttttcatgaacttaaaagaaggctcacaacagccccagtgctagtgatgcctgatgttcttaaaccttttaatgtttactgcgatgcc

SEQ ID NO: 14851 - DNA, 5315 bp, Oryza sativa
  Clone ID: TFbOSC422890j.C1.o3.np
aaattgtccatcggtgataggagacaacaatagcagtaaagtgggctatgttgaagaggcttgacaggatgttgatgaagatgacgatgtcggtgatccagtcaatagcggtgtagcaacggagattccgacgtttccggagagtccgttttcgcaggagaagaatttgaagagttccaaggccagcaaggcaactcctggtttggaatggtatattcctggtttggagatagaactgtgcagccgggatggttgttcagaatggttggtcctatacaacaggatgccgcgctacaagcttgagtatttgtttggtgttgagggatttgtccaggatttgcgtacgatgtcctttgccataggatttgggactgcccctttttatgcccagattcctcatgatcgtcacgaagagaagtgccgagtcaaagtcaccttgaacagtaatagtgaagatatcccctcagtgatgttcgaagctggaggaagaaactacatccatgcatgtcaggaggtagcaaggatcgccataggagagttccgcgatcgttacagtgatcagttggccgacactgagtatcgctaccatcctcgtcaaccacagggaagtgaccgtggcagctaccttgagactgaaggaattgagaatgatgctaccacaaggcatttggttgagatgttgtgggctatggatgaaacccgtgcggagactgtgttagcagctcaagatcgggaagatcggaatcgtggtaagatttgcaagctagaagacaaggtggatcgtttagagaaggaactagccgcgttgaagggagaagcaccaccgcagaaggccaggattcgtcttaccgcaaggaagagagctctatttgtccctcgctaccaattggtgccaaagatggtgctcactcgcagcaacgggaatggccctaacaacaataacaacaacaatggagagaatcccccacttgcccaagtcctggctcaacaggcacagcttatgaacatgatgatgcagcaactccagaaccagcagaaccagggaaataaccatgcacctccccagaacaagttagcagaatttcttcgtgtgaggccgcctaccttctctagcaccactaatcctgttgaagcaggtgattggctgcatgccatagagaagaaattggatttgctccagtgcactgatcaggagaaggtctcatttgcatcacatcagctgcatggccctgcctctgaatggtgggatcacttccgccttaacaggactactgctgaacctatcacttggcttgaattcaccgctgctttccggaagacgcatataccatcgggagtggtgtctctcaagaagagggaattcaggtcgctcactcaggggtctcgctctgttacggagtatctgcactagttcaatcgtctggctcgttatgctccggaagatgtacgcactgatgaagagcgtcaggagaagttcttggaaggacttaatgatgagctttcttatccactcatgactggagattatcctgatttccagaagttagtagataaggctattcgccaggaggacaagtacaaccgcatggagcaaaagaaacgccggattgctcaattcaagacacaacaggggaataatcagaggccgcgtcttactttaggaccccagtccatgccacagggaggttcttcgtctgttgttcatccgcagcgtcagttcttcaacaacaatgctggcaacaacatccgcaatcaagctccacgccctgttgcagttttgacacagcaacaacctgccaagaaggagcaaggcagcaagcccgtagtgtgtttcaactgtggagaaccaggacattacgctgacaagtgtccgaagccccgacgcatgaaggttgtccctgcccagagcaactctactgtaccagcatcaaaggcccgtgtcaatcatgttgcggctgcagaagctcaagatgctccagatgtgattttgggtacgtttcttgttaacttagttcctgcaacagtgcttttcgattctggtgctacacattcattcttatctatgagttttgcgggaaatcatgggatggaagtagaagatcttagacgtcctttgatggttagtaccccaagtaatcaagcactctctatgcaacgtagcccctctgtcagaatagaaattcaaggagtaccatttctggccaatcttatcctgttagaatccaaagaccttgatgtcatcctagggatggactggttagccaggcataagggtgtgatagactgtgccaacagaaaagtaactctcaccagcaatgatggtcgagttgtaactgttcatgcattgtcttctgagtctttaaggtcaagactgaaccaaataactttggaagagattcctgtagtccgggagtatcctgatgtgttcctagatgatttacctggtattcctcctaaaagggatatagaattcagaatagatttggtaccaggaacaactccgatccataagagaccttatagaatggcagccaatgagttggcagaagttaagaggcaagtagacgatttgcttcagaaaggatacatcagaccgagttcatctccatggggagctccggttatttttgtggaaaagaaagatcatacccagaggatgtgtgtggactatcgtgcactaaatgatgtgactatcaagaataagtatctgctgcccagaattgatgatttgtttgatcagcttaaaggtgccaccgttttctccaagatagatcttcgatcagggtatcatcaattgagaatcaaagaggaagatatacctaagacagcttttaccactaggtatggattgttcgaatgtactgttatgtcttttggacttaccaatgcccccgctttcttcatgaacttgatgaataaggtgtttatggaatacctagacaagttcgtggtggtctttattgatgacattcttatctactcccgaaccaaagaagagcatgaagaacatcttcgccttgcactagagaagctacgagaacatcaactgtatgctaagtttagtaagtgtgaattttggttgtctgaagtgaagttccttggtcacgttatctcagcaggaggagttgccgtcgatcctagtaatgtggaatccgtaaccaactggaaacaaccaaagacagtttcagagattcgcagtttcctaggcctcgcaggatattatcagaggtttatagagaatttttccaagattgctaagcccatgacacgactgcttcagaaagatgtgaagtacaagtggtcagaagcatgtgagcagagttttcaagaattgaagaatcacttaatatcagctcctattttgattttacctgatccaaagaagggtttccaagtgtattgcgatgcatccaaacttgggttaggttgtgttctgatgcaagatgggaaggtggttgcctatgcatctcgtcagttacgtccgcatgaaaagaactaccctactcatgatcttgagttagctgcagtagttcatgcgttgaagatttggcgtcattatcttttcggcactcgtacagaggtgtataccgatcacaagagtttaaagtatatctttactcagccggatctgaacatgagacaaaggagatggttggaattaattaaggattatgacatgggaattcattaccacccgggaaaggctaatgttgtagcagacgctcttagcaggaaaggctattgcaatgctacggaaggacgacagttgccattggaattatacaaggaatttgaaagattaaatttgggaattgtcagtagaggtttcgttgcagccttagaagcgaagcccactctaattgatcaagttagagaagcccaaattaatgatcctgatattcaagaaatcaaaaagaatatgagaagaggaaaagctatcggtttcttggaggatgagcaaggaactgtatggttgggcgagagaatctgtgtccccgacaacaaagatttaaaagatgcaattctgaaagaagcccatgatactttatactccattcaccctggtagtactaagatgtaccaggatctcaaggaaagattttggtgggcaagtatgaagcgtgaaatcgcagaatacgtagcagtatgtgatgtttgtcagcgagtcaaggcagaacatcagaaactcgccggtttgttgcagcctttgaagattcctgaatggaaatgggaggaaatcggtatggatttcattactggtttacccagaacgtcatcaggccatgactctatttgggtgatagtcgacagacttaccaaagtggctcatttcattccggtaaagacaacatattctggaagtcgattggcggaattgtatatggccaggattgtgtgtttgcatggcgtccctaagaaaatagtgtctgatcgaggcagtcagtttacttcaaatttttggaagaagcttcaggaagagatgggttctaagctgaactttagtactgcttatcatccgcagacagacggacaaactgaaagggtaaatcaaattttggaagacatgttgagagcttgtgctttagatttcagtggaagttgggataagaatctaccttatgcagaattttcatacaacaacagttatcaagctagtgttcagatggctccttacaaagcactatatggtcggaaatgccgcactccgcttttgtgggatcaaacgggagaacgtcaggttttcgggacggatatcctgagggaagcagaagaaaaggtgaaaatcattcaagaaagattacgtgtggcccagtctcgtcataagagttatgccgacaatcgtcgtagggatctaagttttgacgaaggagattatgtgtaccttcgtgtcacgccttttcgaggagttcatcgttttcacaccaaaggaaaattggcaccgcgtttttgtgggaccttataagattatcagtagaagaggagaggttgcttatcagttggaattacctcaatctttggcaggagtccataatgtgttccatgtgtcacaattgaaaaagtgattaagggtacctaccgaagaagctaatcttgaacagatagaagtccaagaggatctgacctatgttgagaaaccaatccgtattttggaaatagatgagagaagaaccagaaatcgagttatccgtttttgcaaagttcaatggagtaatcactcggaagaagaatcaactggggaacgagaagatgaattgaagtcagctcatccgcatctgttcgccggttcttccgaatctcgaggacgagattctgtt

SEQ ID NO: 14852 - DNA, 2160 bp, Oryza sativa
  Clone ID: TFbOSC423199j.C1.o4.gm
gcctccgaaaccacgtgctgctgcgacgtttgcacggacgggcgggctatcaggtttttggggagcgcaacgcgcgactactcattgttcgtcaacatctacttcaccttcaccaatatatcgaacactggagacaacggcaacactggatacaaggagaaggaggctcccgtcaacaccaacggaggcaatactgcctcaaactccagcggaggaccattcttgggtgtactcgctgacaatatagtggacgtgtacatgcacatgccttcagggaaggacatgtgggatgcacttgaggccaagttcggagtttccgacgccggcagcgagctgtatatgctggcaaagaaacttgagaacaacaactgtgagttgccggacaagtttgtggcgggtggcattattgccaaattgccaccttcttggttggactttgctacttctctaaaacacaagaggcaagagttcagtgttactgatctcattggctctttgggtgttgaggagaaggcgagagcaaaggacaaccggggcaaaaatatcgagggaggttctagcaccaatttggtgcaacagaagaaccctcacgcatcccacaacaacaacaacaacaagaaagtcaagcctgatgtcaaaccaaaggctacaaccaattttaagaagaaaggcaagggaaaggccaagggcgactgctttgtgtgcggtaagcctgggcattgggcgaagaattgtcctgatcgcaaggacaagaagtctgccaacatggttattagcgagagcggaggaacatcgggcctcaatgtgattgaggaggttaaggactttttgtccaaaagctttgaaatgaaggatttgggagtggctgatgttgttcttaacattaagctactgagaggagatgagggtgggattacacttgtgcaatctcactatgtggacaaggttttgagtcgctttggttatagtgactgcaagccagctccaactccttatgactccagtgtgctattaaggaaaaaccgaagaatagcaagggatcaattgagatactcccaaatcattggttcattgatgtacttggctagtgcaacgaggcctgacatctcatttgctgtgagcaagctgagccggtttgtttcaaatccgggagatgatcattggcaagctctggaaagggtcatgcgctatctaaagggtacaatgagctatgaaattcactatactggttacccaaaagtactggaagggtatagtgactcaaactggatatctgatgctgatgagataaaggccacaagtagatatgtgttcacacttggaggtggcgctgtttcctggaagtcttgcaagcagaccatcttaacgaggtcaacaatggaagcagaactcacagcactagatactgccacagttgaggccgagtggcttcgtgaactcctgatggatttgccggtggttgaaaaaccagtgccagctatcctaatgaactgtgataatcaaatagtgattattaaggcctccgaaactacgcgctgctgcgacgtttgcacggacgggcgggctatcaggtttttggggagcgcaacgcgcgactactcactgttcgtcaacatctacttcatcttcaccaatatgtcgaacactggagacaacggcaacactggatacaaggagaaggaggctcccgtcaacaccaacggaggcaatactgcctcaaactccagcggaggaccattcttgggtcacgcgcatcgcctcctcacccctgccagcgaggcgcccaccaccaacccacatacccacccccgcgaggggggaaaggaaggagaaagcctcccgcccccctcgccgccggcgaacgcgacggcgggcgcgtcaccacatgccgatatcctccggcatactcgcgccgacgcggggggcctcctcgtcgtcgtccgcggtggggaggaagctcctcctcctcggggctcgtcatcctccctcgtccgtggcggtggcgggtcgtggcgtctggcgaagggggcttgccggggtcggggtggcggcggcggcggcgtcgtcgtcttcgcccgacgagcttcacgcgcgcgggaggcccctccgcggcggcgcctacgaggagccttttgcaaatactcgattgagcagcagtag

SEQ ID NO: 14853 - DNA, 1350 bp, Oryza sativa
  Clone ID: TFbOSC18589j.C1.o1.fg
atggataacactggtaacaaaggctatgggaatgatggatccgatgactcaagaacccaagccagtgggaatgagaaaagcatcaacaaaacctcaccagagctaatccaaattgtggttaaccaaaccaacatgttggcaacagcctttcaactattacagtattggaacaacccagcaggggcaaccaacgttcaagtacctacagtccagcaacagtgcaagttatcagaatttctcaaaactgagcctccaacctttgccattgccgtcgatcctatggaagccagtgattggttgcgcacagtcgagaagaagctagggttgattcagtgcaccgaccaggagcgggttggcttcacaactcatcagttggttggaccggcttcagagtggtgggatagctacgaagcatcacggccagaaggacataccatcacctggaacgagttttcatctgtattcaagagatcacatgttcccgcaagaatgatcacactaagaaaacgagagtttcgctacctgaagcaaggagatttgaccgtcacagagtacctgcacgagttctatcgtttggctcactatgcaccagaagatgtggaaacggatgaagacaaacaagagaagtttctccaggggttaaaagatgagcttgcagtgcaactactcctagaggattatgaagattttgagaaacttgtggacaaagccatgcaactcgaaagtgagcataatcggatgacgaactgcaagagaaggattgtcaacatcccagtatttccatgtggtaaccaaagacagcgcactgagccacttcagatcaccggatcttctgttgcgcatcaagagttactaccccaagaagatggacacaacgcagacaacaacattagcaatactaatgctgatgataccaccaacaaccatggttcttgccccattcatgaccacttagatcaagcgtgcaatgtcaacagcattcaccaagatatcgacgatagtatcaatgaaggcacccagaatgacaaccctagcaattttgactctgagaaagactccaatggtgatagcaactatggtaccactgatgccaatgttagcaaggatttccaaccaccaattccaactccaagtcagaatgatcgttcccagacggacaactcagtaaagaagacattgatttgttacaactgcaaagaaccaggtcatttctccaaagattgtccacagccgaagcgtaacctgcgtcatcactccggccattatgcaagaagaagacaagtcactcgccttgtggtcactggagcaaacgccatacctgtgaggcctcgagttaatcataacccatag

SEQ ID NO: 14854 - DNA, 441 bp, Oryza sativa
  Clone ID: TFbOSC22584j.C1.o1.fg
atggctgccagcacgtcagtccacgcaactccccgcaatcagaagcttgctcctcagcgaattgtcatccatgcatcccgaagcagtcctatagcacgcgttgcaacagctccaactccaacgagtgcactaccacaaggtgtcaatgcaccatttcagtcccatccacctgctgacgagacagaggccagtatctgcgttgtacctttggatgttccaatacagcagctgataaatcaagtacaagatgaagaacccgagtgtaagaaagttattgtttgttacaactgtagtgaagaagggcattactcgagggactgtcctcaaccaaggcaaaatcggcccccacattttcgccaatttacaggaagcaaacatgccaatcgccaagtggtcactggagcaaatgcagtacctgttaagcctagtgctagtcaatag

SEQ ID NO: 14855 - DNA, 4105 bp, Oryza sativa
  Clone ID: TFbOSC401836j.C1.o9.np
cttgcacttcgagttcctcctccttttttcctgagctgcctacgcgcacaggtgtacaggatgagcaggtgcctccggaactccatccgcttgagaacttgcacgggtaggcgggcgatcaagtttttgggtatcgcttcaaacgcgactgctcttgttcttcgcggctactgctgctgcatcggtgccttcaccaagatgtcaacggagattggagacaagaagatgaacgacatcaacggaggcaatactgcctcaaaatccagcggtgggacgttctcggggtctttttcgatagttgactttgctgcatcactcaaaccagatgctttcgatggttcaaattataaaagatggaaagcacatacacttttgtggttgacggcgatgcattgcttctttgtctcactgggcaaaccgagtgaagcgcctctctctcctgaggaggaggctaagttcgaggcttcggattgcctgttccgtggagcattgtttagtgtactcgctgacaaaatagtggacgtgtacatgcacatgccttcagggaaggacatgtgggattctcttgaggccaagttcggggtttccgacgccaacagcgagcggtatgtcatggagcagttctatgactacaacatggtcgatgaccgttctgtagtggaacaggctcatgaaattcagatgctggcaaaggaacttgggaacaacaactacgagttgccggacaagttttactgatcttattggctctttgggtgttgaggagaaggcgaaggcaaaggacaactgaggcaaaaggatcgagggaggttttagcaccaatttggtgcagaagaagaaccctcacgcatcccacaacaacaacaagaaagtcaaacctgacgtcaaatccaaggctacaaccaattttaagaagaaaggcaagggaaaggcaaaagaagattgctttgtgtgtggcaagcctgggcattgggccaaggattgtcctgagcgcaaggacaagaagtttgcaaacatggttattagtgagggcggaggaacattggggtaaggtaaatttttacctacagttctctctgtctgtcactcacctgattggtgggttgatactggtgctaatattcatgtgtatgcggacatttccctgttttcttcttattaagtcgggagaggttcctccttgttgatgggaaatggatcgcttgcggctgttcatggtgttggtacagtcgatctgaagtttatttcgggaaagatcgtgcagctgaagaacgtgtagcatgtcccttcaataaagaagaatctagttagcggctctctactgtgtacagatggttttagacttgtgtttgaatccaataaatgtgtcatatctaaatatggaacgtttattggaaaaggttatgacagcggaggtttgtttcgcttttccttggatgatatgtgtaataaagttgtgaaccatgtaagcgatgatgatgatgagtccaatgtgtggcattcgcaactttgtcatgtgaattttggttgtatgacatgcttagccaacatgagtttaattccaaaattcactttagtcaaaggctctaagtgacatacttgagttcaatcgaaacaacctcgcaagcctcacaaggcatctgaggcgagaaatttggcaccactagaacttgttcattccgatctgtgagaaatgaatggcgtgttgactaaagggggaaagaaatatttcatgacactgatagaagattgcactagattctgctatgtgtacctattgaaaataaaggatgaagctttacattactttaagatctataaggctgaggtagaaaaccaactggaaaggaaaatcaaacggttaaggtctgataggggtggagagtatttttccaatgagtttacttctttctgcgaagagtatggaattatttatgagaggacgcctccctattcaccccagtcaaatggggtagccgaaagaaagaaccgtactctaactgagatggtgaatgccatgttagacactgcaggactttccaaggaatggtggggtgaggcaatattgactgcgtgccatgtcctgaatataattcctactaagcataaggaagtaacaccatttgaggaatgggaaaggaaaaaattaaatctctctgacctgcgcacatggggctgtttgtccaaggtaaatgtacctatagccaaaaagcgtaaacttggaccaaagaccatagattgtgtgttccttggttatgctatccacagtgtgggatataggttcttaatagtaaattctggagtacccgacatgcgtgttggtacaattactgagtctagagatgccacattttttgagaatgaatttcctatgaaaaatgcacctagcacttctagtcaagaacctattttatcccctgagcactttatgccgatagaacacattgatcaaacgcttgaggaaaatcctgaggacgatagcattgtagcaactcgaaagagtaagagacaaaggactgcaaagtcttttggagatgactacattgtatatcttgtgaatgatactccaagaactactgaagaggcatatccatctcctaacgctagctattggaaggaagcggtacacagtgagatggactcaattatgtctaatggtacttgggaagtcgtcgagcatccatatgggtgcaagcctgtaggatgcaaatgggttttccaaaaaaagcttaggcctgatggtacaattgaaaagtacaaggcaaggcttgtggccaagggttatacccaaaaagaaggtgaggattttttcgacacttattcaccggttgctcgcttgaccacgattcgagtactactcgcgctggcagcctctgatggtctactcgtccatcagatggatgttaagacagctttcctcaatggagagttggaggaggagatctatatggatcaaccagatgggtatgtactagaaggtcaggagggaatggtgtgaaagctgttgaagtccttgtatgttctcaaacaagcgcctaagcaatgacatgagaagtttgacaatacacttacatctgctggctttgttgtgaacaaagctgacaaatgtgtgtactatcgctatggtgggggagagggagtaatcttgtgtttatatgtcgatgacatattgatctttgggaccagccacaatgtgattgaggaggtcaaggactttctgtccaaaagctttgaaatgaaggatttgggagtggctgatgttattcttaacattaaactactgagaggagatgagggtgggattacacttgtgcaatctcactatgtggacaaggtcttgagtcgctttggttatagtgactgcaaggcagctcctactccttatgatcctagtgtgctattaagcaaaaacggaagaatagcaagggatcaattgagatactcccagattattggttcattgatgtacttagctagtgcaacgaggcctgacatcttatttgctgtgagcaagttgagccggtttgtttcaaatccgggagacaatcattggcatgctcttgaaagagtaatgcgctatctaaaagggacaatgagctatggaattagctccactgggtacccaaaagtactggagggctatagtgattcaaactggatatctgatgctgatgagatcaaggccacaagtgggtatgtgttcacacttggagggggcgttgtttcctggaagtcttgcatgcagaccatcttaacgaggtcaacaatggaagcagaactcacagctttagatactgccacagttgaggccgaatggcttcgtgagctcttgatggacttgccggtggttgaaaaaccggtaccagcaatcctgatgaactgtgataatcaaacaatgattattaaagtgaacagttcgaaggacaacatgaagtcttccaggcatgttaaaagaagactgaagtctgtcagaaagcagaaaaactccggagtgatagcattggactatgtctagacggctaaaaatctggcagatcagtttaccaaggggctaccacgtaatgtgatagactgtgcatcgagggagatgggcttgagacccact

SEQ ID NO: 14856 - DNA, 345 bp, Oryza sativa
  Clone ID: TFbOSC101188j.C1.o2.gm
atgcctcctccccctgatgagtgcccacccggccaccccatgtatgagagcacaatcatcatggctcatggcaaagtcggcaacagcagaagcaccaacaataataacaagcaaaggcatcaatcagctggaggccacatccacagggacagggaggggcgggccggcacgcacagtggatgccccgagcactacgttgttgtacacgccgtgctggagccatatgcccctgtaggctgggggccggcgcagaggagggtgggcggcagtggcagctcgaacaggcaggcccagcgtcctcggctgcttgtcatgttttgctgggtgccacgaaagtactcctaa

SEQ ID NO: 14857 - DNA, 1527 bp, Oryza sativa
  Clone ID: TFbOSC400446j.C1.o28.fg
atggctgacaatgagaaaggcaataaggtcagaagtcaggacattggtacctcaagctcccgagtgaatgaagcaccagacaccagttgtgtgacactggtccaacacctgattaaccagaaccgattgcctatagagatactacagcagcatcagacgccaattctgaacctgagtcagatacaacctcaagtgcagttggaggcagtccaagcactcacaccacaagtcagcatgccgccagcatcccgaaggacccatggtgacgtgccacatgttgactcaaaagaagcaagtatcatttgttttatgtgtgatgagcaagggcactatgcaagggagtgtcctcagcagaaaagaaaaacaccaatgcgaaccgaagatgaagtccgaatgacaaaacgtcagagaagaaataccttccgaggtgcaccacagttgacagagcatcttttagctaatggaggtagagtgtctgatagtgaagattcagatcaagtctcatcagatgatgaagatgaaatggaacgtaaggcatgctcttgttgtggagaaatcggtcatgttgccagctcgtgtgccactacatgcgttcattgtgaggaagaccatccacccgacaggtgtccaacgagcaggatcacttgtttcttttgtgaaggaactgatcatgtactaaaagattgtcaattcagttttctgctgacgaagaagatggccaaccaacccgccagttccaacggagagaagcatcaaggcaacacaaatcctcgccaagattacagtttcagcctaactccagtgccaggacagaggaatcaaaatgagaaaagaaaatgccgagtccgggaagatatctgttgcttcaattgtcaaggaatgggtcattttgccgacaagtgcccaagaccgagaaacatagctgccagcacgtcagtccacgcaactccctgcaatcagaagcttgctcctcagcgaattgtcatccatgcatcccgaagcagtcatatagcccgcgttgcaacagctccaattccagcgaatgcattaccacaaggtgtcaatgctcaatttcggccccagccaccagttgacaagacagaggccagtatcggcattgtacctttggatgttccagcacagcagccaagaaatcaagtacaagatgaagaacccgagccaccaaccattctctgcacctacggcctcagcaaagaattgtcgtcgatggaagaagttgtttctctccccgacctactccaggccgagcaaagggcaatcaacctccggagggcgataccaagcagaagaccgtcatccgcttcaaacagcaatcagaaggaagcttctcctgtgaatgatagcaatatgcagtcctatcacatcatcacagaaccaatcaaggatgatgcagtcactagaacaacgccagctatatctctccagaatcaaaatgagcagccacgcttgtggttttcagttcgctacttatcattgcgtaatcgaaagtttgcagcaatcatgtaa

SEQ ID NO: 14858 - DNA, 1668 bp, Oryza sativa
  Clone ID: TFbOSC400943j.C1.o6.fg
atggctgacaatgagaaaggcaataaggtcagaagacaggacattggtacctcaagctcccgagtgaatgaagcaccagacaccagttgtgtgacactggtccaacacctgattaaccagaaccgattgcttatagagatactacagcagcatcagacgccaattctgaacctgagtcaaatacaacctcaagtgcagttggaggcagtccaagcactcacaccacaagtcagcatgccgccagcatcccgaaggacccatggtgacgtgccacatgttgactcaaaagaagcaagtatcatttgttttatgtgtgatgagcaagggcactatgcaagggagtgtcctcagcagaaaagaaaaacaccaatgcgaaccgaagatgaagtccgtaagatgatcattaccagcaccgaatggcctccaccaggaatgacaaaacgtcagagaagaaataccttccgaggggcaccacagttgacagagcatcttttagctaatggaggtagagtgtctgatagtgaagattcagatcaagtctcctcagatgatgaagaggagaagtctccccaaggtttcaaccagaataaaatggaacataaggcatgttcccgttgtggagaaatcggtcatgttgccagctcgtgtgccactacatgcgttcattgtgaggaagaccatccacccgacaggtgtccaacgagcaggatcacttgtttcttttgtgaaggaactgatcatgtaccaaaagattgtcaattcagttttctgctaacgaagaacatggccaaccaacccgccagttccaacggagagaagcatcaaggcaacacaaatcctcgccaagattacagtttcagcctaactccagtgccaggacagaggaatcaaaatgagaaaagaaaatgccgagtccgggaagatatctgttgcttcaattgtcaaggaatgggtcatttcgtcgacaagtgcccaaaaccgagaaacatagctgccagcacgtcagtccacgcaaccccctgcaatcagaagcttgttcctcagcgaattgtcatccatgcatcccgaagcagtcctatagcccgcgttgcaacagctccaactccagcgagtgcattaccacaaggtgtcaatgctcaatttcagccccagccatcaattgacaagacagaggccagtatcggcattgtacctttggatgttccagcacagcagccaagaaatcaagtaccagatgaagaacccgagcataagaaagttattgtctgttacaactgtgagaaacatgagataatgaatgagtttgataagtttattgagggatccatgttaagattgcaagtgctcctcagcaaagacttgtcgtcgatggaagaagttgtgtctctccccgacctactccaggccgagccaagggcaatcaacctccggagggcgataccaagcagaagaccgttattcgcctcaaacagcactcagaaggaagcttctccggtgaataatagcaatatgcagtcctatcacatcatcacagaaccaatcaaggatgatgcagtcactagaacaatgcccgctatatctctccagagtcaaaatgagcagccacgcttgtggttttcagttcgctacctatcattgtgcagtcgaaagtttgcagcaatcatgtaa

SEQ ID NO: 14859 - DNA, 2535 bp, Oryza sativa
  Clone ID: TFbOSC400925j.C1.o17.gm
atgtcgtgcggtggaagttgtaactgcggttcctgcggatgcggcggtggctgcggaaagatgtaccctgacctggctgagaagatcaccaccaccaccactactgcaaccactgtcctcggcgttgcacctgagaaggggcactttgaggtgatggttggcaaggcagctgaatctggtgaggctgcccatggctgcagctgtggctccagctgcaagacgtcggaggagttcacgccggcggacggcgacctccggagttggacaagagtaggttcacgcaggcgctgcatccgcgacgccgtcaagcccaccaccgtggccagatgggtggtgtgggagatatggaaggagcagaatcagcggatttttgagcacaaggagtccacaacgacgtatctgcttaccaaaatcatagaggaggccaagctctggatgctggccggcgctagaaggttgcgtgagctcctgccacatcttgtacaaaagatgtaccctgacctggcagagaagaacaccaccaccacctcagtgaccatggtcctcggtgttgcacctgaaaaggggcacagcgaaccgggtttcgagttggctgccggctccggtgaggccggccatggctgcagctgcggctccagctgcaatgtggacatgttccccttttcaggaagatggcagaaaagtggttgtggcttggtggatagagaggtccgtagactcatcgccagtcgtcactccggcgacggtgaccaccatctaatcgccggtgggcactccgacgccggcgaccacctcccaacatcctctctcatgtcgcagctaggaaggacgtcctggcgtgatatcgtcctgtcgcgtcccgcagttaatgcggtggatcaacggggcgaagaagaccaggcattcaagaaggcaagaacagtcccccgctggctccaaggatgctgctttaactgcctggggctaggacaccagaaatccgcctgcccaggaagcacgcgatgctacaactgctggtactcagggcacatcgctaggaattgccctacctcccgtgcggctagggcgcagccggccactggttcaaaagaagtggcaacgaagccagcgggaggtgaaaaaccgcggaaagaagtgctagaagctttgcctcccagaaagaaggggcgagaagagggagtggctgctggtgatggcatggctagctttcagatctgcgctcagcagccctctcgggtcatgaaggagtggcggaccggggacgccaacatccggccggagtcggggcggtgcaccatctcctggacgccgcgcatggtggagacggaggccatcttcgagcagaaggtgctcctggccacagtgcttggcaaccagccagcgctctcacctagagatctggttgcggtgatcgtcgactgtggcatcctccccgcgcacttccgggtggaggtaacgacccctgaggactacctaattgtgtttcgttctgccagagaaaaggattgggtcctcggcaaatccaaacaagtcttcttccaaggggcgccaatcgccttcaagagctggaacaggcgcctgctggccagcagcacgaggttccaattcttcaccaagctgtcattagaagggcttccccagcacgcctgggatgaggaggcgatggcccagctgatccgtgagctgggtggagagttggtggagcttgttccgccggcggacgcgagggttctcaccatgttcgcctggctcaagaacccgtctgcggtgccaacaacgctggaggtggagatcccagagcgcgcggggggcggcccgccgtgctgggaacgtatggcgggatcaatcaggattccaagggcgcctctgcacaagtgcacgctgacgtacaatatcattgtgcacattgaggagatcattgacccgacgcccctccatgttcccctctccacggcctccaacgacgaagatgatgatgacgtcccgcgccaggttacgttctcctgctgggctggccgaatcgacggcacagggccgtggacgtcgaaacaaggcggaggtcggccttttggcggagcatctggctttgctggtgggctaccggggcgcacctggtcgacatcttcagttcagcgggtgtccgagatgatccctaccaaccccggcgcgctgagggataccgcccgcgacgacgagcacactgaacacgccggctcgggcctgcatgcttcggacagggatacgatagaggaacactcaagtggcgagcctgggaataggatggcggggaggggagatgatgctgcgtgtaatgtcgtgccgcgtgtgcttgccacgagcacggcgctggtggcggggagagacgttctggcgacggggaaagatgtgctggcgacggagaatggcgttctggcgacggggaaggatgtgctggcaacagggggcgagctctgcccgcgccagtcgccgctgtcgccgctccgctccaaaccgcccgccgtcgtcatcgccggcccccgccactccgcgcgctag

SEQ ID NO: 14860 - DNA, 5151 bp, Oryza sativa
  Clone ID: TFbOSC900409j.C1.o9.fg
atgtctttcgtgattagtttcacacttctcaccatagttaatgatgctataactggtaataatttgattagctcctggtttggaatgatgccgcgctacaagcctgagtacttgtttggtgttgagggttttgtccaggagttgcgtacaatgtcctttgtcattggatttgggactgcccctttttatgcccagattcctcatgatcgtcatgaagagaagtgccgagtcaaagtcaccttgaacagtaatagtgaagatatcccctcagtgatgttcaaagctggaggaagaaactacatccatgcatgtcaggaagtggcaaggatcgccataggagagcttcgcgatcgctacagtgatcaattggccgacactgagtatcgctaccatcctcgtcaaccacagggaagtgaccgtggcagttaccttgagactgaaggaattgagaatgatgctaccacaaggcatttggtggagatgctgtgggctatggatgaaagtcgtgcggagattgtgttagcagctcaagatcgtgaagaccggaatcgtggtaagatttgcaagctagaagacaaagtggatcgtttggagaaggaactagctgtattgaagggagaagcaccaccgcagaaggccaggattcgtctcaccgcaaggaagagagctctatttgtccctcgctatcaattggcgccaaagtttcccccggtttctcttcttgtgccctgtccatgccagatggtgaacactcgcagcaacgggaatggccccagtaacaataacaacggagagaatcccactcttgctcaagttcttgctcaacagacacagctaatgaacatgatgatgcagcaactccagaaccagcaaaaccaaggaaataaccatgcacctccccagaacaagttagcagaatttcttcgtgtgaggccgcctgttttctctagcaccactaatcctgttgaagctggtgattggctgcatgccatagagaagaagttggatttgcttcagtgcactgatcaggagaaggtctcatttgcatcacatcagttgcatggccctgcctctgaatggtgggatcacttccgtctgaacaggactactgctgaacctatcacttggcttgaattcaccgctgctttccggaagacgcatataccatcgggagtggtgtctctcaagaagaaggaattcaggtcgctcactcagggatctcgctctgttacggagtatttgcacgagttcaatcgtcttgctcgttatgctccggaagatgtgcgcaatgatgaagagcgccaggagaagttcttggaaggacttaatgatgagctttcttacccactcatgactggggattatcatgatttccagaagttagtggataaagctattcgccaggaggaaaagtacaatcgtatggagcaaaagaaacgccggattgctcaattcaagacacaacaggggaataatcagaagccgcgtcttactttaggaccccagtctatgccacagggaggttcttcgtctgttgttcgtccgcagcgtcagttcttcaacaacaatgctggcaacaacatccgtaatcaagctccacatcctgttgcagctccagcacagcaacaacctgccaagagggagcaaggcagcaagcccgtggtgtgtttcaactgtggagacccaggacattatgctaacaagtgtccgaagccccgacgcgtgaaagttgtccctgtccagagcaactctactgtaccagcatcaaaggcccgtgttaatcatgttgctgctgcagaagctcaagatgctccagatgtgattttgggtacgttccttgttaacttagttcctgcaacagtgcttttcgattctggtgctacacattcattcttatctatgagttttgcgggaaatcatgggatggaagtagaagatcttagacgtcctttgatggttagtaccccaagtaatcaagcactctctttgcaacgtagcccctctgtcagaatagaaattcaaggagtaccattcctggccaatcttatcttgttagaatccaaagaccttgatgtcatcctagggatggactggttagccagacataaaggtgtgatagactgtgctaacagaaaagtaactctcaccagcaatgatggtcgagttgtaactgttcatgcattgtcttctgagtctttaaggtcaagactgaaccagataactttggaagagatttctatagtccgggagtatcccgatgtgttcccatatgatttacctggtatgccgcccaaaagggatatagagttcagaatagatttggtacctggaacaactccgatccataagagaccttatagaatggcagccaatgagttggcagaagtcaagaggcaagtagatgatttgcttcagaaaggatacatcagaccgagttcatcaccatggggagctccggttatttttgtggaaaagaaagaccatacccagagaatgtgtgtggactatcgtgcactaaatgatgtgactatcaagaataagtatccactacccagaattgatgatttgtttgatcagcttaaaggtgctactgttttctccaagatagatcttcgatcagggtatcaccagttaagaatcaaagaggaagatatacctaagacagcttttaccactaggtatgggttgttcgaatgtactgttatgtcttttggacttaccaatgcccccgctttcttcatgaacttgatgaataaggtgtttatggaatacctagacaagtttgtggcggtctttattgatgacattcttatctactctcgaaccaaagaagagcatgaagaacatcttcgccttgcactagagaagttacgagaacatcaactgtatgctaagtttagcaagtgtgaattttggttgtctgaagtgaagttccttggtcacgtcatctcagccggaggagttgccgttgatcctagtaatgtggaatccgtaaccaactggaaacaaccgaagacagtttcagagatccgcagtttcctaggcctcgcaggatattatcggaggtttatagagaatttttccaagattgctaagcccatgacacgactgcttcagaaagatgtgaagtacaagtggtcggaagaatgtgagcagagttttcaagagttgaaaagtcgcttgatatcagctcctattttgattttacctgatccaaagaagggtttccaagtgtattgcgatgcatccaaacttgggttaggttgtcttctaatgcaagatggaaaggtggttgcctatgcatctcgtcagttacgtccgcatgagaagaactaccctactcatgatcttgagttagctgtagtagttcatgcgttgaaaatttggcgtcattatcttttcggtactcgtacagaggtatataccgatcacaagagtttaaagtatatctttactcagccggatctgaacatgagacaacggagatggttggaactaattaaggattatgacataggaattcattatcacccgggaaaggctaatgttgtagcagacgctcttagtagaaaaggctattgcaatgctacggaaggacgacagctgccattggaattatgcaaggaatttgaaagattaaatttgggaattgtcagtagaggtttcgttgcagccttagaagcgaagcccactctaattgatcaagttagagaagcccaaattaatgatcctgatattcaagagatcaagaaaaatatgagaagaggaaaagctatcggtttcttggaggatgagcacggaactgtatggttgggtgagagaatctgtgtccccgacaacaaagatttaaaagatgcaattctgaaagaagctcatgatactttatactccattcaccctggtagtactaagatgtaccaggatctcaaggaaagattttggtgggcaagtatgaagcgtgaaatcgcagaatacgtagcagtatgtgatgtttgtcagcgagtcaaggcagaacatcagaaacccgccggtttgttgcagcctttgaagattcctgaatggaagtgggaagaaatcggtatggattttatcactggtttacccagaacgtcatcaggtcatgactctatttgggtgatagtcgacagacttaccaaagtagctcatttcattccggtaaagacaacctattccggaagtcgcttagcggaattgtacatggcaaggattgtgtgtttgcatggcgtccctaagaaaatagtgtctgatcgaggcagtcagtttacctcaaatttttggaagaaacttcaggaagagatgggttctaagctgaactttagtactgcttatcatccgcagacagacggacaaaccgaaagggtgaatcagattttagaagacatgttgagagcttgtgctttagatttcgatggaagttgggataagaatctaccttatgcagaattttcgtacaacaacagttatcaagctagtcttcagatggctccttacgaagcactgtatggtcggaagtgtcgcactccgcttttgtgggatcaaacgggagaacgtcaggttttcgggacggatatcctaagggaagcagaagaaaaggtaaagatcattcaagaaagattgcgagtggctcaatctcgtcataagagttatgccgacaatcgccgcagagatctaagttttgaaggagattatgtgtatcttcgtgtcacgcctcttagaggagttcatcgtttccacaccaaaggaaaattggcaccgcgttttgtgggaccttataagattgtcagtaaaagaggagaggttgcttatcagttggagttacctcaatctttggcaggagtccataatgtgttccatgtgtcgcaattgaaaaagtgtttaagggtacctaccgaagaagctaatctcgaacagatagaagtccaagaggatctgacctatgttgagaaaccaatccgtattttggaaacagatgagagaagaaccaggaatcgagttatccgcttttgcaaagtccaatggagtaatcactcggaagaagaatcaacttgggaacgagaagatgaattgaagtcagctcatccgcatctgttcgccagttcttccgaatctcgaggacgagattctgtttaa

SEQ ID NO: 14861 - DNA, 118 bp, Oryza sativa
  Clone ID: TFbOSC405121j.C1.o1.hg
ctacggtggtggtggcggcggctaccccaccggtggtggtgacgaagacgacggcgggtgctacaactgcggcgagaccggccacatcgctcgcgagtgccccagcaagacctactag

SEQ ID NO: 14862 - DNA, 1696 bp, Oryza sativa
  Clone ID: TFbOSC15730j.C1.o2.np
atggatgaagtcgttgcgacgatggatatctctgaggcaaatgaaggctacgcgagctgtggctcggtaatcgagatgtctaggcaaatgaaggctacacgggtcggtgcccgggctcaatcctggcctgcctgtcccgggataccggccgtaggcagggttggatcggtacttttgttcacggctaggatgggtaaagggttatgtcacgttttttatgatgggttccaattgcaatggaatgcagagtaaaggcgtgtcttgtgggttggcctgggttggcttgggacgagctgggacccaggtcgggttgccagttcggtccgaatcatcgtaggccttgggttaaggcagtactaggtggtcagctttgcgaagaagaagatgtcgtcaattgtctgccgaagctccgcaagactgttggatctgctagcgaagcgagggaagcagtgaagccagatgtgaagcaggagaaaaagtgtagctctgttaaggtcctatccttagtttctgatctgtctctcccctttgtttttcctctctccctctccaaaacctgcaacagatggcggataatgagaaaggcaataaggtcagaagtcaggaaatgggtacctcaagctcccgagtgaatgaagcaccagacaccaattgtgtggcagtggtccaacacttgattaaccagaacaaattgcttatagagatactacagcagcatcggatgccaattctgaacccgagtcagatgcaacctcaggcgcagttggaggcaatccaagcactcacaccacaagtcagcgcaccgccaacatcccagaaggcccctcatgccatgtcacatgttgactcaaaagaagcaagtatcattggttttatgtgtgatgaacaagggcactatgcaaggaactgtcctcagcagaaaagaaaagcaccaatgcgaaccgaagatgaagtccgtaagatgatcattaccagtacagaatggcctccaccaggaatgacaaaacgtcagagaagaaattccttccgaggtgcaccatagttgacagagcatcttttagctaatggaggtagagtgtctgatagtgaagattcagatcaagtctcctcagatgatgaagatgagaagtctccccaagggttcaaccagaataaaatggaacataaggcatgctctcattgtggagaaatcggtcatgttgccagctcatgtgccactacctgctttcattgtaaggaagaccatccacccggcgagtgccccatgagcaggatcacttgtttcttgtgtgaaggaactgatcatgtaccaaaagattgtcaactcagttttctgctgacgaagaagatggccaaccaacatgcccgttctaatggagagaagcatcaaggcaacaccaatcctcgccaagattacagtttcagcctaactccagtgccaggacagaggaatcaaaatgagaaaagaaaatactgagtccggaaagatatctgttgcttcaattgtcaagaaatgtgtcatttcactgacaagtgcccaaaaccgagaaacatagctaccagcacgtcagtccacgcaactccccacaatcagaagcttgctcctcagcgaattgtcatccatgcatcccgaagcattcctatagcccgcgttgcaacagctccaactccagtgatgtggacccccatttttata

SEQ ID NO: 14863 - DNA, 1393 bp, Oryza sativa
  Clone ID: TFbOSC402673j.C1.o7.np
atggctgacaatgagaaaggcaataaggtcagaagtcaggacattggtacctcaagctcccgagtgaatgaagcaccagacaccagttgtgtgacactggtccaacacctgattaaccagaaccgattgcttatagagatactacagcagcatcagacgccaattctgaacctgagtcaaatacaacctcaagtgcagttggaggcagtccaagcactcacaccacaagtcagcatgccgccagcatcccgaaggacccatggtgacgtgccacatgttgacccaaaagaagcaagtaacatttgctttatgtgtgatgagcaagggcactatgcaagggagcgtcctcagcagaaaagaaaaacaccaatgcgaaccgaagatgaagtccgaatgaccagacgtcagagaagaaataccttccgaggtgcaccacagttgacagagcatcttttagctaatggaggtagagtgtctgatagtgaagattcagatcaagtctcctcagatgatgaagatgaaatggaatgtaaggcatgctctcgttgtggagaaatcagtcatgtcgccagctcgtgtgccactatatgcgttcattgcgaggaagaccatccacccgacaggtgtccaacgagcaggatcacttgtttcttttgtgaaggaactgatcatgtaccaaaagattgtcaattcagttttctgctgacgaagaagatggctaaccaacccgccagttccaacggagagaagcatcaaggcaacaccaatcctcgccaagattacagtttcagcctaactccagtgccaggacagaggaatcaaaatgagaaaagaaaatgccgagtccgggaagatatctgttgcttcaattgtcaaggaatgggtcatttcgccgacaagtgcccaaaaccgagaaacatagctgccagcacgtcagtccacgcagctccctgcaatcagaagcttgctcctcagcgaattgtcatccatgcatcccaaagcagtcctatggcccgcgttgcaacagctccaactccagcgagtgcattaccacaaggtgtcaatgctcactttcagccccagcaaagaattgtcgtcgatggaagaagttgtgtctctccccgacctactccaggccaagcaaagggcaatcgacctccggagggcgataccaagcagaagaccgtcatccgcttcaaccagcaatcagaaggaagcttctcctgtgaatgatagcattatgcagtcctatcacatcaccacagaaccaatcaaggatgcagtcactagaacaatgccagctatatctctccagaatcaaaatgagcagccatgtttgtggtttccagttcgctacttatcatggtgtaatcgaaagtttgcagcaatcatg

SEQ ID NO: 14864 - DNA, 1593 bp, Oryza sativa
  Clone ID: TFbOSC18392j.C1.o5.fg
atggctgacaatgagaaaggcaataaggtcagaagtcaggacgttggtacctcaagctcccgagtgaacgaagcaccagacaccagttgtgtgacactggtccaacacctgattaaccagaaccgattgcttatagagatactgcagcagcatcagacgccaattctgaacctgagtcagatacaacctcaagtgcagttggaggcagtccaagcacccacaccacaagtcagcatgccgccagcatcccgaaggacccatggtgacgtgccacatgttgactcaaaagaagcaagtatcatttgttttatgtgtgatgagcaagggcactatgcaagggagtgtcctcagcagaaaagagaaacaccaatgcgaaccgaagatgaagtccgtaagatgatcattaccagcacagaatggcctccaccaggaatgacaaaacgtcagagaagaaataccttccgaggtgcaccacagttgacagagcatcttttagctaatggaggtagagtgtctgatagtgaagattcagatcaagtctcctcagatgatgaagacgagaagtctccccaaggtttcaaccaggataaaatggaacgtaaggcatgctctcgttgtggagaaatcggtcatgttgccagctcgtgtgccactacatgcattcattgtgaggaagaccatccacccgacaggtgtccaacgagcaggatcacttgtttcttttgtgaaggaactgatcatgtaccaaaagattgtcaattcagttttctgttgacgaagaagatggccaaccaacccgccagttccaacggagagaagcatcaaggccacacaaatcctcgccaagattacagtttcagcctaactccagtgccaggacagaggaatcaaaatgagaaaagaaaatgccgagtctgggaagatatctgttgcttcaattgtcaaggaatgggtcatttcgccgacaagtgcccaaaaccgagaaacatagctgccagcacgtcagtccacgcaactccctgcaatcagaagcttgctcctcagcgaattgtcatccatgcatcccgaagcagtcctatagcccgcggtgcaacagctccaactccagctagtgcattaccacaaggtgtcaatgctcaatttcagccgcagccaccagttgacaagacagaggccagtatcggcattgtacctttggatgttccagcacagcagccaagaaatcaagtacaagatgaagaacccgagccaccaaccattctctgcaccgacagcctcagcaaagaattgtcgtcgatggaagaagttgtgtctctccccgacctactccaggccgagcaaagggcaatcaacctccggagggcgataccaagcagaagaccgtcatccgcttcaacccacaatcagaaggaagcttctcctgtgaatgatagcaatatgcagtcctatcacatcatcacagaactaatcaaggatgcagtcactagaacaatgccagctatatctctccagaatcaaaatgagcagccatatttgtggttttcagttcgctacctatcattgtgtaatcgaaagtttgcagcaatcatgtaa

SEQ ID NO: 14865 - DNA, 2394 bp, Oryza sativa
  Clone ID: TFbOSC20764j.C1.o4.fg
atggctgacaatgagaaaggcaataaggtcagaagtcaggacatcggtacctcaagctcccgagtgaatgaagcaccagacaccagttgtgtgacactggtccaacacctgattaaccataaccgattgcttatagagatactacagcagcatcagacgccaattctgaacctgagtcagatacaacctcaagtgcagttggaggcagtccaagcactcacaccacgagtcagcatgccgccagcatcccgaaggacccatggtgacgtgccacatgttgactcaaaagaagcaagtatcatttgttttatgtgtgatgagcaagggcactatgcaagggagtgtcctcagcagaaaagaaaaacaccaatgcgaaccaaagatgaagtccgtaagatgatcattaccagcacagaatggcctccaccaggaatgacaaaacgtcagagaagaaataccttccgaggtgcaccacagttgacagagcatcttttagctaatggaggtagagtgtctgatagtgaagattcagatcaagtctcctcagatgatgaagatgagaagtctccccaaggtttcaaccagaataaaatggaacgtaaggcatgctctcgttgtggagaaatcggtcatgttgccagctcgtgtgccactacatgcgttcattgtgaggaagaccatccacccgacaggtgtccaacgagcaggatcacttgtttcttttgtgaaggaactgatcatgtaccaaaagattgtcaattcagtttgctgctgacgaagaagatggccaaccaacccgccagttccaacggagagaagcatcaaggcaacacaaatcctcgccaagattacagtttcagcctaactccagtgccaggacagaggaatcaaaatgagaaaagaaaatgccgagtccgggaagatatctgttgcttcaattgtcaaggaatgggtcatttcgccgacaagtgcccaaaaccgagagacatagctgccagcacgtcagtccacgcaactccctgcaatcagaagcttgctcctcagcgaattgtcatccatgcatcccgaagcagtcctatagcccgcgttgcaacagctccaactccagcgagtgcattaccacaaggtgtcaatgctcaatttcagccccagccaccagttgacaagacagaggccacctttcaactattacagaattggaactacccagcaggggcaaccaacgttcaagtacctacagtccagcaacagtgcaagttatcagaatttctcaaaactgagactccaacctttgccattgtcgtcgaacctatggaagccagtgattggttgcgcacagtcgagaagaagctggggttgattcagtgcacagaccaggagcgggttgtcttcgcaactcatcagttggttggactggcttcagaatggtgggatagctacgaagcatcacggccagaaggacataccatcacctgggacgagttttcatctgtattcaagagatcccatgttcccgcaggaatgatcacactgagaaaacgagagttccgctacctgaagcaagaagatttgaccgtcacagagtacctgcacgagttccatcgtttggctcactatgcaccagaagatgtggaaaatgatgaagacaaacaagagaagtatctccaggggttaaaagatgagatcgcagtgcaactactcctagaggaatatgaagattttgagaaacttgtggacaaagccatacaactcgaaagtgagcataatcggatgaagaactgtaagagaaggattgtcagcatcccagtattcccagtggtaaccaaagacagcgcacggagccacttcagatcaccggatcttctgttgcgcatcaagagtttccgccccaagaagatggacacaatgcagacaaccacattagcaatactaatgatgatgatacccccaccaaccatgcttcttgccccattagtgaccactcaaatcaagcgtgcaatgtcaacatcattcaccaaggtgtcgacgatagtatcaatgatggcacccaaaatgacaaccctagcaattgtgactctgagaaagactccaatggtgatagcaactatggtttctctgaaagacagcacgcccaaggacctcattgccccagaagcatcctcaacacccggagcgaagagtacctggttgagaaaggtcgaaagtggtaacttgtatgaggttgactccgaagatatgaatcatgagaagttctggaacggaagcatcattaaactaccgcaacctagtctgagtcagctaaaaggtgcaccctggttcaagtcaggtgaagagaagattccatccgcaacagaaggtcaagccaagcagttccgagtggtgaagttttgctga

SEQ ID NO: 14866 - DNA, 1249 bp, Oryza sativa
  Clone ID: TFbOSC25016j.C1.o1.fg
atggctgacaatgagaaaggcaataaggtcagaagtcaggacgttggtacctcaagctcccgagtgaacgaagcaccagacaccagttgtgtgacactggtccaacacctgattaaccagaaccgattgcttatagagatactgcagcagcatcagacgccaattctgaacctgagtcagatacaacctcaagtgcagttggaggcagtccaagcacccacaccacaagtcagcatgccgccagcatcccgaaggacccatggtgacgtgccacatgttgactcaaaagaagcaagtatcatttgttttatgtgtgatgagcaagggcactatgcaagggagtgtcctcagcagaaaagagaaacaccaatgcgaaccgaagatgaagtccgtaagatgatcattaccagcacagaatggcctccaccaggaatgacaaaacgtcagagaagaaataccttccgaggtgcaccacagttgacagagcatcttttagctaatggaggtagagtgtctgatagtgaagattcagatcaagtctcctcagatgatgaagacgagaagtctccccaaggtttcaaccaggataaaatggaacgtaaggcatgctctcgttgtggagaaatcggtcatgttgccagctcgtgtgccactacatgcattcattgtgaggaagaccatccacccgacaggtgtccaacgagcaggatcacttgtttcttttgtgaaggaactgatcatgtaccaaaagattgtcaattcagttttctgttgacgaagaagatggccaaccaacctgccagttccaacggagagaagcatcaaggccacacaaatcctccccaagattacagtttcagcctaactccagtgccaggacagaggaatcaaaatgagaaaagaaaatgccgagtccgggaagatatctgttgcttcaattgtcaaggaatgggtcatttcgccgacaagtgcccaaaaccgagaaacatagctgccagcacgtcagtccacgcaactccctgcaatcagaagcttgctcctcagcgaattgtcatccatgcatcccgaagcagtcctatagcccgcggtgcaacagctccaactccagctagtgcattaccacaaggtgtcaatgctcaatttcagccgcagccaccagttgacaagacagaggccagtatcggcattgtacctttggatgttccagcacagcagccaagaaatcaagtacaagatgaagaacccgagc

SEQ ID NO: 14867 - DNA, 1404 bp, Oryza sativa
  Clone ID: TFbOSC401512j.C1.o1.fg
atggctgacaatgagaaaggcaataaggtcagaagtcaggacattggtacctcaagctcccgagtgaatgaagcaccagacaccagttgtgtgacactggtccaacacctgattaaccagaaccgattgcttatagagatactacagcagcatcagacgccaattctgaacctgagtcagatacaacctcaagtgcagttggaggcagtccaagcactcacgccacaagtcagcatgccgccagcatcccgaaagacccatggtggcgtgccacatgttgactcaaaagaagcaagtatcatttgttttatgtgtgatgagcaagggcactatgcaagggagtgtcctcagcagaaaagaaaaacaccaatgcgaaccgaagatgaagtccgtaagatgatcattaccagcacagaatggcctccaccaggattgacaaaacgtcagagaagaaataccttccgaggtgcaccacagttgacagagcatcttttagctaatggaggtagagtgtctgatagtgaagattcagatcaagtctcctcagatgatgaagatgaaatggaacgtaaggcatgctctcgttgtggagaaatcggtcatgttgccagctcgtgtgccactacatgcgttcattgtaaggaagaccatccacccgacaggtgtccaacgagcaggatcacttgtttcttttgtgaaggaactgatcatgtaccaaaagattgtcaattcagttttctgctgacgaagaagatggccaaccaacccgccagttccaacggagagaagcatcaaggcaacacaaatcctcgccaagattacagtttcagcctaactccagtgccaggacagaggaatcaaaatgagaaaagaaaatgccgagtccgggaagatatctgttgcttcaattgtcaaggaatgggtcatttcgccgacaagtgcccaaaaccgagaaacgtagctgccagcacgtcagtccacgcaactccctacaatcagaagcttgctcctcagcgaattgtcatccatgcatcccgaagcagtcctatagcccgcgttgcaacagctccaactccagcgagtgcattaccacaaggtgtcaatgctcaatttcagccccagccatcagttgacaagacagaggccagtatcggcattgtacctttggatgttccagcacagcagccaagaaatcaagtacaagatgaagaacccgagcgcagcaggctcaagtaccacctcgtcaccggaagcatccacaacactcggagtgaagagtacttagttgacaaaggtcaaaagatgattgatagaagatatcgaaaaagatgtttattaccgggcaaagaagtaggtcgaaaggtgattgataagagaaatcgggaaagaacacatcaaggttga

SEQ ID NO: 14868 - DNA, 2189 bp, Oryza sativa
  Clone ID: TFbOSC405209j.C1.o1.np
aaagaaagtgaatccgagttgcttccgcctcgcccgtgccctagcgccgccgccgccgcgaatcccgccgcttacgtccgtcccgcgtgcaatcaagaggggggaaatattccccgtgattccctccctctttccccccccccccatttttccctccctctctccctcggattcgtttggaaactcctcccctaacctcgccggcgcatcaatggcggccggatcttccgcgcccgtttccccctcatccggccgctctctccccctcccaaccctatataaacactccccgtgcctccctccgccgtttccgccactcgccgcactctctctccgccggaatcgagctcgcgccgtcgctctctctctccgccgtcgccgccgagctccggtccgccgctgtcctcgccccggaccatctcccgcctcggcgccgcctccttcggcttcgccgcaacctcgccgacctcgtccacctctccgtttcggtcgccgaccgccggaacgccgccgtcccggtcaacccgagccacgcagccgcccctctccgctccagtcgccgttcccgtcgtcgccgtcgacccggggtgagccgtggaccgccgattcgtttcccccttccctcccctctctcgggcgccgctccgccgcgccggtggtcgccggcggcgaccatcggggcgcgggcgcgccgcctcccgtcggctgtgccggcgtggccgccttcgggcgcgtcccgcggctgccatgtggggcccggccgtcagccgcccgcaccctcgggtgcggctgacgcattggacccacggcgctggccggtgtgagccgggtgcacccggtccaccgtggaccgtgagactgccgcgtgggccccactcccatggacccggacaaatgaaggctacacgagctgcggcccgatggctgacaatgagaaaggcaataaggtcagaagtcaggacattggtacctcgagctcccgagtgaatgaagcaccagacaccagttgtgtgacactggtccaacacctgattaaccagaaccgattgcttatagagatactacagcagcatcagacgccaattctgaacctgagtcagatacaacctcaagtgcagttggaggcagtccaagcactcacaccacaagtcagcatgccgccagcatcccgaaggacccatggtgacgtgccacatgttgactcaaaagaagcaagtatcatttgttttatgtgtgatgagcaagggcactatgcaagggagtgtcctcagcagaaaagaaaaacaccaatgcgaaccgaagatgaagtccgtaagatgatcattaccagcacaaaatggcctccactaggaatgacaaaacgtcagagaagaaataccttccgaggtgcaccacagttgacagagcaccttttagctaatggaggtagagtgtctgatagtgaagattcagatcaagtctcctcagatgatgaagatgaaatggaacgtaaggcatgctctcgttgtggagaaatcggtcatgttgccagctcgtgtgccactacatgcgttcattgtgaggaagaccatccacccgacaggtgtccaacgagcaggatcacttgtttcttttgtgaaggaactgatcatgtaccaaaagattgtcaattcagttttctgctgacgaagaagatggctaaccaacccgccagttccaacggagagaagcatcaaggcaacaccaatcctcgccaagattacagtttcagcctaaatccagtgccaggacagaggaatcaaaatgagaaaagaaaatgccgagtccgggaagatatctgttgcttcaattgtcaaggaatgggtcatttcgccgacaagtgcccaaaaccgagaaacgtagctgccagcacgtcagtccacgcaactccctgcaatcagaagcttgctcctcagcgaattgtcatccatgcatcccgaagcagtcctatagcccgcgttgcaacagctccaactccagcgagtgcattaccacaaggtgtcaatgctcaatttcagccccagcaaagaattgtcgtcgatggaagaagttgtgtctctccccgacctactccaggccgagcaaagggcaatcaacctccggagggcgataccaagcagaagaccgccatccgcttcaaacagcaatcagaagaaaggttctcctgtgaa

SEQ ID NO: 14869 - DNA, 1611 bp, Oryza sativa
  Clone ID: TFbOSC411277j.C1.o2.fg
atggctgacaatgagaaaggcaataaggtcagaagtcaggacattggtacctcaagctcccgagtgaatgaagcaccagacaccagttgtgtgacactggtccaacacctgattaaccagaaccgattgcttatagagatactacagcagcatcagacgccaattctgaacctgagtcaaatacaacctcaagtgcagttggaggcagtccaagcactcacaccgcaagtcagcatgccgccagcatcccgaaggacccatggtgacgtgccacatgttgactcaaaagaagcaagtatcatttgttttatgtgtgatgagcaagggcactatgcaagggagtgtcctcagcagaaaagaaaaacaccaatgcgaaccgaagatgaagtccgtaagatgatcattaccagcacagaatggcctccaccaggaatgacaaaacgtcagagaagaaataccttccgaggtgcaccacagttgacagagcatcttttagctaatggaggtagagtgtctgatagtgaagattcagatcaagtctcctcagatgatgaagatgagaagtctccccaaggtttcaaccagaataaaatggaacgtaaggcatgctctcgttgtggagaaatcggtcatgttgccagctcgtgtgccactacatgcgttcattgtgaggaagaccatccacccgacaggtgtccaacgagcaggatcacttgtttcttttgtgaaggaactgatcatgtaccaaaagattgtcaattcagttttctgctgacgaagaagatggccaaccaacccgccagttccaacggagagaagcatcaaggcaacacaaatcctcgccaagattacagtttcagcctaactccagtgccaggacagaggaatcaaaatgagaaaagaaaatgccgagtccgggaagatatctgttgcttcaattgtcaaggaatgggtcatttcgccgacaagtgcccaaaaccgagaaacatagctgccagcacgtcagtccacgcaactccctgcaatcagaagcttgctcctcagcgaattgtcatccaggcatcccgaagcagtcctatagcccgcgttgcaacagctccaactccagcgagtgcattaccacaaggtgtcaatgctcaatttcagccccagccaccagttgacaagacagaggccagtatcggcattgcacctttggatgttccagcacagcagccaagaaatcaagtacaagatgaagaacccgagccaataatacctttagcgccaaccattctctgcaccgacagcctcagcaaagaattgtcgtcgatggaagaagttgtgtctctccccgacctactccaggccgagccaagggcaatcaacctccggagggcgataccaagcagaagaccgtcatccgcttcaaacagcacccagaaggaagcttctcctgtgaatgatagcaatatgcagttctatcacatcatcacagaaccaatcaaggatgatgcagtcactagaacaacgccagctatatctctccagaatcaaaatgagcagccacgcttgtggttttcagttcgctacttatcattgtgtaatcgaaagtttgcagcaatcatgtaa

SEQ ID NO: 14870 - DNA, 1643 bp, Oryza sativa
  Clone ID: TFbOSC6554j.C1.o2.np
atcatgtttgtgtggtgtaccccggcttttcctgggacggggattaatacactagcgttcgggaaaaggcaattttcccggtcgcgacaagctgtactagatggtcaggtcagtgaagaagaagacatcgtcagttgtttgccgaagctccggaagactgcaggatccgctagcgaagtggaggaagcagtgaagccagctgtgaagcaggacaaaagacttagatctgttaaggtcctatccttagtttctaatctgtctctcccctttgttttccctctctccctctccaaacctttgcaacagatggctgacaatgagaaaggcaataaggtcagaagtcaggacattggtacctcaagctcccgagtgaatgaagcaccagacaccagttgtgtgacactagtccaacacctgattaaccagaaccgattgcttatagagatactacagcagcatcagacgccaattctgaacctgagtcaaatacaacctcaagtgcagttggaggcagtccaagcactcacaccacaagtcagcatgccgccagcatcccgaaggacccagggtgacgtgccacatgttgactcaaaagaagcaagtatcatttgttttatgtgtgatgagcaagggcactatgcaagggagtgtcctcagcagaaaagaaaaacatcaatgcgaaccgaagatgaagtccgtaagatgatcattaccagcacagaatggcctccaccaggaatgacaaaacgtcagagaagaaataccttccgaggtgcaccacagttgacagagcatcttttagctaatggaggtagagtgtctgatagtgaagattcagatcaagtctcctcagatgatgaagatgaaatggacgtaaggcatgctctcgttgtggagaaatcggtcatgttgccagctcgtgtgccactacatgcattcattgtgaggaagaccatccacccgacaggtgtccaacgagcaggatcacttgtttcttttgtgaaggaactgatcatgtaccaaaagattgtcaattcagttttctgctgacgaagaagatggccaaccaacccgccagttccaatggagagaagcatcaaggcaacacaaatcctcgccaagatttcagtttcagcctaactccagtgccaggacagaggaatcaaaatgagaaaagaaaatgccgagtccgggaagatatctgttgcttcaattgtcaaggaatgggtcatttcgccgacaagtgcccaaaaccgagaaacatagctgccagcacgtcagtccacgcaactccctgcaatcagaagcttgctcctcagcgaattgtcatccatgcatcccgaagcaatcctatagcccgcgttgcaacagctccaactccagcgagtgcattaccacaaggtgtcaatgctcaatttcagccctagccatcagttgacaagacagaggccagtatcggcattgtacctttggatgttccagcacagcagccaagaaatcaagtacaagatgaagaacccgagcgtaagaaagttattgtctgttacaactgtagtacctgttaaggaagcagacatgccaatcgccaagtggtcactggagcaaatgcggtacctgttaagcctagcgctagtcagaagcaa

SEQ ID NO: 14871 - DNA, 1275 bp, Oryza sativa
  Clone ID: TFbOSC19734j.C1.o1.np
agctcccgagtgaatgaagcaccagacaccagttgtgtgacactggtccaacacctgattaaccagaaccgattgcttatagagatactacagcagcatcagacgccaattctgaacctgagtcagatacaacctcaagtgcagttggaggcagtccaagcactcacaccacgagtcagcatgccgccagcatcccgaaggacccatggtgacgtgccacatgttgactcaaaagaagcaagtatcatttgttttatgtgtgatgagcaagggcactatgcaagggagtgtcctcagcagaaaagaaaaacaccaatgcgaactgaagatgaagtccgaatgacaaaacgtcagagaagaaataccttccgaggtgcaccacagttgacagagcatcttttagctaatggaggtagagtgtctgatagtgaagattcagatcaagtctcctcagatgatgaagatgagatggaacgtaaggcatgctctcgttgtggagaaatcggtcatgttgccagctcgtgtgccactacatgcgttcattgtgaggaagaccatccacccgacaggtgtccaacgagcaggatcacttgtttcttttgtgaaggaactgatcatgtaccaaaagattgtcaattcagtttgctgctgacgaagaagatggccaaccaacccgccagttccaacggagagaagcatcaaggcaacacaaatcctcgccaagattacagtttcagcctaactccagtgccaggacagaggaatcaaaatgagaaaagaaaatgccgagtccgggaagatatatgttgcttcaattgtcaaggaatgggtcatttcgccgacaagtacccaaaaccgagagacatagctgccagcacgtcagtccacgcaactccctgcaatcagaagcttgctcctcagcgaattgtcatccatgcatcccgaagcagtcctatagcccgcgttgcaacagctccaactccagcgagtgcattaccacaaggtgtcaatgctcaatttcagccccagccaccagttgacaagacagaggccagtatcggcattttacctttggatgttccagcacagcagccaagaaatcaagtacaagatgaagaacccaagccaatgggaatgatcacagtgcaactactcctagaggaatatgaagattttgagaaacttgtggacaaagccatacaactcgaaagtgagcataatcggatgaagaactgtaagagaaggattgtcagcatcccagtattcccatgtggt

SEQ ID NO: 14872 - DNA, 1985 bp, Oryza sativa
  Clone ID: TFbOSC12272j.C1.o5.np
atggatgaattcgttgcgacgatggatatctctgaggcaaatgaaggctacgtgagctgcggctcggtaatcgagatgtctaggcaaatgaaggctgcacgggccggtgtccgggctcaatcctagcctgcctgttcgggatacctaccgtaggcaaggttgggtcggtacttttgttcacggctaggatgggtgaagggttatgtcacatgtttacgacgggttccaaggccatggaatgcggagtaaagatgtgtcttgtgggttggccttggttggcttgggacgagctgggacccaggtcgggttaccagtttggtctgaatcatcgtaggcctttggttaaggcagtactagatggtcatctttgcgaagaagaagatgccgtcaattgtctgccaaagctccggaagactgttgggtccgctagcgaagcaaaggaagctgtgaagccagctgtgaagcaggagaaaaagattagatctgttaaggtgctatccttagtttctgatctgtccctccccttttgttttccctctctccctctccaaacctggtaacagatggctgacaatgaaaaaggcagtaaggtcagaaatcaggacaagggtgcctcatgctcccaagtgaataaagcaccagacaccagttgtgtggtagtggtccaacacctaattaaccagaacaaattgctcatagatctattacaacatcatcagacgccaattctgaacccgagtcagatgcaacctcaagtgcaatttgaggcagatcaagcacccacatcgccagacaacgtgccactagcatcccaacaggcccattgtgccatgccacatgtggactcaaaagaagctataatcatttgtcttatctacgatgaacaagggcactatgcaaggaactgtcctcagcagaaaagaaaagcaccaatgcgaaccgatgatgaagtccgtaagatgaccattaccggcacagaatggcctccaccaggaatgacaaaacgtcagataggaaatttctttcgtggtgcaccacagttgacccaacatcttttagctaatggaggtagagtgtctgatagtgaagattcagatcaagtctcctcaggggatgaagatgagaagtctccctaaggtttcaagcagaataaaatggaacataaggcatgctctcgttgtggagaaatcggtcatgttgctagctcatgtgtcactacctgccttcattgtgagaaagaccatccacccggcgagtgtccaatgagcaggatcacttgtttcttgtgtgaaggaactgatcatgtaccaaaagattgtcaattcagttttctgctgacgaagaagatggccaaccaccccgccagttccaacaaagagaagcatcaagaccacgtaaatcctcgacaagaatacagttttcagcctaactccagagtaggacagaggaatcaaaatgggaaaagcaaatcccgagttcggcaagatatcagttgcttaaattgtcaagaaattgggtcatttcgccgccaggtgcccgaaactgagaaacatagctgccagcatgtcagtccatgcaactccccacaatcagaagcttgttccttagcgaattgtcatccatgcatcccgaagcagtcgtatagcctgagttgcaacaactgagtgcactaccacaaaggtgtcaatgcttaatttcagccccagccaccagttgacaagacagaggccaatatctgcgttgtacctttggatgttccagtacagcagccgagaaattaagtacttgatgaagaacttgggcgtaagaaagttattgtttgttacaactgcagtgaagaaagacattactccagaaattgtccacaaccaaagcgtaacccgcgccatcattccggtcgttatgcacgaagaagacatgaccacaatatcagggtcactggagcaaatgcagtacctgttaagcctagtgctagtcagtagcaa

SEQ ID NO: 14873 - DNA, 1658 bp, Oryza sativa
  Clone ID: TFbOSC14650j.C1.o1.np
gtaagagaagctttggagaagaagtcctagatggtcatctttgcgaagaagaagatgccgtcaattgtctgccaaagctccggaagactgttgggtccgctagcgaagcaaaggaagctgtgaagccagctgtgaagcaggagaaaaagattagatctgttaaggtgctatccttagtttctgatctgtccctccccttttgttttccctctctccctctccaaacctggtaacagatggctgacaatgaaaaaggcagtaaggtcagaaatcaggacaagggtgcctcatgctcccaagtgaataaagcaccagacaccagttgtgtggtagtggtccaacacctaattaaccagaacaaattgctcatagatctattacaacatcatcagacgccaattctgaacccgagtcagatgcaacctcaagtgcaatttgaggcagatcaagcacccacatcgccagacaacgtgccactagcatcccaacaggcccattgtgccatgccacatgtggactcaaaagaagctataatcatttgtcttatctacgatgaacaagggcactatgcaaggaactgtcctcagcagaaaagaaaagcaccaatgcgaaccgatgatgaagtccgtaagatgaccattaccggcacagaatggcctccaccaggaatgacaaaacgtcagataggaaatttctttcgtggtgcaccacagttgacccaacattttttagctaatggaggtagagtgtctgatagtgaagattcagatcaagtctcctcaggggatgaagatgagaagtctccctaaggtttcaagcagaataaaatggaacataaggcatgctctcgttgtggagaaatcggtcatgttgctagctcatgtgtcactacctgccttcattgtgagaaagaccatccacccggcgagtgtccaatgagcaggatcacttgtttcttgtgtgaaggaactgatcatgtaccaaaagattgtcaattcagttttctgctgacgaagaagatggccaaccaccccgccagttccaacaaagagaagcatcaagaccacgtaaatcctcgacaagaatacagttttcagcctaactccagagtaggacagaggaatcaaaatgggaaaagcaaatcccgagttcggcaagatatcagttgcttaaattgtcaagaaattgggtcatttcgccgccaggtgcccgaaactgagaaacatagctgccagcatgtcagtccatgcaactccccacaatcagaagcttgttccttagcgaattgtcatccatgcatcccgaagcagtcgtatagcctgagttgcaacaactgagtgcactaccacaaaggtgtcaatgcttaatttcagccccagccaccagttgacaagacagaggccaatatctgcgttgtacctttggatgttccagtacagcagccgagaaattaagtacttgatgaagaacttgggcgtaagaaagttattgtttgttacaactgcagtgaagaaagacattactccagaaattgtccacaaccaaagcgtaacccgcgccatcattccggtcgttatgcacgaagaagacatgaccacaatatcagggtcactggagcaaatgcagtacctgttaagcctagtgctagtcagtagcaa

SEQ ID NO: 14874 - DNA, 972 bp, Oryza sativa
  Clone ID: TFbOSC414256j.C1.o5.fg
atggcggggaaggaggagggccggatcttcgtgggcggcctgtcgttccacaccgacgagcgcaagctggccgacgcgttccgccgcttcggcaaggtcgtcgacgcccagtggttcggtagcttttgtggctcttttgtgaaccaggtgatactgatcatgctggagagacacacccaacgccatcgtggttttggcttcgtgacattttcagatccagaggcagttgatagcgctattaaagaaatgcactgtcaagaattagatggcaggactatatcagtgaacaaggctgagcctaagatgaatacagatgacacaaggtatgaaagtggtggtggacgaggagagtatcgtggtggtagaggtgatggaccacccccaggcaattgctttgagtgtggccgtgctggtcattgggctcgtgattgccctaatcctggtggtggtcgttctgcgcgatactcttcttctaagttcagcgctggtggcagaggagaccgtttttctggatcagataggtttggagaccgttacatggatgatcgttatgatggtgggtaccgtgaacctgttgatgtcagagacaggtatggtggaggccgtgaccgatatgctaatgatcgatacccatcaggtggtgaccgctatgttccagacagatatggaggtcccgatcgctatcagcctagtagttatggccgggaacgagaaagaagctacgagagggatggagtgcgtggcaatggcggctatgataggagtggcccaaggggtggtggaagctatgacagggatggcccaaggggtggtataagtggtggctatgacagggatggcccacgtggcggtggtgttgaccgttacggtggtggagggcctgctcgttatgatggaggaagctacagggacagatctgggccgtatgaccgccctagcagaggaggacgctttgatgatcgcttccagtga

SEQ ID NO: 14875 - DNA, 1290 bp, Oryza sativa
  Clone ID: TFbOSC400702j.C1.o17.fg
atggcgcctcaaccaacctgtcagacttgtgtccgcaactaccttggttctaaggaagacctagctttgtcagaaaatccaaatcaactagctgaacaagtcaccaaccaagttgccaagactgataatactgttcctggaccaaacaaggaacccaaggtgaatccagacaagagtaaggatgaggccgcagaaatacaaggaacacaatcagtagaaggcactgatacccataaagagaagaacaaagaattcttaaatgtgatgattatagggatgaaaaccccacttcgagctaataattgccccaaccttcagaactcaatcaataaatccgtatcgcaagaaaatagcatggttaaagaaggaagttgtcacaaaagaaagaccttgccatcaaaagttgacatgcaagatgtcccacaatgtcagacaatgcaatcttgccaaaacttacccaagtcccccaccctcaaatcaaagaagatcagacacgttcccggactcatatgcttcatttgccacgaaattggccattacatgagacactgcccccaaaaaccctatatggatgcactactacaagctaatatgagcacctcaaggatgcccttctatccccaaggaagcccgaatttgcaaaatgttaatgcagtacgtccaaccttccctgatgacaaaagagcaaaagcatcctgtgacatgtgccaagacatccaagaaaagaaaaagatgcaagaatacaagagacgcaaagtaatgtccctagggatccaagcaaaagaaggtttgtgtcgaaaaacaaactcgccaacacaatactatcagaaagcatctcagcattcaaatggttccggttctacgtctctttcgactatgtcagaacctggtcagcaagccacaatgatcaacagtaatagccatgaaggaagcaactccgtaccatgccctacaccttcaaaaagacgtggtcataaggcaggagtcgaatgtttcacctgccatgagatgggacactattcgtgggattgccctcagaaagccaagatgaagtgccctcagaaagtcaagtcaaaacaagttcaacaaacaacaagccttcccaacgtatctggaccaaaaagttcaaagccaccaaacagtggttctgcctcgttgacctcaccgcccgttggacaaggtcgtctgaaccatgtgcaagtagaaacaaatggaaaagttgtgaatctcgagcaggttgaaagagcaggagaagaacaggttccacaggcaagagcagagccacaataa

SEQ ID NO: 14876 - DNA, 5073 bp, Oryza sativa
  Clone ID: TFbOSC416848j.C1.o3.np
atgtcgaacaaggtgaaccatgtagggaaggctcccatgtttaatggcacaaactactccactggaaaattaaaatatctactcacctcaaagctatgagcttccatatttggagtattgtggatgtaggctttgccatcactggcacacccttgacggagattgatcaccgcaacctccaactcaatgcccaagccatgaatgccttgttcaactctttgagccaagaggagttcgatagagtgagcaaccttgagaccgcatatgagatttggaacaagttggcggagatccatgagggtacaagtgagtacaaggatgccaagcttcacttcctcaagatccaatatgagacattctccatgttgcctcatgagaatgtgaatgacatgtatgggaggctcaatgtcattgtgaatgatctcaaggggcttggggcaaactacaccgatcttgaggttgcccaaaagatgcttagagccctaccggagaagtatgagacccttgtcaccatgctcatcaactccgacatgtcaagaatgacacccgcaagcctcttggggaagatcaacaccaatgacatgtacaagttgaagaagaaggagatggaggaagcctcaccctccaagaagtgcattgctctccaagccgaagttgaagacaagagcaagagcaaggtgaatgaagtcaatgaggacttggaggaagagatgatccttcttgctagaaggttcaatgatctcttgggaaggagaaaggagagaggaaggggctccaactccaataggagaagaaatagaagacccaataagactctctccaacttgaggtgttttgagtgtagtgagaagggacactttgcttccaagtgcccttccaaggatgatgatggagacaagtcatccaagaagaagagtggaggctacaagctcatgaagaaacttaagaaggaagggaagaagattgaggctttcatcggggaatgggactcaaatgaggagagctccgcctcatccgggtccgaggaagaaggtggtgatgatgcaagctccaagaagaagaagatggtcgttgttgccatcaaggaggctccatcactcttcgctccaatttgtctcatggcaaagggttcctctaaggtaacatctcttagtgatagtgagagtgatgatgattgtgatgatgtttcctatgatgagcttgtgagtatgtttgaggagctctatgcttatagtgagaaggatattgtcaagttcaaggccctaaagaaggatcatgcttctttggaggtcttgtatgagtagctaaagatctctcatgagagactcaccatttctcatgagaagcttaaggaagctcatgacaatctcctttccactactcaacatggagctcacattgatgttggcatatcttgtgatttgcttgatgatagtgctacttgccatattgctcatgttgcatcatctagtatttctacctcttgtgatgatcttatgtatatgcctagcccttgctctagttctagctcgtgtgtttctatttgtgatgcctcacttgttgttgagaacaatgagcttaaggagcaagtggctaagctcaacaagagtttggagagatgcttcaagggtaagaacactcttgacaaaattttgagtgagcaacggtgcatccttaacaaggagggacttggattcattccaaagaagggtaagaaaccttctcaccatgccactcgttttgtcaagagaaatggtaagtattgctacaagtgtcgtgaggttgggcatttggtgagtgattgccccgaaggtaagcctcctaagacatgtatgtttgattctcattatatgcttagtaaggctcatgatggtagcattgttgctagatatgtgggttcccctatactcggtggtaaaaagaatgccatttgggtgcccaaagctttggtctctaacctccaaggactcaaacaagtttggattattctcgctatacttgggtgttttttttgcatgataagtctattgttgccgagcttttcaaaaagtttgcaaaaagggcccaaaatgaatttagttgcactcttgtgaaaattagaagtgacaatggttccgaatttaagaataccaatatcgaggactattgtgatgatcttggtatcaaacacgaactttccgctacctactcacctcaacaaaatggtgtagtggaaaggaaaaatcgtacattgattgagatggcaaggactatgctagatgaatatggtgtttccgattccttttgggcggaagccataaacaccgcttgccatgcaaccaataggctttatttgcatcgtctcttgaaaaagacttcctatgagctaattgttgtgaggaagccaaatgtcgcctattttcgagtttttggttgcaagtgttatatttaccgaaagggtgttagactaaccaaatttgaaagtcggtgtgatgaagggtttcttctaggttatgcctcaaatagcaaggcataccaggtctacaacaagaacaaaggtgatgaaggcttgatgagagctatgaagaacatgtctattggagatgtcaagcctattgaagtggatgatgagccatctacttccgcctcgtcaagtcaagctcaagttgaagtggaagaggagaaggcacaagatccacctatgcctccaagaatacacaccgctctttccaaggatcacccaattgaccaagtgttgggtgacattagtaagggtgttcaaactcgatctcatgtcgcttcaatttgtgaacattactcgtttgtttcttgtcttgagccaaaacatgtagatgaagctctttgtgatccggattggatgaatgctatgcatgaagagctcaacaactttgcaagaaacaaggtgttgactttggttgaaagacctagagaccacaatgtcatagggacaaaatggatctttaggaacaaacaagatgagaacggattggtggtgagaaacaaggcaaggttggtggcgcaaggtttcacacaagttgaaggtttggactttggtgaaacttttgcccccgtggcaagacttgaggctattcgcatccttcttgcatttgcatcatgctttgatataaaactatttcaaatggatgtgaaaagtgcttttctaaatggtgaaattgcctaacttgtctttgttgaacaacctcccggttttgaagatcctaaaaatcctaaccatgtttacaaactctcaaaagctctttatggtttaaaacaagctcctaggcttggtatgaaagattgagagattttcttttgtcaaaggatttcaaaattggaaaagttgacaccactcttttcacaaaaatcattggtgatgatttctttgtgtgtcaaatttatgttgatgacatcatattcggttttactaatgaggtattttgcaaggaatttggtgatatgatgtctagggaatttgagatgtccatgattggagagttgagcttcttccttggacttcaaatcaagcaactcaaggatgggacgttcgtgagccaaaccaagtacatcaaggatctactcaagaggtttggcttggaggatgcgaggcccatcaagacacctatggcaaccaacgggcatctcgaccttgatgagggaggtaaaccggtagatttaaagctttatcgttccatgattggtagcttgctttaccttaccgcatctaggccggatatcatgtttagtgtttgcatgtgtgcacggtttcaagccgttcctaaggagtgtcacttagtggcctacccaaaaggtgctaaatttaagcttgttggctattccgattcgaattatgtcggttgcaaagtggatagaaagagcacatccggtagttgccaaatgcttgctatgcctccccgcactcggcatggtcgtcgtgcgcccacgcccgatcccgttagtgagaatgaggaatcaagcggagatgagtatgttcaaagtgatgaggacaatatggaaaatgttgagggtgatgagatggaagtaagtgatgatggtgatgacaatgagagtggaaatggtgaagatgatgaggcaagtgatgatgggagtcctttcgattcctccatccaatttgtgcttaatttgaggaatgctcaacaatacgctatcctccatcatcatgatcaatttcggaggcctaacgattgtaatgatccaagatttcatacacggttccaaaagtccgtgtatgtacaagtgtatgccaagaaagccttcaccgaacacaaatggatctcttggaggcacattggtgagacaccggagtttgagaatgtgcaagagatgttccggaccgttgggattgatagaattgtcaccatgaagcaaccttttgatgaagatctcatccggcaattctatgccaccgtatgggtgtccggcgattgtgatgcaatgaagtggatgtcggggaccctccgatgctctatcaaccgccgtgaattcaaggagctcttgcacattcgcttcaacaacggggatgaccttcatgatgagcacacccacaatcccttccccattgatcacttttctcagttttatgaagaagggggaaggcacacatatggaaaggtggcgggtttaagggctctcccaagtgtgatcaaccgcatagtaagggccaccatcctcccaagatgcggcaacaatgatgacatacgcggagttgcttggcatgttattgatgccattatggatggtcgtcggtttgatgttatcaactttatgatgaaggagattaccatctcaaaggggactattggacaaggaatctattatgctccctacataatgaggttgccgcctcctagacggcttgtggaggagttgcccggtgacctctccgagaagattgtggaggaggcccggcgccggtttgtgagtggtttggagttcaccaccttcggagtgaaggaagaactaccccgagtgatcgaggcttgggtagtcctctccgtgggccggctcccgccttgcccaccccttgacgaaggggacgtgcggtggcttcgtggt

SEQ ID NO: 14877 - DNA, 3126 bp, Oryza sativa
  Clone ID: TFbOSC900333j.C1.o17.fg
atggctggttttgccgatgcactgaggccagataaattcagcggtgtgcactttaagagatggcagatcagggtcactctgtggctgacagctatgaaatgcttctgggtgagtactggcaaacctgaaggagttcttactgctgaacagcagaagcaattcgaggaagccactactctctttgtgggatgcattcttagcgttcttggcgatcgtctggtcgaggtgtatatgcatatgaccgacgctaaggagttgtgggatgcactgaatactaaattcggtgctactgatgctagcaatgatctgtatatcatggagcaatttcatgactacaagatggctgacaaccgttctgtagtcgaacaggctcatgagatacaaaccatggctaaggaactcgaactccttaagtgtgtcttacccgacaaatttgtggccgggtgcattattgcgaaacttcctccatcttggagaagtttcggtactgcactcaaacacaagagacaggaatactctgttgaggggttgatagcgtctcttgatgttgaggagaaagctcaggaaaaagatgctgcgtctaagggcgatggtgggcagtccagtgccaatgttgtgcacaaggcccagaacaagagcaaggggaaatacaaagctcagcagaccaccaacttcaagaagcagaagaagaacaacaacaatcctaatcaggatgacaggacttgctttgtgtgtggccaacctgatcatctggctaggaagtgtccacagcgcaaggggatgaaggcacctgcagagcagacttctaagtctgctaatgtgaccattggcaacactggagatggaagcgggtatggtaatttacctactgttttttcagttaatcagtctactaattggtgggttgatactggggccaatgtcgcacggggttccaccgtcctaatggggaatgggtcacatgcttctgttcatggtgttggcacagtagatctgaagtttacttcgggaaagatcgtgcagctgaagaacggtggaaaacgatatttcatgatgttgattgatgatgctactagattttgctatgtgtacttgttgaaaacgaaagacgaggttctagactattttaaaatttataaggcagaagttgaaaatcaacttgacagaaagataaaaagacttaggtctgatcgtggtggagagtttttctcaaacgagtttgacttattctgtgaggaatatggcattatacatgagaggacgcctccctattctcccgagtctaatgggattgccgaaaggaagaaccgcacactgactgacttggtgaatgccatgttggacaccacgggactacctaaggcatggtggggggaggcattgttgacctcgaatcatgtgttaaacagagttcctaacagaaataaggacaaaacaccatatgagatatggattgggagaaaaccatcactttcttacttgcgcacatgggggtgcttgacgaaagtcaatgtaccaataacgaagaagcgcaaacttggacctaagactgtggactgtgtctttctgggatatgctcaccacagcattgcctatagatttttaatagttaaatccgaggtacctgacatgcatgttggtacaattatggagtctcgtgatgctaccttctttgagagctttttcccaatgaaggatacacatagtagttctagtcaaccttctgaaataattcccagttcaatcacaccaccagaacaaactgaacatacacataaacatgtcactgaggaggatgacagtgaagctcctcgaaggagtaaaagacaaaggatggctaagtcctttggtgatgatttcattgtgtacctcgtggacgacactcctaagtcaatttcagaagcatatgcatctcctgatgcagactactggaaggaggctgtccgtagtgaaatggattccattatcgctaacggaacttgggaggtgacagagcgaccctatgggtgtaaacctgtggggtgcaagtgggtgttcaaaaagaagctgaggcctgatggtaccattgaaaagtacaaggctcggcttgttgctaagggctatactcagaaagaaggcgaagatttctttgacacttactcacctgttgccagattgaccacgattcgtgtgctactttccctagcagcctcacatggtcttctcgttcatcaaatggacgttaagacagcttttcttaatggagagctggatgaggaaatctatatggatcaacctgatgggtttgtagttgaaggtcaagaagacaaggtgtgcaaattgttgaagtctttgtatggtctgaaacaagctcctaagcaatggcatgagaaatttgatagaacattgacatctacaggcttcgcagtcaatgaggcagataaatgtgtatactatcgccatggtgggggtgagggagttattctgtgcttgtatgttgatgacatactgatatttgggacaaatcttgaggtgataaatgaggttaaatcattcttgtctcaaaaatttgatatgaaggatttgggagtagctgatgttatcctaaacatcaagctaattagaggtactattgaattggggcttcactattctgggtaccctgcggtactagaaggatatagtgattcaaactggatctctgatgtggatgaaatcaaagccactagtgaatatttcttcacactaggtggtgatgctgtttcgtggaggtcttgcaaacagaccattttgacgaggtcaaccatggaagcagagttgatggcattggatactgctattgttgaggcagaatggctgcgtgatctattaatggatctgcctattgttgaaaaaccggtgccggctatccttatgaactgtgacaatcaaacagtaattgtcaaagtgaatagttctaaggataatatgaaatcgtctagacatgtgaaaagacgattgaagtctgtcaggaagttgagaaactccggagttataacgttggattacatccaaacaactagaaacctggcagatcccttcacgaagggactatcacgaaatgtgatagacaatgcatcgaaggagatgggtttgagatccatgtga

SEQ ID NO: 14878 - DNA, 2442 bp, Oryza sativa
  Clone ID: TFbOSC20909j.C1.o1.fg
atgggggaaaatcagggactggaacaagtaatgggtaaattggtagagatgcttgcaaagaagtttaatgaggctccaactacgagtagtgcagtggttcctcatactgaatcggtgcaaaaaattgagttgatgcaaaatgacattaagttggagggtgtaaaaaattatttgagttggtcaagaagagctttattgattttgaagacaaaggggttagaaggatatgttaccggggagataaaggagcctgagaacatatcaagtgttgaatggaagacttggagtactaccaactcgttagtagtagcatggttgttaacctcacttatccctgctattgctacaactgttgagaccatctctagtgcaagtgagatgtggaaaactcttactaatctctactcaagagaaggaaatgtgatgttaatggtggagacacaggagaagataagtgttttgagacagggggagcgttctgttgcagaatatgttgctgaattgaagcatttatggtctgatttggatcattataatcctcttgggttagagcaccctgattgtatagcaaaaatgagaaaatggattgagcgtagaagggtcattgagttcttgaagggcttaaattcggagtttgaaggaagaaggaatgcaatgtttcatcaaaccacccttcctaccttggatgaggctattgcagctatggcacaggagaagcttaagaagaaagtattgcctagtgccacaccatcttcaccaagccccacctatgtagttgcacaaagtaaagagactagggagtgcttcaattgtggtaaaatggggcaccttatacgtgattgccgcgctcctcgcaagcctagttatgggagaggaagatttggtgataggggtggagcaagaggtggaagaggttatgcagttctcattcaaattggatacttgactcgggtacatctagacatgtcacgggagagggaaacagggaagaaacttgggattggcgtcaggcgtgatggactttggtatttggatcgaaaggagacaagtgaagatgtatgtcttgcattgatggcttctacaagcgaagaagaggctaagaagacagatttaagttctttattcattgatcttgatgattcaactaatggtcatgatggtcaccaaatgaaagatgaaatattgggtccaaagggagatgaacaaccaaagaaggaaaagcttgtggttggttcaattccatgtcccatgggtggtcctgttgcacaggagcaagaatggaggaagccacatgaagagaaaaatcttcaagtatacacaaggagaacaaggtgtccagtaatccaacaagttgaagaggataatcaggtagaggaagatgtaagccgtgagcaaggatctttggagtcagggggagaagaagaggaagttagagaagaatctgacttaccaattgccattagaaagagtgtgagaagcaatgcagcatcactagattcagtgcaaatcccaaaggattggagagaagcaaagcaagatccaaggtggcatcaagctatgctagatgaactagaggctcttgaaaagaacaaaacatgggatcttgtaccatttcctaaagggaagaaaattgtcaactataagtgggtttatacagtaaagcaaaatcctgatggaaaggtggaaagatacaaagcaaggttggtggctaagggatatagtcaaacatatggaattgattatgatgaaacatttgcaccagtagcaaagatgagcacggtaagaactcttatatcttgtgcagctaattttgattggccattgcatcagttagatgtcaagaatgcattcttacatggagatcttcaagaagaggtgtatatggatgtcccacctggatttgccacttcacaaactaaaggaaaggtgttgagattgaagaaatctttgtatggtcttaaacagtcaccaagagcatggtttgatcggtttaggcgtgcaatgtgtgctatggactataagcaatgtaatggagatcatacagttttctatcatcattgtggagatcatataaccattcttgctgtctatgttgatgatatgattatcactggaaatgattgcttggagataactaggttgaaacggaatctaagcaaagaatttgaggtcaaggacctaggccagttgagatattttctaggtattgaaattgcaagatctcctagagggatagttatttcacagcgaaaatatgtattggacttgcttagtgaaacaggtaggcttggatgtcgcccagtctctacaccaattgatcaaaatcataagttatgtgcggagtctggagatccagtgaatagggaaagataccaaagattggtgggaagattgatatatctatgtcatacacgacctgacataacatatgctgtcagtatg

SEQ ID NO: 14879 - DNA, 2646 bp, Oryza sativa
  Clone ID: TFbOSC1445j.C1.o1.fg
atgaaattgaggttgatgagaggtacaaatcctataagatcagcatacattgcagctgataatagggaatgctacaattgtgggcaagtgggtcatgtgagctacaattgtcccacttcccggaacattggtggtaggggatcgattcgaggagggcatggtggaactcgtggtggatttagaggagaccgtggtgtttttgggggaaatcgtggtggtagaggaggtgatcgtggaggtcgtgttggaggtcgtggtaggggcagaggtgttcctcaggccaatgcagttaaggaggatgggaaagctgttaccctaataggtgaacaagtgacacaatgggaggaatggcagaagaacaagaccaatgagagctctaacaccaccactcactttggtaacttcgccaactacgcccaagtgggcgaaggtactcaggcacaggcacttgcatctacatatagacatcctatagattggatcatagactcaggagcatcaaagcatgtcacaggattgcataatactttcacatcatacaccccttatatccactctgaaactatccaaatcgctgatggtacatccaagcctattcatggtatagggtcggtagagtgcacatcatcaatgaacttgtcttctgttctgcatgttccttcctttccagttaaccttctctcaattagctcggctattgatcaactcaagtgcattgttgtatttgatgagaattcttgtctgttccaggagaaggggactgggaggaggattgggactggagtcacgcgtgatgggttgtggtacatcaatcatgaggaactgggactacctgcggtggttggagatgttgagaaggagatcagtttgcttcactatgaggggattattcaccagactacttgtcctggcacccctcctcaaaatggtgtagctgagagaaagaatcggcatttgctagaagtggcaagatctctgatgttccagatgaatgtaccaaagtatctatggagtgaggctgtgatgacagcagcatatcttatcaatcgcatgccttccagaatacttggtatgaagtctcctgccgaactgttattgggtaagcgagagttcaaggttcctccaaaggtgtttggctgtgtttgttttgtgcgagatcaccgaccttctgttggcaagttagatcctcatgcagtaaagtgtgtgtttgttggctatgcttcgagtcagaaggggtataaatgttgggatcccattgggagaagactgtttgtgagtatggatgtgacatttcgtgagtttgagccctattataaaagtaaaggagatcttgatcaatttcttgaggaattctcgactgtcatggaggttgatagtcgagagggggagagagagagaggtgacatacatgaaaaaaatgttggtgacaagaatggagaggcagtagtgattggatcaataccatgctctattgatgatgcgagtaaagtagtggaagtcattgaagatacacaagatgaggatagagaaatggtccctcatgaagaggatggagaagaaggagaagtagttgttgggacaattccatgtcctatggagggagccgaaagggtgaaacaaaaggatgtgctggtttaccaaaggaggcggtttgatagtcagggggagaaaagaaaagggttagtgcaaagtcaaattgaagagttaccacacccaaaatgtccagtccctgaatcctcccagagtctctctcctccagcctccttggcttctcttgagacaattggtaatacttctccaactcttgaacatgtagaattacctcttgtacaacgtagagagactagatccaatgctggtagacctcctatacgtcttggttttgagcatcttagttttatgcatgacattgcaaactatatcacatattctcatgtttcaccagcatacaaaacatttattgcatcattacagacaatgcctataccaaaggattggaagtgtgcaaagcaggatccaaagtggaaagatgcaatgaaagaagagttgaatgcccttgtgaagaataagacttgggagcttgtaaaacttccaccagaaaaaagggcagtgggatgtaagtgggtctttacagtgaagcaaacccctgaagggaaggtggataggtataaagcaaggttagtcgcaaaaggctatagtcaaacatatggaattgactatgatgagacatttgcaccggtggcaaaaatgggtacagtgagagctttggtatcttgtgcggtgaactttgggtggccccttcatcagcttgatgtgaaaaatgcatttctccatggtgatttacatgaggaggtctacatggagatccctccaggatttgggaatagccagacagttggaaaagtatgtaaactcaagaaatccttgtatgggttgaagcagtctccacgtgcatggtttgataggttcaggcatgcagtgtgtgatatggggtattctcagtgtaatggagatcacactgtcttttacaaacatagggggacacacatcaccatcttggctgtgtatgttgatgatatagtgatcactggtgatgatgtagaagaaatcaggtgtctaaaggaaaggctgggaaaggcatttgag

SEQ ID NO: 14880 - DNA, 1407 bp, Oryza sativa
  Clone ID: TFbOSC400358j.C1.o1.fg
atgccacttgaggatgctcatctcatttggaacacactcgaggagagatatgacaagtccgagtgtgatgaggcaaagctcgctatagaagaaccacttgtggagtgctcaaattcatcgacaatttgtaaagagcctcaagtgattctatccaatgagcaagatagtcttgccacattcacctcctcaccaacacatgtctccattaaaggtaatgaaatggtgagtagcgtcaatgtggatacttctacttcctatagtgcttgtcgaactaatcttttgaaggtagaagtatgtgggaaaaaatggccaagtgaagaatttacatctccaagatgctcatcttcacacttggatgaatattcttgcatcatggagaaatcatatttggagaaagaaaatctagagcttaaagctcaacttgtggagctcactagcaagcatgtggacctacaagaaaaatatgatgagcttttgtgctctcatggaaatcttgtggattcacatgccatgctagaagtaactcatgaggtgatcataataacggtaaaatcctatgtgcctcatgttcaagttgactttacatgtgctaactcttgttgctctcaagcaaatatttttctgcgcactacatgtgacttggattatgtagggaaaaaggataaatacatcgatcatggatttgtttgcaatgctcaaccttctcaagataaccgtgaaagcatgctgaagaagcttgagaagggatcaaccgtagcttgcaccaagttctatcaagaagataacaagtccaacaacaagagcaaggggcaagatcaaagcaagaacaaagcttccattacttgcttcaagtgcaagaaaatgggacatcatgtgagagattgcccttggaagaaacagaagaagttgagcaagaatgaggatcttgctcacaagttcttcaaatccaccaaagagggacactttgcctcaagttgtccttgcaagattgatgatgaagccacacttccaagaaagacatcaagaatcaacagaaggaagtgctacggttgcattgagaaggggcatgaaattggattttgtccgcacaagaaggatgatcatagcaatcgatcaagcaagaggcaaaccggcaacaagcaagtcaagaagcaagataaaagcaaaactcaactttgctacaattgccgggcaaagggacatattggtaaaaattgtcccattggtaaaattcctaagccaaacctctcatttcatcacaatttgcttaggaaggccaaaaatggcacttgtgctactagggtgattagttcgctacatgctagcacaaaggccatttgggtccctaaatctcttgtgactaacatccatggacccaacgtgatttgggtaccaaaatatgcttag

SEQ ID NO: 14881 - DNA, 4491 bp, Oryza sativa
  Clone ID: TFbOSC400459j.C1.o7.fg
atgtcttcagtggttggaaaggaggttgtagatgcttcctcacttatcactaagggtgatatgaaggatttgctagaggatttgttgaagatgggcatgataggtcagaggaatgtagcaggagggtctaaactgaaactagaagtgatgccaagtgagttgaggttggaagggagcaaaaattatttgagttggtgtaggagagctcaactaatgttgagagcaaaaggggtggatcattttttgcaagagggttgtgaagagccctctgataaggagagccaagcatggaggacatggaatacaacaaatttaacagttatgctattgaagcatgaggaggacattgtgattggaaataaatggatgcagaggcgaagagtcattcatttcttgaaggggctgaacaaggagtttgaggatagaagagcggctatgttccaccaggctacattgcctactatggaagaggttatttttgctatggtgcaggagatgaggttgaaactgatgagaggcacaaatcttacaagatcagcatacactgtggctgataatagggaatgctacaactgtggacaagtgggtcatgtgagctacaattgtcccactcctcggaacattggcggcagggggttaattcgaggagggcatggtggatttggtggaacccgtggtggatttggaggagaccgtggtggctttgggggaaaccgcggtggtagaggaggtgactggagaggtcgcggtggaggtcgtggtaggacagaggttctcctcaggccaatgcagccattgaggagggagaagggactgggaggaggattgggactggagtcaggcgtgatgggttgtggtacatcaatcatgaggaactggataggttggcatttttgggacggagtagtggtgatggtaaatctatcatcatttttactattaccacctaataactacttaaattatccgcattggctccacctctctcctcccctctccgcgtgggacggtgtccgtggcgtcgcggcatcggccacgggcgggacaactgttcctgtgattaatccggccgtttccgcggcggatccagcatcagtggtgggcgagaaactgaaggcggccgttcttgcagcgaacccagtgttggcggcatcggcaatgggcgggggtagtatcggtcatgttggcggcaggcgaggcggtcgttcttgtgtcagatccggtgtcgacagtgggtggggcggcctatttaatgctatagatactattctaattattgggagaggagctttctcgatcgcaatcatggagctggtgatgggggcaatggaaaacctgatccccaagttgggtgagctgctcaaggaagagtacgtcatgcagtcgggcgtgagagagaagatccagtctgtctcacgggagctcgagagcatccacgctgctctccgcaagatcggcaaggtgccatgggagcatcttgacgatgagttgaggctttgggcgcacgaccttagggaggcgtcgtatgacatggaggacatcatcgactccttccttgtgcgcgtcgacggccatgaggcaagtgaagttcactggttcaaatggttcttggagaagatgaccaaccagttcaacaagatcaaggctagccatgaaatcggtgtcgcaatgaaagaaatcgatgagaagctccaggaggtggctaccaggcatgcgaggtacacaatcgacaatattgccatcaatcctgcaggcccagcaactgtcgatcctcgtctcttgagtatgtacaaaacattggcagagcttgttggaattgaggggcccatggatgagctcatgaagatgttggatattgatttgccgaccaagaagaggaagatcgaaatcgatgtgtccgttagaaaaccgaagatggtatccatctttgggtttggaggacttggcaagaccactcttgccaaagcagtctacgacaagcttaaaccaagttttgattctggggctttcattccggtcggtcagaatcctaatattaggaaagtttttagggatattctcatggatcttgacaagcagtcatacaatgacttaaatctaaagctgctggacgaaaggcaactcatcaacaaactccaggaattcctccaaaaaaagaggtgttttgtagtcattgatgacatatgggataaggattcatggaggttaattagatgtgcactacaagacagtaaccatgaaagcagagtagtcacaactactcgtatttatgaagttgccacacaagtgggcgaagtttacaaaatgcatccactttctcatgatgaatcaaaaaaattattgtacacaagaattattagcggtgaaggtgagtctctccgtagtacatcggttgaggcatgtgacaaaatactaaagaaatgtggcggtgtgcctttagctatcatcataatagctagtctgttggccaataaaccaagggaatactggtccgaagtgtataactctattggtttagaacatggatacaatgatgacgtagataatacaagaaggatattgtctttgagctactatgatttgccgttgcatctgaagccgtgcttattgtacctaagcatatttccggaagattattatattgagaaaaatttgttaatatggaagtggatagcagagggttttgtacatgagaaacaagcagcaaagttagggttatttgaaaccggggagggatatttcaatgagttgataaacagaagcatgatccagccagttgagcatgaatactcagggtacatgtgtggttgccgtgttcatgacatggtacttgatctgatcctcttattgtcaggtgaagaaaactttgtcactgtagtagatggcagtaaggaacatgaactttcatggaaaaatgcccgtagattagctctacaacattggagttttgaagagaacaggaatcagttggctaatatgggtgtgaagcaaacaaggtcccttattatgactgagtgctttgataagaacatgcaattaccgagcttccaagttttacgtgtactagaaatacaaaagcaaggccgttggtggaacattgatggtaaaattaacctgcagcatgttagaaatttacttcaccttaggttcctccatctagattgtattgattctattcctctcatagagcaattcagaaatttgaggtttctacaagtacttcatctgaaggaatctaacatacaagagctgccagagtcagtgggcctgctaacaaaattgctgtccctacgtgttgatattgatgtaagggtgtcgcctggtgtgatcgagaagctgacgtccttacaggagctgtatttgtggccttatagtgatgatacgttccagttcgtgaaggtcctaggcaagctgagggaactgagggtgctgcatgctaaaaaccttaagcttgatggacagggcgagacatcagcactgctggagtccctatgcaatctgcacaagatccaaactttggacattgacctaaatcttaatccaaatgagggtgtcacgtgggatgcaggattcacttcccctcaatgcctccgatacctctgcttggtgtctttgaggtttcatagaatgccagagtggattaattggtcgcttcttccaaacctctcttatcttgaattgagagtgaattttttggaagagctagaccttgaaacccttgggaggttaccaaaactacgatacctccatctgtttatacactgcgacaggatagtaagcatcgggaagattgccggtgctggtgatgcctgcttccaagagttgagatttttgaacacaccctacttgtatgtccggtttgatcagcatggcatcatgtgcagcaaagacgaaaaagctgtcatgccaaacgtcaaaactctcagtttttgtgtttatgtgcggatcctaaaagataccgacatacttggatttgacaagctgtttagcttcgctcatcttggaagaagttcgctccaacaagtccaagttaacatccaatgtcgtggtgctcgtgccatggaagtcgaggaagcggaggcggcgttggcacacgcagccgccatccatcccaaccgtccaacccttcaaatccataagttttcggagggagaaatgcttccccctcacgaggagcctagcagcttctttcctaaagttgttgtcgaaaatctcaatgcgcatgagagaaaggacgacgatcttcgttttgtcctcggacagatgctccagcgtaatccatgcgtaaagaaattcagtgtctccatcaactgtgaaaatgcatgtcttgaggaggtggagaaagcagaggcggctgcgagatatgcagtcgacttccacgcaaaccgcccgacacttgaactggtaaaatatggtgaagataagatggtgttgtctggccaacaccaacaggtatgcaccccaggttgcctatctgattctaatccctag

SEQ ID NO: 14882 - DNA, 903 bp, Oryza sativa
  Clone ID: TFbOSC401179j.C1.o20.fg
atggctcgcgtgtacgtggggaacctggatccgcgcgtgacggcgcgggagatcgaggacgagttccgcgtgtttggggttctgaggagtgtatgggttgctagaaaaccaccaggttttgcctttattgactttgatgaccgcagggatgcagaagatgcaattcgtgatttagatggcaagaatggatggagggttgagctgtcaaccaaagctggtagtggtcgtggccgagatcgttccggtggttctgacatgaagtgctatgaatgtggcgaacctggtcattttgcacgtgaatgccgcttacggattggttctggaggccttggcagtggaagacgccgcagccgcagccgtagccggagtccaaggtaccgcggtcgtagtcgcagccgcagcccaagataccggaggagcccaagctatggtagaaggagttacagcccacgggatcgttctccaaagaggcgcagctacagcaggtcgccaccaccagctcgtgcacgaagctacagccgatcacctccacctcctcgtgctgctctttttgcttgttgcggatgccgtaatatcagaggattacacatgcttctggatgtctccactgcatctggatgcgctgtggtcaccgtgctgcgccactttccaggttcacagctcttctggagcagctcacatatactcctacaacattcactgtatcatgcatcgcgtcaccattgccatgatcacatgcgctacatgtgtaccacccccacacccggcacgggcacaccgatacggcgcttcacatggctttgtgccaaagcggtgtacgctagtaccgaggtcacatggttgcactacgcggctgcagccatcaaacttccatggcatctgcaacagaaaaggcttcaatga

SEQ ID NO: 14883 - DNA, 4260 bp, Oryza sativa
  Clone ID: TFbOSC401225j.C1.o6.np
tgaaactagaattgatgccaaatgagttgaggttggaggggagcaaaaattatttgagttggtgtaggagagcccaactgatgttgagagcaaaaggggtggatcattttttactagagagttgtgaagaaccttctgataaggagagccaagcatggaggacgtggaatactacaaattccactgtggtatcttggttgatgaaccggtggctccttctattggcaggatgatagaagctatccagaatgctgcagttgtatggaagacgctgagcaacatgtattcaggagagggaaatgtaatgatgatggttgaggctcagaacaaagtggagaatttgaagcaagagaggagaacagtcaaagagtacgctagcgagctgcaacagttatgggcaaatcttgaccactatgatcccttacaattgaaacatgaggatgacattgtgattggaaataaatggctgcagaggcgaagagtcattcatttcttgaaggggttgaacaaggagtttgaggataggagagcagctatgttccaccaagctacattgcccactatggaagaggccatttcagcaatggtgcaggaagagatgagattgaggttgatgagaggtacaaattctataagatcagcatacattgcagctgataatagggaatgctacaattgtgggcaagtgggtcatgtgagctacaattgtcccacttcccggaacattggtggtaggggatcgattcgaggagggcatggtggaactcgtggtggatttggaggagaccgtggtggttttgggggaaatcgtggtggtagaggaggtgatcgtggaggtcgtgttaccaatgagagctctaacaccaccactcactttggtaacttcgccaactacgcccaagtgggcgaaggtactcaggcacaggcacttgcatctacatagacatcctatagattggatcatagactcaggagcatcaaagcatgtcacaggattgcataatactttcacatcatacactccttatatccactctgaaactatccaaatcgctgatggtacatccaagcctattcatggtatagggtcggtagagtgcacatcatcaatgaacttgtcttctgttctgcatgttccttcctttccagttaacattctctcagttagctcggctattgatcaactcaagtgcattgttgtatttgatgagaattcttgtctgttccaggagaaggggactgggaggaggattgggactggagtcaggcgtgatgggttgtggtacatcaatcatgaggaactgggactagctgcggtggttggagatgttgagaaggagatcagtttgcttcactgtcagttaggacatccatcttttgagattttgagtaagttgtatccagacctctttagtagagtggataagcatagattggtgtgtgatgcttgtgagcttggcaaacatactcgctctacatatgttggaattggtcttcgtaactgtgagcccttcatattaatacattctgatgtttgggaaccatgcccagttacttctgtgagtggtttcaagtggtttgtcacctttattgattgtcacactcgtatgacttggatttatatgcttaaacacaaaagtgaggtccttcgttgctttcaagactttcataaattagtgacaactcagtttgatgcaaaagttaagattattcggactgataatggaacagaatatatcaataatgaatttgtgtcatatgtctcagatgaggggattattcaccagactacttgtcctggcacccctcctcaaaatggtgtagctgagagaaagaatcggcatttgctagaagtggcaagatctctgatgttccagatgaatgtaccaaagtatctatggagtgaggctgtgatgacagcagcatatcttatcaatcgcatgccttctagaatacttggtatgaagtctcctgccgaactgttattgggtaagcgagagttcaaggttcctccaaaggtgtttggctgtgtttgttttgtgcgagatcaccgaccttctgttggcaagttagatcctcatgcagtaaagtgtgtgtttgttggctatgcttcgagtcagaaggggtataaatgttgggatcccattgagagaagactgtttgtgagtatggatgtgacatttcgtgagtttgagccctattataaaagtaaaggagatcttgaccaatttcttgaggaattctcgactgtcatggaggttgatagtcgagagggggagagagagagagaggtgacatacatgaaaaaaatgttggtgacaagaatggagaggcagtagtgattggatcaataccatgctctattgatgatgcgagtaaagaagatagagaaatggtccctcatgaagaggatggagaagaaggagaagtagttgttgggacaattccatgtcctatggagggagccgaaagggtgaaacaaaaggatgtgctagtttaccaaaggaggcggtttgatagtcagggggagaaaagaaaagggttactcttgaacatgtagaattacctcttgcacaacgtagagagactagatctaatgctagtagacctcctatacgtcttggttttgagcatcttagttctatgcatgacattgcaaactatatcacatattctcatgtttcaccagcatacaaaacatttattgcatcattacagacagtgcctataccaaaggattggaagtgtgcaaagcaggatccaaagtggaaagatgcaatgaaagaagagttgaatgcccttgtgaagaataagacttgggagcttgtaaaacttccaccagaaaaaaggacagtgggatgtaagtgggtctttacagtgaagcaaacccctgaagggaaggtggataggtataaagcaaggttagttgcaaaaggctacagtcaaacatatggaattgactatgatgagatatttgcaccagtggcaaaaatgggtacagtgagaggtttggtatcttgtgcggtgaactttgggtggccccttcatcagcttgatgtgaaaaatgcatttctccatggtgatttacatgaggaggtctacatggagatccctccaggatttgggaatagccagacagttggaaaagtatgtaaactcaagaaatccttgtatgggttgaagcagtctccacgtgcatggtttgataggttcaggcatgcagtgtgtgatatggggtattctcagtgtaatggagatcacactatcttttacaaacatagggggacacacatcaccatcttggctgtgtatgttgatgatatagtgatcactggtgatgatgtagaagaaatcaggtgtctaaaggaaaggctgggaaaggcatttgaggtgaaggatcttggtcctcttcgctacttccttggaattgaaattgctcgttcatcaaaggggattgttctctctcagaggaagtatgttttggatctgttgacagatataggaatgcttgggtgtcgtgcaagtactacgcctattgataggaatcaccaattgtgtgctcaatcaggtgatcccgttgataaggaagcataccaaagactggtgggacgcttgatctatctttgccatacaagacctgatatttcctatgcggttagtgttgtgagtaggtatatgcatgatcctcgaactggtcacttggatgttgttcataagattctcagatatctgaaagggactcctggaaagggattgtggtttaggaagaatgggcatctaaatgtggaaggatattgtgatgctgattgggcgagtagtatggatgatagaagatctacatcaggttattgtgtgtttgttggtggtaatcttgtttcttggcgaagcaagaagcaggcagtggtggctcggtctaccgcagaagcagaatacagagctatggctttgagcttgagtgagatgttgtggatgaggagcttgttgactgaattgcgagtgctaagaagtgacactgtgatgcttcattgtgacaataaatcagccatcagcattgcaaacaaccctgttcagcatgatcgcactaaacatgtggagattgataggttcttcattaaggagaagattgatagcggggtgattaggttggagtatattaagtcatgtgaacaactagctgattgtctaacaaaggggttaggtcctagtgagattcaatcaatatgtaacaagatgggtatgattgatatcttttgcccatct

SEQ ID NO: 14884 - DNA, 3249 bp, Oryza sativa
  Clone ID: TFbOSC401276j.C1.o5.fg
atgtcttcaggggttggaaaggaggttgtagatgcctcctcggtggttactaagggtgatatgaaagatttgctagagaatttgttgaagatgggcatgataggtccgaagagtgtagcagggggattcgaactgaaactagaattgatgccaaatgagttgaggttggaatggagcaaaaattatttgagttggtgtaggagagcccaattaatgttgagagcaaagggggtggatcattttttgcaagagagttgtgaagagccttctgataaggagagccaagcatggagaatgtggaatacaacaaattccaccgtggtatcttggttgatgacctcggtggctccttctattagtaggatgatagagactattcagaatgcagcaattgtgtggaagacattgagcaacatgtattcaggagagggaaatgtaatgatgatggttgaggctcagaacaaaatgcagaggcaaagagtcattcatttcttaaaggggctgaacaaggagtttgaggacagaagagcggctatgttctaccaggctacattgcccactatggaagaggctatttctgctatggtgcaggaggagatgaggttgaaactgatgagaggtacaaatcctacaagatcagcatacactgtggctgataatagagaatgctacaactgtggacaagtgggtcatgtgagctacaattgtcccactcctcggaacattggcggtagggggttgattcgaggagggtatggtggatttggtggaacccgtggtggatttggaggagaccgtggtgactttggggggaaccacagtggtagaggaggtcgtggtggagatcgtggtggtggaggtcgtggtgaacaggtgacacagtgggaggaatggcagaagaacaagatcaatgagagctccaacaccaccactcactttggtaacttcgccaactacgctcaagtgggcgaaggtattcaggcacaggcacttgcatctacatacagacatcctatagattggatcatagactcaggagcatcaaagcatttcacaggattgcataataccttcacatcatacaccccttatgtccactctgaaactatccaaatcgctgatggtacatccaaacctattcatggtatagggtcagtagagtgcacatcatcaataaacttatcctctgacttgcatgttccttcctttccagtaaaccttctctcagttagctcagctattgaccaactcaagtgcattgttgtatttgatgagaactctcatctgttccaggagaaggggactgggaggaggattgggactagagtcaggtgtgatgggttgtggtacatcaatcatgaggaactggggctagctgcggtggttggaaatgttgagaaggagatcagtttgcttcattgtcagttaggacatccatcttttgagattttgagtaagttgtatctagatctctttagtaaagtggataagcatagattggtgtgtgatgcttgtgagcttggaaaacatactcggtctacatatgttgggattggtcttcgtaactgtgagcctttcatattaatacattctgatgtttggggaccatgcccagttacttctgtgagtggttttaagtggtttgtcacctttattgattgccacactcgtatgacttggatttatatgcttaagcacaatagtgaggtccttcgttgctttcaggactttcataaattagtgacaactcagtttgatgcaaaagttaagattattcggactgataatggaacagaatatatcaataatgaatttgtgtcatatatctcagatgaggggattattcaccagactagtacccctcctcaaaatggtgtagctgagagaaagaatcgacatttgctagaagtggcaagatctttaatgttccagatgaatgtgccaaagtacctatggagtgaggctgtgatgacagctgcatatcttatcaatcgcatgccttctagaatacttggtatgaagtcccctgttgaacttttattgggtaagcgagagttcaaggtccctccaaaggtgtttggttgtgtttgctttgtgcgagatcatcgaccttctattggcaagttggatcctcatgcagtaaagtgtgtgtttgttggctatgcttcaagtcagaaggggtataaatgttgggatcccattgggagaagactgtttgtgagtatggatgtgacatttcgtgagtttgagccctattataaaagtaaaggagatcttgaccaatttcttgaggaattctcgactgtcatggaggttgatagtcgagagggggagatagagagaggtgacacacataggaaaaatgttagtgacaagaatggggagacagtggtggttggatcaataccatgctctattgacaatgcaagtaaagaagcagtggaagttattggagatacacaagacaaggatagagaaatggttcttcatgaggaggatggagaagatggagaagatgaagaagtggttgttgggacaattccatgtcctatggagcgagccgaaaagacagtgcccataccaaaggattggaagtgtgcaaaacaagatccaaggtggaaagatgcaatgagagaagagttgaatgcccttatgaagaataagacttgggagcttgtaaaacttccaccaggaaaaaaggcagtgggatgtaagtgggtttttacagtgaagcaaactcctgaagggaaggtggataggtataaagcaagattagtcgcaaaaggctacagtcaaacatatggaattgactatgatgagacatttgcaccggtggcaaaaatgggtacagtgagaactttagtatcttgtgcagtgaactttgggtggcccctccatcagcttgatgtgaaaaatgcatttcttcatggtgatttatatgaggaggtctacatggagattcctccaggatttgggaatagccagacagttggaaaaatatgtaaactcaagaaatccttgtatgggttgaagcagtttccacgtgcgtggtttgaaagattcaggtgcgcagtgtgtgatatggggtattctcagtgtaatggagatcacacggtattctacaaacatagggggacatacatcaccatcttggctgtgtatgttgatgatatagtgatcaccggtgatgatgtagaagaaatcaggtgcctgaaggaatggacacctaaatgtagaaggatattgtga

SEQ ID NO: 14885 - DNA, 4665 bp, Oryza sativa
  Clone ID: TFbOSC401564j.C1.o7.fg
atgtcttctggggagggaaaggaggttgtggatacttcattgcttgttactaaaggtgatatgaaaggtttgctagaggatttgctgaagatgggcatgataggtcctaggaatgcggctggagtgtctgaagtgaaactagaattgatgccaaatgagttgaggttggaggggagcaaaaattatttgagttggtgtaggagagcccaactgatgttgagagcaaaaggggtggatcattttttactagagagttgtgaagaaccttctgataaggagagccaagcatggaggacgtggaatactacaaattccactgtggtatcttggttgatgaccttggtggctccttctattggcaggatgatagaagctatccagaatgctgcagttgtatggaagacgctgagcaacatgtattcaggagagggaaatgtaatgatgatggttgaggctcagaacaaagtggagaatttgaagcaagaggggagaacagtccaagagtacgctagcgagctgcaacagttatgggcagatcttgatcactatgatcccctactattgaaacatgaggatgacattgtgattggaaataaatggctgcagaggcgaagagtcattcatttcttgaaggggttgaacaaggagtttgaggataggagagcagctatgttccaccaagctacattgcccactatggaagaggccatttcagcaatggtgcaggaagagatgagattgaggttgatgagaggtacaaatcctataagatcagcatacattgcagctgataatagggaatgctacaattgtgggcaagtgggtcatgtgagctacaattgtcccacttcccggaacattggtggtaggggatcgattcgaggagggcatggtggaactcgtggtggatttggaggagaccgtggtggttttgggggaaatcgtgggggtagaggaggtgatcgtggaggtcgtgttggaggtcgtggtaggggcagaggtgttcctcaggccaatgcagctacggaggatgggaaagctgttaccctaataggtgaacaagtgacacaatgggaggaatggcagaagaacaagaccaatgagagctctaacaccaccactcactttggtaacttcgccaactatgcccaagtgggcgaaggtactcaggcacaagcacttgcatctacatatagacatcctatagattggatcatagactcaggagcatcaaagcatgtcacaggattgcataatactttcacatcatacaccccttatatccactctgaaactatccaaatcgctgatggtacatccaagcctattcatggtatagggtcggtagagtgcacatcatcaatgaacttgtcttctgttctgcatgttccttcctttccagttaaccttctctcagttagctcggctattgatcaactcaagtgcattgttgtatttgatgagaattcttgtctgttccaggagaagtggactgggaggaggattgggactggagtcaggcgtgatgggttgtggtacatcaatcatgaggaactgggactagctgcggtggttggagatgttgagaaggagatcagtttgcttcactgtcagttaggacatccatcttttgagattttgagtaagttgtatccagacctctttagtagagtggataagcatagattggtgtgtgatgcttgtgagcttggcaaacatactcgctctacatatgttggcattggtcttcgtaactgtgagctcttcatattaatacattctgatgtttggggaccatgcccagttacttctgtgagtggtttcaagtggtttgtcacctttattgattgtcacactcgtatgacttggatttatatgcttaaacacaaaagtgaggtccttcgttgcttccaagactttcataaattagtgacaactcagtttgatgcaaaagttaagattattcggactgataatggaacagaatatatcaataatgaatttgtgtcatatgtctcagatgaggggattattcaccagactacttgtcctggcacccctcctcaaaatggtgtagctgagagaaagaatcggcatttgctagaagtggcaagatctctgatgttccagatgaatgtaccaaagtatctatggagtgaggctgtgatgacagcagcatatcttatcaatcgcatgccttccagaatacttggtatgaagtctcctgccgaactgttattgggtaagcgagagttcaaggttcctccaaaggtgtttggctgtgtttgttttgtgcgagatcaccgaccttctgttggcaagttagatcctcatgcagtaaagtgtgtgtttgttggctatgcttcgagtcagaaggggtataaatgttgggatcccattgggagaagactgtttgtgagtatggatgtgacatttcgtgagtttgagccctattataaaagtaaaggagatcttgaccaatttcttgaggaattctcgactgtcatggaggttgatagtcgagagggggagagagagagaggtgacatacatgaaaaaaatgttggtgacaagaatggagaggcagtagtgattggatcaataccatgctctattgatgatgcgagtaaagaagtagtggaagtcattgaagatacacaagatgaggatagagaaatggtccctcatgaagaggatggagaagaaggagaagtagttgttgggacaattccatgtcctatggagggagccgaaagggtgaaacaaaaggatgtgctagtttaccaaaggaggcggtttgatagtcagggggagaaaagaaaagggttggtgcaaagtcaaattgaagagttaccacaccaaaaatgtccagtccctgaatcctcccagagtctctctcctccagcctccttggcttctcttgagacaattggtaatacttctccaactcttgaacatgtagaattacctcttgcacaacgtagagagactagatccaatgctggtagacctcctatacgtcttggttttgagcatcttagttctatgcatgacattgcaaactatatcacatattctcatgtttcaccagcatacaaaacatttattgcatcattacagacagtgcctataccaaaggattggaagtgtgcaaagcaggatccaaagtggaaagatgcaatgaaagaagagttgaatgcccttgtgaagaataagacttgggagcttgtaaaacttccaccagaaaaaagggcagtgggatgtaagtgggtctttacagtgaagcaaacccctgaagggaaggtggatatgtataaagcaaggttagtcgcaaaaggctatagtcaaacatatggaattgactatgatgagacatttgcaccggtggcaaaaatgggtacagtgagagctttggtatcttgtgcggtgaactttgggtggccccttcatcagcttgatgtgaaaaatgcatttctccatggtgatttacatgaggaggtctacatggagatccctccaggatttgggaatagccagacagttggaaaagtatgtaaactcaagaaatccttgtatgggttgaagcagtctccacgtgcatggtttgataggttcaggcatgcagtgtgtgatatggggtattctcagtgtaatggagatcacactgtcttttacaaacatagggggacacacatcaccatcttggctgtgtatgttgatgatatagtgatcactggtgatgatgtagaagaaatcaggtgtctaaaggaaaggctgggaaaggcatttgaggtgaaggatcttggtcctcttcgctacttccttggaattgaaattgctcgttcatcaaaggggattgttctctctcagaggaagtatgttttggatctgttgacagatacaggaatgcttgggtgtcgtgcaagtactacgcctattgataggaatcaccaattgtgtgctcaatcaggtgatcccgttgataaggaagcataccaaagactggtgggacgcttgatctatctttgccatacaagacctgatatttcctatgcggttagtgttgtgagtaggtatatgcatgatcctcgaactggtcacttggatgttgttcataagattctcagatatctgaaagggactcctggaaagggattgtggtttaggaagaatgggcatctaaatgtggaaggatattgtgatgctgattgggcgagtagtatggatgatagaagatctacatcaggttattgtgtgtttgttggtggtaatcttgtttcttggcgaagtaagaagcaggcagtggtggctcggtctaccgcagaagcagaatacagagctatggctttgagcttcagtgagatgttgtggatgaggagcttgttgactgaattgcgagtgctaagaagtgacactgtgatgcttcattgtgacaataaatcagccatcagcattgcaaacaaccctgttcagcatgatcgcactaaacatgtggagattgataggttcttcattaaggagaagattgatagcggggtgcttaggttggagtatattaagtcatgtgaacaactagctgattgtctaacaaaggggttaggtcctagtgagattcaatcagtatgtaacaagatgggtatgattgatatcttttgctcatcttga

SEQ ID NO: 14886 - DNA, 4944 bp, Oryza sativa
  Clone ID: TFbOSC415902j.C1.o18.fg
atgtcttctggggagggaaaggaggttgtggatacttccttgcttgttactaaaggtgatatgaaaggtttgctagaggatttgctgaagatgggcatgataggtcctaggaatgcggctggagtgtctgcagtgaaactagaattgatgccaaatgagttgaggttggaggggagcaaaaattatttgagttggtgtaggagagcccaactgatgttgagagcaaaagggatggatcattttttactagagagttgtgaagaaccttctgataaggagagccaagcatggaggacgtggaatactacaaattccactgtggtatcttggttgatgacctcggtggctccttctattggcaggatgatagaagctatccagaatgctgcagttgtatggaagacgctgagcaacatgtattcaggagagggaaatgtaatgatgatggttgaggctcagaacaaagtggagaatttgaagcaagaggggagaacagtccaagagtatgctagcgagctgcaacagttatgggcagatcttgatcactatgatctcctacaattgaaacatgaggatgacattgtgattggaaataaatggctgcagaggcgaagagtcattcatttcttgaaggggttgaacaaggagtttgaggataggagagcagctatgttccaccaagctacattgcccactatggaagaggccatttcagcaatggtgcaggaagagatgagattgaggttgatgagaggtacaaatcctataagatcagcatacattgcagctgataatagggaatgctacaattgtgggcaagtgggtcatgtgagctacaattgtcccacttcccggaacattggtggtaggggatcgattcgaggagggcatggtggaactcgtggtggatttagaggagaccgtggtggttttgggggaaatcgtggtggtagaggaggtgatcgtggaggtcgtgttggaggtcgtggtaggggcagaggtgttcctcaggccaatgcagttaaggaggatgggaaagctgttaccctaataggtgaacaagtgacacaatgggaggaatggcagaagaacaagaccaatgagagctctaacaccaccactcactttggtaacttcgccaactacgcccaagtgggcgaaggtactcaggcacaggcacttgcatctacatatagacatcctatagattggatcatagactcaggagcatcaaagcatgtcacaggattacataatactttcacatcatacaccccttatatccactctgaaactatccaaatcgctgatggtacatccaagcctattcatggtatagggtcggtagagtgcacatcatcaatgaacttgtcttctgttctgcatgttccttcctttccagttaaccttctctcagttagctcggctattgatcaactcaagtgcattgttgtatttgatgagaattcttgtctgttccaggagaagaggactgggaggaggattgggactggagtcaggcgtgatgggttgtggtacatcaatcatgaggaactgggactagctgcggtggttggagatgttgagaaggagatcagtttgcttcactgtcagttaggacatccatcttttgagattttgagtaagttgtatctagacctctttagtagagtggataagcatagattggtgtgtgatgcttgtgagcttggcaaacatactcgctctacatatgttggaatcggtcttcgtaactgtgagcccttaatattaatacattctgatgtttggggaccatgcccagttacttctgtgagtggtttcaagtggtttgtcacctttattgattgtcacactcgtatgacttggatttatatgcttaaacacaaaagtgaggtccttcgttgcttccaagactttcataaattagtgacaactcagtttgatgcaaaagttaagattattcggactgataatggaacagaatatatcaataatgaatttgtgtcatatgtctcagatgaggggattattcaccagactacttgtcctggcacccctcctcaaaatggtgtagctgagagaaagaatcggcatttgctagaagtggcaagatctctgatgttccagatgaatgtaccaaagtatctatggagtgaggctgtgatgacagcagcatatcttatcaatcgcatgccttccagaatacttggtatgaagtctcctgccgaacagttattgggtaagcgagagttcaaggttcctccaaaggtgtttggctgtgtttgttttgtgcgagatcaccgaccttctgttggcaagttagatcctcatgcagtaaagtgtgtgtttgttggctatgcttcgagtcagaaggggtataaatgttgggatcccattgggagaagactgtttgtgagtatggatgtgacatttcgtgagtttgagccctattataaaagtaaaggagatcttgaccaatttcttgaggaattctcgactgtcatggaggttgatagtcgagagggggagagagagagaggtgacatacatgaaaaaaatgttggtgacaagaatggagaggcagtagtgattggatcaataccatgctctattgatgatgcgagtaaagtagtggaagtcattgaagatacacaagatgaggatagagaaatggtccctcatgaagaggatggagaagaaggagaagtagttgttgggacaattccatgtcctatggagggagccgaaagggtgaaacaaaaggatgtgctggtttaccaaaggaggcggtttgatagtcagggggagaaaagaaaagggttagtgcaaagtcaaattgaagagttaccacacccaaaatgtccagtccctgaatcctcccagagtctctctcctccagcctccttggcttctcttgagacaattggtaatacttctccaactcttgaacatgtagaattacctcttgcacaacgtagagagactagatccaatgctggtagacctcctatacgtcttggttttgagcatcttagttctatgcatgacattgcaaactatatcacatattctcatgtttcaccagcatacaaaacatttattgcatcattacagacaatgcctataccaaaggattggaagtgtgcaaagcaggatccaaagtggaaagatgcaatgaaagaagagttgaatgaccttgtgaagaataagacttgggagcttgtaaaacttccaccagaaaaaagggcagtgggatgtaagtgggtctttacagtgaagcaaacccctgaagggaaggtggataggtataaagcaaggttagtcgcaaaaggctacagtcaaacatatggaattgactatgatgagacatttgcaccggtggcaaaaatgggtacagtgagagctttggtatcttgtgcggtgaactttgggtggccccttcatcagcttgatgtgaaaaatgcatttctccatggtgatttacatgaggaggtctacatggagatccctccaggatttgggaatagccagacagttggaaaagtatgtaaactcaagaaatccttgtatgggttgaagcagtctccacgtgcatggtttgataggttcaggcatgcagtgtgtgatatggggtattctcagtgtaatggagatcacactgtcttttacaaacatagggggacacacatcaccatcttggctgtgtatgttgatgatatagtgatcactggtgatgatgtagaagaaatcaggtgtctaaaggaaaggctgggaaaggcatttgaggtgaaggatcttggtcctcttcgctacttccttggaattgaaattgctcgttcatcaaaggggattgttctatctcagaggaagtatgttttggatctattgacagatacaggaatgcttgggtgtcgtgcaagtactacgcctattgataggaatcaccaattgtgtgctcaatcaggtgatcccgttgataaggaagcataccaaagactggtgggacgcttgatctatctttgccatacaagacctgatatttcctatgcggttagtgttgtgagtaggtatatgcatgatcctcgaactggtcacttggatgttgttcataagattctcagatatctgaaagggactcctggaaagggattgtggtttaggaagaatgagcatctaaatgtggaaggatattgtgatgctgattgggcgagtagtatggatgatagaagatctacatcaggttattgtgtgtttgttggtggtaatcttgtttcttggcgaagcaaaaagcaggcagtggtggctcggtctaccgcagaagcagaatacagagctatggctttgagcttgagtgagatgttgtggatgaggagcttgttgactgaattgcgagtgctaagaagtgacattgtgatgcttcattgtgacaataaatcagccatcagcattgcaaacaaccctgttcagcatgatcgcactaaacatgtggagattgataggttcttcattaaggagaagattgatagcggggtgcttagtttggagtatattaagtcatgtgaacaactagctgattgtctaacaaaggggcaaatcgtatacagctccggtggccggattaagcacacggcagctgttccaatttgtggctacacagaccagatcgaggtgtgtgcacaacaccttgtggccaaccgggattcctatcgtcttaagcacattgcctaccaaatccatgatatgaacatgtgcctcgtcgtctctaaatgtggccaagaggagcggctgtctgtggtgagctgcgtgtgccttgatgaaaaggggatcggaggtcagggaccgccatgcctggcagataacacggaggcagcagagctccttggctgggagccgcaccaggacgtcgaacagcacgtccaaagggaggatgccagaatttga

SEQ ID NO: 14887 - DNA, 5142 bp, Oryza sativa
  Clone ID: TFbOSC900306j.C1.o19.fg
atgggatggggcgtggcatgccacacgccgcctgacacacgggcagcaagtgggcatgttgccgtcgtcctatcaatcacttggccggtcacagaccggttctttgttattattgatgacatatgggataggaaatcatgggaattaatcagatgtgcagtgcaggatagtaagcttggaagtagagtagttgtaactactcgtatttttgaaattgccacacatagaggagagaaggagaagaaagaaatgtcttcagtggttggaaaggaggttgtagatgcttcctcacttatcactaagggtgatatgaaggatttgctagaggatttgttgaagatgggcatgataggtcagaggaatgtagcaggagggtctaaactgaaactagaagtgatgccaagtgagttgaggttggaagggagcaaaaattatttgagttggtgtaggagagctcaactaatgttgagagcaaaaggggtggatcattttttgcaagagggttgtgaagagccctctgataaggagagccaagcatggaggacatggaatacaacaaatttaacagttatgctattgaagcatgaggaggacattgtgattggaaataaatggatgcagaggcgaagagtcattcatttcttgaaggggctgaacaaggagtttgaggatagaagagcggctatgttccaccaggctacattgcctactatggaagaggttatttttgctatggtgcaggagatgaggttgaaactgatgagaggcacaaatcttacaagatcagcatacactgtggctgataatagggaatgctacaactgtggacaagtgggtcatgtgagctacaattgtcccactcctcggaacattggcggcagggggttaattcgaggagggcatggtggatttggtggaacccgtggtggatttggaggagaccgtggtggctttgggggaaaccgcggtggtagaggaggtgactggagaggtcgcggtggaggtcgtggtaggacagaggttctcctcaggccaatgcagccattgaggagggagaagggactgggaggaggattgggactggagtcaggcgtgatgggttgtggtacatcaatcatgaggaactgtaaatttcggcattggctccacctctctcctcccctctccgcgtgggacggtgtccgtggcgtcgcggcatcggccacgggcgggacaactgttcctgtgattaatccgggccgtttccgcggcggatccagcatcagtggtgggcgagaaactgaaggcggccgttcttgcagcgaacccagtgttggcggcatcggcaatgggcgggggagaggagctttctcgatcgcaatcatggagctggtgatgggggcaatggaaaacctgatccccaagttgggtgagctgctcaaggaagagtacgtcatgcagtcgggcgtgagagagaagatccagtctgtctcacgggagctcgagagcatccacgctgctctccgcaagatcggcaaggtgccatgggagcatcttgacgatgagttgaggctttgggcgcacgaccttagggaggcgtcgtatgacatggaggacatcatcgactccttccttgtgcgcgtcgacggccatgaggcaagtgaagttcactggttcaaatggttcttggagaagatgaccaaccagttcaacaagatcaaggctagccatgaaatcggtgtcgcaatgaaagaaatcgatgagaagctccaggaggtggctaccaggcatgcgaggtacacaatcgacaatattgccatcaatcctgcaggccccagcactgtcgatcctcgtctcttgagtatgtacaaaacattggcagagcttgttggaattgaggggcccatggatgagctcatgaagatgttggatattgatttgccgaccaagaagaggaagatcgaaatcgatgtgtccgttagaaaaccgaagatggtatccatctttgggtttggaggacttggcaagaccactcttgccaaagcagtctacgacaagcttaaaccaagttttgattctggggctttcattccggtcggtcagaatcctaatattaggaaagtttttagggatattctcatggatcttgacaagcagtcatacaatgacttaaatctaaagctgctggacgaaaggcaactcatcaacaaactccaggaattcctccaaaaaaagaggtgttttgtagtcattgatgacatatgggataaggattcatggaggttaattagatgtgcactacaagacagtaaccatgaaagcagagtagtcacaactactcgtatttatgaagttgccacacaagtgggcgaagtttacaaaatgcatccactttctcatgatgaatcaaaaaaattattgtacacaagaattattagcggtgaaggtgagtctctccgtagtacatcggttgaggcatgtgacaaaatactaaagaaatgtggcggtgtgcctttagctatcatcataatagctagtctgttggccaataaaccaagggaatactggtccgaagtgtataactctattggtttagaacatggatacaatgatgacgtagataatacaagaaggatattgtctttgagctactatgatttgccgttgcatctgaagccgtgcttattgtacctaagcatatttccggaagattattatattgagaaaaatttgttaatatggaagtggatagcagagggttttgtacatgagaaacaagcagcaaagttagggttatttgaaaccggggagggatatttcaatgagttgataaacagaagcatgatccagccagttgagcatgaatactcagggtacatgtgtggttgccgtgttcatgacatggtacttgatctgatcctcttattgtcaggtgaagaaaactttgtcactgtagtagatggcagtaaggaacatgaactttcatggaaaaatgcccgtagattagctctacaacattggagttttgaagagaacaggaatcagttggctaatatgggtgtgaagcaaacaaggtcccttattatgactgagtgctttgataagaacatgcaattaccgagcttccaagttttacgtgtactagaaatacaaaagcaaggccgttggtggaacattgatggtaaaattaacctgcagcatgttagaaatttacttcaccttaggttcctccatctagattgtattgattctattcctctcatagagcaattcagaaatttgaggtttctacaagtacttcatctgaaggaatctaacatacaagagctgccagagtcagtgggcctgctaacaaaattgctgtccctacgtgttgatattgatgtaagggtgtcgcctggtgtgatcgagaagctgacgtccttacaggagctgtatttgtggccttatagtgatgatacgttccagttcgtgaaggtcctaggcaagctgagggaactgagggtgctgcatgctaaaaaccttaagcttgatggacagggcgagacatcagcactgctggagtccctatgcaatctgcacaagatccaaactttggacattgacctaaatcttaatccaaatgagggtgtcacgtgggatgcaggattcacttcccctcaatgcctccgatacctctgcttggtgtctttgaggtttcatagaatgccagagtggattaattggtcgcttcttccaaacctctcttatcttgaattgagagtgaattttttggaagagctagaccttgaaacccttgggaggttaccaaaactacgatacctccatctgtttatacactgcgacaggatagtaagcatcgggaagattgccggtgctggtgatgcctgcttccaagagttgagatttttgaacacaccctacttgtatgtccggtttgatcagcatggcatcatgtgcagcaaagacgaaaaagctgtcatgccaaacgtcaaaactctcagtttttgtgtttatgtgcggatcctaaaagataccgacatacttggatttgacaagctgtttagcttcgctcatcttggaagaagttcgctccaacaagtccaagttaacatccaatgtcgtggtgctcgtgccatggaagtcgaggaagcggaggcggcgttggcacacgcagccgccatccatcccaaccgtccaacccttcaaatccataagttttcggagggagaaatgcttccccctcacgaggagcctagcagcttctttcctaaagttgttgtcgaaaatctcaatgcgcatgagagaaaggacgacgatcttcgttttgtcctcggacagatgctccagcgtaatccatgcgtaaagaaattcagtgtctccatcaactgtgaaaatgcatgtcttgaggaggtggagaaagcagaggcggctgcgagatatgcagtcgacttccacgcaaaccgcccgacacttgaactggtaaaatatggtgaagataagatggtgttgtctggccaacaccaacaggtcttaaagagaaccaagactggctttcacccggcagccacactagagggggtgagacggcacggcaacgccctcaggaggctcgaacgccaccattgccggcccggccaaggccgggcttggttttcacccgtcgtccaccgcctgctgatcaaaagctgttctccattgctccaactaccaacccttcaccgtcagtacgtgaacatcgctgcaccaacgcccctagttggccagcctccactgcctccatgtaggcctcccactcgccgccaccggatagctggcaagccactgccaccacctgtcgtgcctccttgcgccgtactggcttccgccgtcaccgaccacacctcctcgtgccgtgccaactttcacgaccactgtggcacagccggcagcctccgctgccacctgcacgcgctgccttgtcgtcctccaccgttgcctgcatgtgccggctgtgccttgccgtcctccgccgcccctgcacgcgtcggtcgcccctcatcggcctccattgccgcctacatgcccacgtcggcctccgccgccacctggacgctcgcccttgctgcgagccgtttgtcaatgacaaaatttggtaatatcagcatcggagatgaagattag

SEQ ID NO: 14888 - DNA, 1578 bp, Oryza sativa
  Clone ID: TFbOSC900373j.C1.o7.fg
atggaatgccgaggatcaagaggatttggttcttcgatgaacatcaagtcaaaatccaaagtgggcattgatcaaagcaaaggagctgtttttgaaaatggctctactcgggacagagagtcccacctggaggttctgtccggaacttcctggcaccaaggtgaggttgaaaaatttcataagtgctgcccagaagttcctggcacttttacccggaagctcctggcaggtttccagttcaaacttgatgctcatctcatttggaacacactcgaggagagatatgacaagtccgagtgtgatgaggcaaagctcgctatagaagaaccacttgtggagtgctcaaattcatcgacaatttgtaaagagcctcaagtgattctatccaatgagcaagatagtcttgccacattcacctcctcaccaacacatgtctccattaaaggtaatgaaatggtagaagtatgtgggaaaaaatggccaagtgaagaatttacatctccaagatgctcatcttcacacttggatgaatattcttgcatcatggagaaatcatatttggagaaagaaaatctagagcttaaagctcaacttgtggagctcactagcaagcatgtggacctacaagaaaaatatgatgagcttttgtgctctcatggaaatcttgtggattcacatgccatgctagaagtaactcatgaggtgatcataataacggtaaaatcctatgtgcctcatgttcaagttgactttacatgtgctaactcttgttgctctcaagcaaatatttttctgcgcactacatgtgacttggattatgtagggaaaaaggataaatacatcgatcatggatttgtttgcaatgctcaaccttctcaagataaccgtgaaagcatgctgaagaagcttgagaagggatcaaccgtagcttgcaccaagttctatcaagaagataacaagtccaacaacaagagcaaggggcaagatcaaagcaagaacaaagcttccattacttgcttcaagtgcaagaaaatgggacatcatgtgagagattgcccttggaagaaacagaagaagttgagcaagaatgaggatcttgctcacaagttcttcaaatccaccaaagagggacactttgcctcaagttgtccttgcaagattgatgatgaagccacacttccaagaaagacatcaagaatcaacagaaggaagtgctacggttgcattgagaaggggcatgaaattggattttgtccgcacaagaaggatgatcatagcaatcgatcaagcaagaggcaaaccggcaacaagcaagtcaagaagcaagataaaagcaaaactcaactttgctacaattgccgggcaaagggacatattggtaaaaattgtcccattggtaaaattcctaagccaaacctctcatttcatcacaatttgcttaggaaggccaaaaatggcacttgtgctactagggtgattagttcgctacatgctagcacaaaggccatttgggtccctaaatctcttgtgactaacatccatggacccaacgtgatttgggtaccaaaatatgcttag

SEQ ID NO: 14889 - DNA, 2832 bp, Oryza sativa
  Clone ID: TFbOSC9929j.C1.o2.fg
atgtcttcaggggttggaaaggaggttgtagatgcctcctcggtggttactaagggtgatatgaaagatttgctagagaatttgttgaagatgggcatgataggtccgaagagtgtagcagggggattcgaactgaaactagaattgatgccaaatgagttgaggttggaatggagcaaaaattatttgagttggtgtaggagagcccaattaatgttgagagcaaagggggtggatcattttttgcaagagagttgtgaagagccttctgataaggagagccaagcatggagaatgtggaatacaacaaattccaccgtggtatcttggttgatgacctcggtggctccttctattagtaggatgatagagactattcagaatgcagcaattgtgtggaagacattgagcaacatgtattcaggagagggaaatgtaatgatgatggttgaggctcagaacaaaatgcagaggcaaagagtcattcatttcttaaaggggctgatcaaggagtttgaggacagaagagcggctatgctctaccaggctacattgcccactatggaagaggctatttctgctatggtgcaggaggagatgaggttgaaactgatgagaggtacaaatcctacaagatcagcatacactgtggctgataatagagaatgctacaactgtggacaagtgggtcatgtgagctacaattgtcccactcctcggaacattggcggtagggggttgattcgaggagggtatggtggatttggtggaacccgtggtggatttggaggagaccgtggtgactttggggggaaccacagtggtagaggaggtcgtggtggagatcgtggtggtggaggtcgtggtaggggcgaggagaaggggactgggaggaggattgggactagagtcaggtgtgatgggttgtggtacatcaatcatgaggaactggggctagctgcggtggttggaaatgttgagaaggagatcagtttgcttcattgtcagttaggacatccatcttttgagattttgagtaagttgtatctagatctctttagtaaagtggataagcatagattggtgtgtgatgcttgtgagcttggaaaacatactcggtctacatatgttgggattggtcttcgtaactgtgagcctttcatattaatacattctgatgtttggggaccatgcccagttacttctgtgagtggttttaagtggtttgtcacctttattgattgccacactcgtatgacttggatttatatgcttaagcacaatagtgaggtccttcgttgctttcaggactttcataaattagtgacaactcagtttgatgcaaaagttaagattattcggactgataatggaacagaatatatcaataatgaatttgtgtcatatatctcagatgaggggattattcaccagactagtacccctcctcaaaatggtgtagctgagagaaagaatcgacatttgctagaagtggcaagatctttaatgttccagatgaatgtgccaaagtacctatggagtgaggctgtgatgacagctgcatatcttatcaatcgcatgccttctagaatacttggtatgaagtcccctgttgaacttttattgggtaagcgagagttcaaggtccctccaaaggtgtttggttgtgtttgctttgtgcgagatcatcgaccttctattggcaagttggatcctcatgcagtaaagtgtgtgtttgttggctatgcttcaagtcagaaggggtataaatgttgggatcccattgggagaagactgtttgtgagtatggatgtgacatttcgtgagtttgagccctattataaaagtaaaggagatcttgaccaatttcttgaggaattctcgactgtcatggaggttgatagtcgagagggggagatagagagaggtgacacacataggaaaaatgttagtgacaagaatggggagacagtggtggttggatcaataccatgctctattgacaatgcaagtaaagaagcagtggaagttattggagatacacaagacaaggatagagaaatggttcttcatgaggaggatggagaagatggagaagatgaagaagtggttgttgggacaattccatgtcctatggagcgagccgaaaagacagtgcccataccaaaggattggaagtgtgcaaaacaagatccaaggtggaaagatgcaatgagagaagagttgaatgcccttatgaagaataagacttgggagcttgtaaaacttccaccaggaaaaaaggcagtgggatgtaagtgggtttttacagtgaagcaaactcctgaagggaaggtggataggtataaagcaagattagtcgcaaaaggctacagtcaaacatatggaattgactatgatgagacatttgcaccggtggcaaaaatgggtacagtgagaactttagtatcttgtgcagtgaactttgggtggcccctccatcagcttgatgtgaaaaatgcatttcttcatggtgatttatatgaggaggtctacatggagattcctccaggatttgggaatagccagacagttggaaaaatatgtaaactcaagaaatccttgtatgggttgaagcagtttccacgtgcgtggtttgaaagattcaggtgcgcagtgtgtgatatggggtattctcagtgtaatggagatcacacggtattctacaaacatagggggacatacatcaccatcttggctgtgtatgttgatgatatagtgatcaccggtgatgatgtagaagaaatcaggtgcctgaaggaatggacacctaaatgtagaaggatattgtga

SEQ ID NO: 14890 - DNA, 380 bp, Oryza sativa
  Clone ID: TFbOSC30459j.C1.o3.gp
tatgtcatagctgtagaattgatcttatcagaggatgattccagacttttcatgggattattcctaccacaatggcttgcctcaccacaattcaggcttaggacagttggtactgttccattatccgctttaggttggcgttcataggtatcatcatgtggctctagttctgcagtcaacatgacttctagtagattttgaggacatgtataagaaaagtgacctctgtcaccacagtcgaagcaggtcactcctgttaggttcggtgtcttatctttcatagctgcagcattggttgatctgactccatgttgcttttgcttttgaggacatttatttgaatagtgacctttgcccccacagttgaagcaggttactcc

SEQ ID NO: 14891 - DNA, 1209 bp, Oryza sativa
  Clone ID: TFbOSC23022j.C1.o2.fg
atggctgacaatgagaaaggcaataaggtcagaagtcaggacattggtacctcaagctcccgagtgaatgaagcaccagataccagttgtgtgacactggtccaacacctgattaaccagaaccgattgcttatagagatactacagcagcatcagacgccaattctgaacctgagtcaaatacaacctcaagtgcagttggaggcagtccaagcactcacaccacaagtcagcatgccgccagcatcccgaaggacccatggtgacgtgccacatgttgacccaaaagaagcaagtaacatttgctttatgtgtgatgagcaagggcactatgcaagggagcgtcctcagcagaaaagaaaaacaccaatgcgaaccgaagatgaagtccgtaagatgatcattaccagcacagaatggcctccaccaggaatgacaagacgtcagagaagaaataccttccgaggtgcaccacagttgacagagcatcttttagctaatggaggtagagtgtctgatagtgaagattcagatcaagtctcctcagatgatgaagatgaaatggaacgtaaggcatgctctcgttgtggagaaatcggtcatgtcgccagctcgtgtgccactatatgcgttcattgtgaggaagaccatccacccgacaggtgtccaacgagcaggatcacttgtttcttttgtgaaggaaccgatcatgtaccaaaagattgtcaattcagttttctgctgacgaagaagatggtcaaccaacccgccagttccaacggagagaagcatcaaggcaacaccaatcctcgccaaaattacagtctcagcttaaatccagtgccaggacagaggaatcaaaatgagaaatggaaatgccgagtccgggaagatatctgttgcttcaattgtcaaggaatgggtcatttcgccgacaagtgccccagaccaagaaacatagctgccagcatgtcagtccccgcaactccttgcaatcagaagcttgcccctcagcgaattgtcatccatgcagcccgaagcagtcctatagaccgcgttgcaacagctccaactccagcgagtgcattaccaccaggtgtcaatgctcaatttcagccccagccatcagtttacaagacagaggccagtatcggcattgtatctttggatgttccagcacagcagccaaagaaatcaagtataagatga

SEQ ID NO: 14892 - DNA, 2553 bp, Oryza sativa
  Clone ID: TFbOSC408350j.C1.o3.fg
atggctgacaatgagaaaggcaataaggtcagaagtcaggacatcggtacctcaagctcccgagtgaatgaagcaccagacaccagttgtgtgacactggtccaacacctgattaaccagaaccgattgcttatagagatactacagcagcatcagacgccaattctgaacctgagtcagatacagcctcaagtgcagttggaggcagtccaagcactcacaccacaagtcagcatgccgccagcatcccaaaagacccatggtggcgtgccacatgttgactcaaaagaagcaagtatcatttgttttatgtgtgatgagcaagggcactatgcaaggaactgtcctcagcagaaaggaaaaacaccaatgcgaaccgaagatgaagtccgtaagatgatcattaccagcacagaatggcctccaccaggaatgacaaaacgtcagagaagaaataccttccgaggtgcaccacagttgacagagcatcttttagctaatggaggtagagtgtctgatagtgaagattcagatcaagtctcctcagatgatgaagatgagaagtctccccaaggtttcaaccagaataaaatggaacgtaaggcatgctctcgttgtggagaaatcggtcatgttgccagctcgtgtgcctctacatgcgttcattgtgaggaagaccatccacccgacaggtgtccaacgagcaggatcacttgtttcttttgtgaaggaactgatcatgtaccaaaagattgtcaattcagtttgctgctgacgaagaagatggccaaccaacccgccagttccaacggagagaagcatcaaggcaacacaaatcctcgccaagattacagtttcagcctaactccagtgccaggacagaggaatcaaaacgagaaaagaaaatgccgagtccgggaagatatctgttgcttcaattgtcaaggaatgggtcatttcgccgacaagtgcccaaaaccgagagacatagctgccagcactcctatagcccgcgttgcaacagctccaactccagcgagtgcattaccacaaggtgtcaatgctcaatttcagccccagccaccagttgacaagacagaggccagtatcggcattgtacctttggatgttccagcacagcagccaagaaatcaaaattggaacaacccagcaggggcaaccaatgttcaagtacctacagtccagcaacagtgcaagttatcagaatttctcaaaactgagactccaacctttgccattgccgtcgaacctatggaagccagtgattggttgcgcacagtcgagaagaagctggggttgattcagtgcacagaccaggagcgggttgtcttcgcaactcatcagttggttggactggcttcagaattgtgggatagctacgaagcatcacggccagaaggacataccatcacctgggacgagttttcattagtattcaagagatcccatgttcccgcaggaatgatcacactgagaaaacgagagttccgctacctgaagcaagaagatttgaccgtcacagagtacctgcacgagttccatcgtttggctcactatgcaccagaagatgtggaaaatgatgaagacaaacaagagaagtatctccaggggttaaaagatgagatcgcagtgcaactactcctagaggaatatgaagattttgagaaacttaactgtaagagaaggattgtcagcatcccagtattcccatgtggtaaccaaagacagcgcacggagccacttcagatcaccggatcttctgttgcgcatcaagagtttccgccccaagaagatggacacaatgcagacaacaacattagcaatactaatgatgatgataccaccaacaaccatgcttcttgccccattagtgaccactcaaatcaagcgtgcaatgtcaacatcattcaccaaggtgtcgacgatagtatcaatgatggcacccaaaatgacaaccctagcaattgtgactctaagaaagactccaatggtgatagcaactatggtaccactgatgccaatgttagcaaggatttccaaccaccaattccaactccaagtcagaatgatcgtccccagacggatagctcagcaaagaagacgttgatttgctacaattgcaaagaaccagggcattactcgagggactgcctgcaaccaaggcaaagtcgacctccacattaccgccaatttacacgaagcagacatcccaatcgtattgtggtcactggagcaaacgccgtacccgtttctctgaaagacagcacgcccaaggacctcattgccccagaagcatcctcaacacccggagcgaagagtacctggttgagaaaggtcgaaagtggtaacttgtatgaggttgactccgaagatatgaatcatgagaagttctggaacggaagcatcattaaactaccgcaacctagtctgagtcagctaaaaggtgcaccctggttcaagtcaggtgaagagaagattccatccgcaacaggaggtcaagccaagcagttccgagtggtgaagttttgctga

SEQ ID NO: 14893 - DNA, 2070 bp, Oryza sativa
  Clone ID: TFbOSC9374j.C1.o4.np
tccactttcaagtgagttcatccagtgttcacaagccaattgattaggggtttcctgacaattggtatcagagcaaggtttagggcttggacacgtgatcgtgcgctagaagaagcacttatgccaaggcgtcacaagctccccgtgccgttggtcggtgtcgccgagcgcacgcactcctggaggttccagcggccgtgcctcaggcagcggcgggaatgaccgcgggctggttatacaccgcgtggtcaaggagtcaggatcgtctacgaactatccggttctcacgaagacgaattacaatgactgggcattgctcatgaagatcaagttgcgagcacgttgcctgtgggacgctgtcgaatgtggccgcgctgctgtcgagctgcacgaggatcggatggcacttgatgggatctgcagcacggttccacccgagatgatctcgaccttggcgacgaaggcgtcggtgaaggaggcgtgggactgcatcaagacaatgcgcgtcggcgacgaccgcatccgcaaggccagcgcacagcgggtgcgtacggagtacgagaggatcgtgttccgggacggctagtcggtggaggacttcgccatgcggcttaccagtgtcgtcaaccaactcgccaccctcggtgatcccgagcccgatgacaaggttgtcgagaagtatctgcgcgtcgcccgaccgatgtttagccaactcgttctttcaattgaaactcttctcgatatatctaccttatctttggaggaaatcaccgggagactcaaggcggccgaggattaccagcccccaccatcctcccagaacaccgacggcaagctctacctaaccgaagaagaatggctggagtgccacaagaaggagcaggaggcgaaacgctctggtgccggttccagcggacgcaacaagcgccgcggcagaaaggggtgcaccggcggcagctcggatgggtccacctatcacaccacctcctcactggcacacagggatgacaaatgtcgtaactgtggcaagctcggccattgggccaaggagtgccggagcaagcccaagcatgaagaccaggcccatgtggcccaagacgagcccacgctcatgctcctgactggaggctgcgtcgaaaccgcaggctccatgttgccgccaccgccgccaccagcgacgccggcgcctcagtgcgtctgcatcgagctcgtcgagaagaaggtgttcactgcgttagatgatgaagcagaccgcgacccgcgcagctggatcatggactccggcgcgtcaaaccatatgacaggttgccgagcggccttctccgacctcgacactagtgtcaccggcaacgttcggctcggggatggctcgatcgtccctatcgaggggcgcagcacggtgttgttcacctgcaagaatggagaacaccgcaccctcgccaacacgtactttctgccgtggctcgctgccaacattgtcagcatcggccaactccacaaaactggcttccaagtattggttgaggacggcatcatgcgcgtccgcgacgagcagtggcgcctgctcacccaaatccctcggagcccagggcgcttgtatgtgcttgacatcaagctcgcgcggccagtttgcttgacggcgcgccccggcgaaaacgcgtggcgttggcacgctcggttcgggcacatcaactttactgcgctgagaaaaatgagcagggagaccctggtacgtggattgccattattgatgcatgtcgatcaggtttgcgaggcgtgtctcgccgggaagcatcgacgggcgccgtttccacaacgcgtgctgtctcgctctaacgagcccctgcaactcctccatggcgatctctgcagcccgatctcgccagcgacgccgagtgggaaccgctacttccttctcctcgtcgacgactacagccgcttcatgtggatcaagctccttttgtcgaaggacgtcgcaccagccgccatcaagcagatacaagcggccgccgagagcaagtcgggaagctgctttgtgcactacgcacggaccgagggggcgagttcacc

SEQ ID NO: 14894 - DNA, 1314 bp, Oryza sativa
  Clone ID: TFbOSC401000j.C1.o11.fg
atggcttctagagatatagtacacacgggtggtgaccctcctatgtttgatggcacaaattatgcacaatggaaaatccacatgatttcttattttacggccatgagcccaaaaatatggtggattgtagatgtgggcttttctcatgctttggatgaccatgctccaacaagtgggcaagataaatgcctacatctcgatgctcaagctactaatgctttattttgtggtttgagtgatgacatgtttaatgaagtatgcaatctcaagagtgcacatgctatgtgggtaaagcttaaagaaaaatatgaagtgcccacacttgttgagaatggttgcacacaagaatcgatgtcgggtgaagactccacctcctcaagtgatgatgaggagctcccaataccatccacatcacctcattgcttaatgacaaattgtaagaatgaggtaaagaatgattctctcgatagtattattgaaaatacttgtgttgttgatgatggtggtgatgatgatgaaccttcatatgatgatctttttaacattcttagggaggctactagctcatgtagtacatctaaggctagtgtgtccacctcttgtgatgacttgttagatgtaccttgtagctcaagcatagatgaaaattcttgttcttcctcctctatgtatattgttgctaaccttgtagaggaaaacaagcaattacaagcccaagtcaaagatttaaaagaagacttggatagaagctacaaagggaagaacacacttgacgaaatcctaagcaagcaaaagagcacaaatgacaagtgtggacttggctttcatcgcaaggagaatgctaagaagacaagacacatgcctagatatgcaaggaagcatgcatacttaagaaatgatggaaagaaaaatgtgagtaagaaccatcctcacattacatgttttggttgtcatgagaagggacactttgcctccgtgtgcgcaaacatgaaggatgagaagtgcaacttcaaattgaggcaaaccggcaagaagcaagacaaaacgacaagtcatagaggtcaaaacctaacttgctacaattgccgcaaaaagggacatattggtaaaaattgtcccataggtaatactcctaagcctaatattatttttgatgattatgtgcttaggaaaaataggcaaggcaatgtgtttgctagatatgttggtttacctagacttgcacctagaaggaggaccatttgggtgcctcgtattttggtaactaacattgatggacccaattttgttggggaccaaaatgtgccaaaatga

SEQ ID NO: 14895 - DNA, 1632 bp, Oryza sativa
  Clone ID: TFbOSC900175j.C1.o8.fg
atggctgacaatgagaaaggcaataaggtcagaagtcaggacattggtacctcaagctcccgagtgaatgaagcaccagacaccagttgtgtggcagtggtccaacacctgattaaccagaacaaattgcttatagagatactacagcagcatcggatgccaattttgaacccgagtcagatgcaacctcaagtgcagttggaggcagtccaagcactcacaccacaagtcagcgcaccgccaacatcccagaaggcccctcatgccatgccgcatgttgacccaaaagaagcaagtatcatctgttttatgtgtgatgagcaagggcactacgcaaggaactgtcctcagcagaaaagaaaagcaccaatgcgaaccgaggatgaagtccgtaagatgatcattaccagcacagaatggcctccaccaggaatgacaaaacatcagagaagaaattccttccgaggtgcacaacagttgacagagcatcttttagctaatggaggtagagtgtctggtagtgaagattcagatcaagtctcctcagatgatgaagatgagaagtctccccaaggttttaaccagaataaaatagaacttaaggcatgctctcgttgtggagaaatcggtcatgttgccagctcgtgtgcctctacatgcgttcattgtgaggaagaccatccgcccgacaggtgtccaacgaacaagatcacttatttcttttgtgaaggaactgatcatgtaccaaaagattgtcaattcagttttctgctgacgaagaagatggccaaccaacccgccagttccaacggagagaagcatcaaggcaacacaaatccccgccaagatcaccgtttcagcctaactccagtgccaggacagaggaatcgaaatgagaaaagaaaatgccgagtccgggaagacatctgttgcttcaattgtcaaggaatgggtcatttcgccgacaagtgcccaaaaccgagaaacatagctgccggcacgtcagtccacgcaactccctgcaatcagaagcttgctcctcaacgaattgtcatccatgcatcccgaagcagtcctatagcccgcgttgcaacagctccaattccaatgaatgcactaccacaaggtgtcaatgctcaatttcagccccagccaccagctgacaagacaggggccagtatctgcgttgtacctttggaagttccaatacagcagctgagaaatcaagtacaagatgaagaacccgagttgaagaagggcattactccaaaaactgtccccaaccaaggcaaaatcgacctccacattaccgccaatttacacgaagcagacattccaatcgtattgtggtcactggagcaaacgccgtaccctggtaacttgtctgaggttgactccgaagatatgaatcatgagaagttctggaacggaagcatcactgcactaccgcaacctagtctgagtcagccaaaaggtgcaccctggtccaagtcaggtgaagaggagattccacccgcaacaggaggtcaagccaagcagttccgagtggtgaagttttgctggaagtttgtcaagacgcaacggaagaagtcagacaagaagagaagaccgcccaacctatcttcttgctag

SEQ ID NO: 14896 - DNA, 1668 bp, Oryza sativa
  Clone ID: TFbOSC101455j.C1.o23.gm
atggtggtgtcgtttgtagtgctgctcgccggtggtgcaggcgcggcggccgccgccgtggcgcagccggtgccgctcttcgtgttcggcgacggcacccttgacgtcggaaacaacaacaacttgcccggagacgaggacgtcggggatcctcctcgcgccaaccacccttattacggcatcgacttccccggcggcaaggccaccggcaggttcagcaacggctacaccatggccgacttcatcggcttgaccatcccactgtcgaagcaaatcagctacttcgccacgacgaggtcacagatggagtccaagctggggcgcctcgccatgagcgacctcctctcgaggtccctcttcctgctcgccgtcggcaccatggacctcctcccggactgcaactacttcctgacgttcccgccgtcgccgccggacaacaagacggaggtgcagcggctcgtggagctctacaacgccagcgtcacgtcgctatacggcatgggcgccaggaggttcgccgtcgtcaacgtcggcctcgtcgggtgcgggccgacggtggacacgcgccgcggtggcggcagcggcggcggcggcgggtgcgacgcgaggatgaacggcctcgccgcggagttcaacgcggctctcggggcactcctcgccggcctccggtccgagaagcgtcgccttcgctactccctcgctgatttctacgccttctccaacgccaccttcgccaacccatcggctgccggccacaacctgggcttgggccagaaaagtggcctcactctcgatccctcttgggctgatttcggcctggacgacaccgatcgtccgatctttagggttttgatcggacggccgagcgtcgatatcggggaaacaaaacccctccttctcctcagccgccgaaaccctagcccatttccctccctcccatctcacatcgccgccctcccctccgcgcccccgagcggcggcgacgacgcccctcttcccgcgagcggcggcggcggcgccctcccccacaaccaacggcgcggcgccctctccccgaacaacggcggcgtggaggcggttgcggcccggcgggagcgggaggggcggcgggccggacctcgcctccgccagatctggcggcatggaagcggctgtggtctggcgagggcaggagaggcggcggcgtcgtctctttctctctctctgtgcatggtggggaggtgcggcagtggtggtggtggcggacgtcatggaacgccggtcgggcctcgcctccgccagatccggcggtgtggaggcagctgcagcccggcgggggtgggaggggcggcgggccggacctcgcctccgccagattcggcggcatggaggcggctgcggtccgacgggggcgggagaggtggcggcgtcgtctctttctctctctctgtgaatggtgtcggttctcctgggtttgtgaacatcgacagctcgtgctgccccgggccttgcatgcccttcccctacttcaaccaaccaccctgcgacaaccgcgcgcagtactggttttgggacgggggttacaccacggagcaagctgccatggtggctgccgctgcgttctacaatggcaccgcaaagttcaccacgccggttaacttcaagcaactgatccgaaggaaaaagtga

SEQ ID NO: 14897 - DNA, 3501 bp, Oryza sativa
  Clone ID: TFbOSC3174j.C1.o1.fg
atggctggttttgccgatacactgaggccagataaattcaccggtgtgcactttaagagatggcagatcagggtcactctgtggctgacagctatgaaatgcttctgggtgagtactcgcaaacctgaaggaattcttactgctcctcagcagaagcaattcgaggaagccactactctctttgtgggatgcattcttagcgttcttggcgatcgtctggtcgaggagaaagctcgggaaaaagacgccgcgtctaagggcgatggtgggcagtccagtgccaatgttgtgcacaaggcctataacaagagcaagggaaaatacaaagctcaacagaccaccaacttcaagaaacagaagaagaacaacaacaatcctaatcaggatgagaggacttgctttgtgtgtgggcaacctggtcatctggctaagaagtgtccacagcgcaaggggatgaaggcacctgcagggcagacttctaagtctgctaatgtgaccattagcaacactggagatggaagcgggtatggtaatttacctactgttttttcagttaatcagtctactaattggtgggttgatactggggccaatgtcgcatggggttccaccgtcctaatggggaatgggtcacatgcttctgttcatggtgttggcacggtagatctgaagtttactttgggaaagatcatgaatcttgttagtggctcctgtctgactagagacggatttaagttggtttttgagtctaataaagtagtcgtgtctaaacatggatattttattggtaaagattatgagtgcggaggcctgttccgcttttccctttctgatttctgcaataagcctgtgaaccatatttgtggcagtgtggatgatgaggctaatgtttggcactcacgtttatgtcatattaattttggcttgatgtctcggctttccagcatgcgtttaattcctaagttttccattgtcaaatgttctaagtgccatagttgtgtgcaaccgaagcaacctcgcaagcctcacaaggctgccgaggagagaaacttggcacaactagaactcctacattcagatctttgtgaaatgaatggggtattgacgaagggtggaaaacgatatttcatgacgttgattgatgatgctactagattttgctatgtgtacttgttgaaaacgaaagacgaggctctagactattttaaaatttataaggcagaagatgaaaatcaacttgacagaaagataaaaagacttaggtctgatcgtggtggagagttcttctcaaacgagtttgacttattctgtgaggaacatggcatcatacatgagaggacgcctccctattctcccgaatctaatgggattgctgaaaagaagaaccgcacactgactgacttggtgaatgccatgttggacaccgcgggactacctaaggcatggtggggggaggcattgttgatctcgaatcatgtgttaaacagagttcctaacagaaataaggacaaaacaccatatgagatatggattgggagaaaaccatcactttcttatttgcgcacatgggggtgcttggcgaaagtcaatgtaccaataacgaagaagcgtaaacttggacctaagactgtggaccgtgtctttctgggatatgctcatcacagcattgcctatagatttttaatagttaaatccgaggtacctgacatgcatattggtacaattatggagtctcgtgatgctacctactttgaaagctttttcccaatgaaggatacatatagtggttcgagccaaccctctgaaataattcccagttcaatcacaccaccagaacaaactgaacatttatatgaacatgtcactaaggaggatgtcagtgaagctcctcgaaggagtaagagacaaaggacggctaagtcctttggtgatgattttactgtgtacctcgtggatgacactcctaagtcaatttcagaagcatatgcatctcctgatgcagactactggaaggaggttgtccgtagtgaaatggattccattatcgctaacaggacttgggaggtgacagagcgaccctatgggtgtaaacctgtggagtgcaagtgggtgttcaagaagaagtttaggcctgacggtactattgaaaagtacaaggctcagcttgttgctaagggatatactcagaaagaaggcgaagatttctttgacacttactcacctattgctagattgaccacaattcgtgtgctactttccctagcagcctcaaatggtcttctcgttcatcaaatggacgttaagacaacgtttcttaatagagagttggatgaggagatctatatggatcaacctgatgggtttgtagttgaaggtcaagaaggcaaagtgtgcaaattgttgaagtctttgtatggtctgaaacaagcttctaagcaatggcatgagaaatttgacaaaacattgacatctgcaggctttgcagtaaatgaggcagataaatgtgtgcactatcgccatggtgggggtgagggagttattctgtgcttgtatgttgatgacatactgatatttgggacaaaccttgaggtgataaatgaggttaaatcattcttgtctcaaaattttgatatgaaggatttgggagtagctgatgttatcttaaacattaagctaattaaaggtgagaatgggattacacttttgcagtcccattatatggagaagatcttgaatagctttggctacattgatagtaaggcttctccaacaccttatgatactagcttgttgcttcgcaagaacaagagaattgctaggaataaactggaatactcccaaatcattggctcgctgatttacctggctagtgcaactaggcctgatatctcctttgctgtcagcatggtgagccggtttacctctaatccgggagatgatcactggcgtgcgcttgagcgagtaatgcgctatctgaaaggtactatggaattagggcttcactattctgggtatcctgcggtactggagggatatagtgattctaactggatctctgatgtggatgagatcaaagccactagtggatatgtcttcacactgggtggtggtgctgtttcgtggaggtcttgcaaacagactattttgacgaggtcaaccatggaagcagaactgacggcactggatactgctactattgaggcagaatggctgcgtgatctattaatggatctacctattgttgaaaaaccggtgccggctatccttatgaactgtgacaatcaaacggtaattgtcaaagtggatagttctaaggataatatgaaatcgtctagacatgtgaaaaaacgattgaagtctgtcaggaaattgagaaactccggagttataacgttggattacatccaaacagctagaaacctggcagatcccttcacgaagggactatcacgaaatgtgatagataatgcatcgaaggagatgggtttgagtcccatgtga

SEQ ID NO: 14898 - DNA, 239 bp, Oryza sativa
  unsure (1)..(239): unsure at all n locations
  Clone ID: TFbOSC34965j.C1.o1.gm
aagaagaaccctcatgcatcccccaacaacaagaaagtcaagcctgatgtcaaacccaaggctgcanccaattttaagaagaaaggcaagggaaaggcaaagggagcctgctttgtgtgtggcaagtctgggcattgggccaaggactgtcctgagcgcaaagataggaagtctgccaacatggtcgggaagaggttcctccttgttgatgggaaacgggtcgcttgcggctgttcatg

SEQ ID NO: 14899 - DNA, 1252 bp, Oryza sativa
  Clone ID: TFbOSC400343j.C1.o1.np
atggcacctcaaccaatctgtcagacttgtgccctcaactaccttggttctaacgaagacccagctttgtcagaaaatccaaatcaactagctgaacaagtcaccaaccaagttgccaagactgatgacactgttcctggaccaaacaaggaagttgcaaattctggccaatcagactcggataaagccacagaaattcaaggattgcaatcggtagaagacactgataccaataaagagaagaacaaataattcttaaatgtgatgattacagggatgaaaaccccacttcgagctcatgattaccccaactttcagaattcgatcgacaaatccttgttacaagaatatagcacagttaaagaaggaagtggtcacaaaagaaagacctcgccatcagaagttgacatgcaagatgttccacaatgtcagacaatgcaaccttgccaagacatacccaagtaccctaccctcaaatcaaagaagatcagacacgttcccggtctcatatgcttcatttgccacgaaattggccattacatgagacactgcccccaaaaaccctatatggatgcactactacaagctaatatgagaacctcaaggacgcccttctatccccaaggaagcccgaattcgcaaaatgttaatacagtacgtccaacctcccctgacgacaaaagagcaaaagcatcctgtgacatgtgccaggacatccaagaaaagaaagagatgcaggaatacaagaaacgcaaagtatcgtcggtagagattcaagaaagagaaagttcacgtcaaaagaaaaacccgccagtgcagcacaatcaaggagcatctcagtatcccaatagttctggttatatgcctcgttcgacagtgtcagaatctagtcagcacgccacaatgatcaacagtaatagccatgaaggaagcaactccgtatcatgccctccaccttcaaaaagacgtggctataaggcaggagtcgaatgtttcatctgccatgagatgggacactattcgtgggattgcttgcagaaagtcaagtcaaagaaagtacaaccaacaacaagccttcctaacgtatctggacaaaaaaaattcaaagccaccaaacaatggatctgtctcgttaacctcaccgcctgttgagcagaatcgtctgaaccaagtgcaagaggaaacaaatggagaagttatgaatctcaagcaagttggagaacagaatgcgcagaaagaaagagacccacag

SEQ ID NO: 14900 - DNA, 6525 bp, Oryza sativa
  Clone ID: TFbOSC11379j.C1.o1.fg
atggtgaacacgcgcactggcaccggaagtggaagcggaagtggaagtggaagtggagctactaacaatggaggagatcccacgctagctcagattctggcccaacaaacacaactgatcaatctgttagtgcagcaggcacagaatcagcaggcaaacaatcagaatcagaatccacccccacctccccaaaacaagttggcagatttcttacgtgtgagaccccctaccttttcaagcaccaccaatccagtagaagcaggagattggttgcatgcggtggagaagaagttggatttgatccagtgtactgagcaggagaaagtttcttttgcttcgcatcagttgcatggacctgctgctgaatggtgggatcattttcgccaaggcagggctgaaggagaacttatcacttggcaggagttcacgactgcttttaagaagacgcatataccgtcaggtgttgtagctctaaagaagagagaatttagagcactcaatcagggatctcgttcggtcaccgagtacctccatgatgtcaaccgtttagctcgttatgctccggaagatgttcgcaccgatgaagagcgtcaggagaagttcttggagggactgaatgatgagttgtcttatgccttgatgtctacggatttccgggatttccagcagttggtggacaaggcgattcgtcaggaagacaagtataaccggatggagcagaagaagcgcagggctgcccaattcaaggcacaacagggcagtaaccagaggccgcgtctcgttactggacctcaagctccatcgtaccctcaaggaggatcttcatcagttgtccgtccccaacgccagttctacaataacaatactggtaatcgtggcaatgacaaccgcaacatggttgctcgtcctgcagcaactccagctcagaatcagcccgttaggaaggaacagggaagcaagccagtgatatgcttcaattgtggtgatccaggacattatgctgataagtgtcctaagcctcggcatgtgaagaacgctccagccccgaacaactccaatgttctagcaccgaaggcacgtgttaatcatgttgcagcagcagaagctcagaatgcaccagatgttgttttggaaatagaagaagttcttttcccatcctcgcttatcttgctagaatccaaagatctagatgttatcttagggatggactggttatctcgtcacagaggagttatagattgtgccaaccgtaaggtgactttaaccagtagcaattgggaaaccgtttctttctttgtgtcctcccctaaatatcatggtgtgaacttaaaccaagttgctctacaagagattcctatagtacaagactacccagacgtgtttcccgaggatttgccagctcctggtttggaatggtacattcctggtttggagatagaactgtgcagccggggtggttgttcagaatggttgggcctatacaacaggatgccgcgttacaagcctgagtacctgtttggtgttgagggttttgtccaggagttgcgcacgatgtcctttgtcattggatttgggactgcccctttttatgcccagattcctcatgatcgtcatgaagagaagtgccgagtcagagtcaccttgaacagcaatagtgaagaggtcccctcagtgatgtttgaagctggaggaagaaactacatccatgcatgtcaggaggtggcaaggatcgccataggagagctccgtgatcgctacagtgatcaattggccgacactgagtatcgctaccatcctcgccaacctcagggaagtgaccgtggcagttaccttgagactgaaggaattgagaatgatgttaccacgaaacatttggttgagatgttgtgggctatggatgaaagtcgtgcggagactgtgttagcagctcaagatcgtgaagatcggaatcgtggtaagatttgcaagttagaagacaaggtggatcgtttggagaaggaattagccgcattgaagggagaagcaccgccgcagaaggccaggattcgtcttaccgcaaggaagagagctctatttgtccctcgctatcaactggcgccaaagatggtgaacactcgtagcaatgggaatggtcccaacaaccccaataacaacaacaatggagagaatcccactctggcccaagttcttgctcaacagacacagcttatgaacatgatgatgcagcaatttcagaatcagcaaaaccaagggaataatcatgcacctccccaaaacaagttagcagaatttcttcgtgtgaggccgcctgttttctctagtaccactaatcctgttgaagctagtgattggctgcatgccatagagaagaagttggatttacttcagtgtactgatcaggagaaggtctcatttgcatcacatcagttgcatggccctgcctctgaatggtgggatcacttccgccttaacaggactactgctgaacctatcacttggcttgaattcaccgctgctttccggaagacgcatataccatcgggagtagtgtctctcaagaagaaggagttcaggtcgctttcccagggatctcgctctgttacggagtatctgcacgagttcaatcgtcttgctcgttatgctccggaagatgtgcgcaatgatgaagagcgccaggagaagtttttgggaggacttaatgatgagctttcttacccactcatggttggagattatcctgatttccagaaattagtggataaggctattcgtcaggaggacaagtacaatcgcatggagcagaagaaacgtcggattgctcaattcaagacacaacagggaaataatcagaagccgcgtcttactttaggaccccagcccatgccacagggaggttcttcgtctgttgttcgtccgcaacgtcagttcttcaacaacaatgctggcaacaacatccgtaatcaagctccacgtcctgttgcagctccagcacagcaacaacctgccaagagggagcaaggcaacaagcccgtggtgtgtttcaactgtggagatccaggacattatgctgacaagtgtccgaagccccgacgtgtgaaggttgtccctgcccagaataactctgctgtaccagcatccaaggctcgtgtaaatcatgtcgctgctgcagaagctcaagatgctccagatgtgattttgggtacgttccttgttaactcagttcctgcaacagtacttttcgattctggtgctacacattcattcttatctacgagttttgcgggaaatcatgggatggaagtagaagatcttagacgtcctttgatggttagtaccccaagtaatcaagcactctctttgcaacgtagcccctctgtcagaatagaaattcaaggagtaccatttctggccaatcttatcttgttaaaatccaaagaccttgatgtcatcctagggatggactggttagccagacataaaggtgtgatagactgtgccaacagaaaagtaactctcaacagctatgatggtcgagttgtaactgttcatgcattgtcatctgagtctttaaggtcaagactgaaccagataactttggaagagattcctatagtccgggagtatcctgatgtgttcccagatgatttacctggtatgccgcctaaaagggatatagagttcagaatagatttggtacctggaacaactccgatccataagagaccttatcgaatggcagccaatgagttggcagaagttaagaggcaagtagatgatttgctacagaaaggatacatcagaccgagttcatcaccatggggagctccggttatttttgtggaaaagaaagaccatactcagagaatgtgtgtggactatcgtgcactaaacgatgtgactattaagaataagtatccactacccaggattgatgatttgtttgatcaacttaaaggtgccactgttttctccaagatagatcttcgatcagggtatcatcagttgagaatcaaagaggaggatatacctaagacaacttttaccactaggtatgggttgtttgaatgtactgttatgtcttttggacttaccaatgcccctgctttcttcatgaacttgatgaataaggtgtttatggaatacctagacaagttcgtggtggtctttattgatgatattcttatctactctcgaaccaaagaagagcatgaagaacatcttcgccttgcattggagaagctacgagaacatcaactgtatgctaagtttagcaagtgtgaattttggttgtctgaagtgaaattccttggtcacgtcatctcagccggaggagttgccgtcgatcctagtaacgtggaatccgtaaccaattggaagcaaccaaagacagtttcagagattcgcagtttcctaggccttgcaggatattatcggaggtttatagagaatttttccaagattgctaagcccatgacacgactgcttcagaaagatgtgaagtacaagtggtcggaagaatgtgaacagagttttcaagaattgaaaagtcgcttaatatcagctcctattttgattttgcctgatccaaagaagggttttcaagtgcattgtgatgcatccaaacttgggttaggttgtgttctgatgcaagatgggaaggtggttgcctatgcctctcgacagttacgtccgcatgagaagaactaccctactcatgatattgagttagctgcagtcgttcatgcattgaagatttggcatcattatcttttcggtactcgtacagaagtgtacaccgatcacaagagtttaaagtatatctttactcagccggatctgaacatgagacaacggagatggttggaattaattaaggattatgacatgggaattcattatcatccgggaaaggctaatgttgtagcagacgctcttagcagaaaaggctattgcaatgctacagaaggacgacagttgccattggaattatgcaaggaatttgaaagattaaatttgggaattgtcgatagaggtttcgttgcagccttagaagcgaagcccactctaattgatcaagttagagaagcccaaattaatgatcctgatattcaagagatcaagaagaatatgagaagaggaaaagctattggtttcttggaggatgagcacggaactgtatggttgggtgagagaatctgtgtccccgacaacaaagatttaaaggatgcaattctgaaagaagctcatgatactttatactccattcaccctggtagtactaagatgtaccaggatcttaaggaaagattttggtgggcaagtatgaagcgtgaaatcgcagaatacgtagcagtatgtgatgtttgtcagcgagtcaaggcagaacatcaaaaacccgccggtttgttgcaacctttgaagattcctgaatggaaatgggaagaaattggtatggattttattactggtttacccagaacgtcatcaggccatgactctatttgggtgatagtcgacagacttaccaaagtggctcatttcattccggtaaagacaacttattccggaagtcgcttagcggaattgtatatggcaaggattgtgtgtttgcatggcgtccctaagaagatagtgtctgatcgaggcagtcagtttacttcaaatttttggaagaaacttcaggaagagatgggttctaagctgaactttagtactgcttatcatccgcagacagacggacaaaccgaaagggtgaatcaaattttggaagacatgttgagagcttgtgctctagatttcggtggaagttgggataagaatctaccctatgcagaattttcgtacaacaacagttatcaagctagtcttcagatggctccttacgaagcactgtatggtcggaagtgtcgcactccgcttttgtgggatcaaacgggagaacgtcaggttttcggaacggatatcctaagggaagcagaagaaaaggtaaagatcattcaagaaagattgcgtgtggctcagtctcgtcataagagttatgccgacaatcgccgcagagatttgagttttgaagagggagattatgtgtatcttcgtgtcacgcctctacgaggagttcatcgttttcataccaagggaaaattggcaccgcgttttgtgggaccttataagattgtcagtagaagaggagaggttgcttatcagttggagttacctcaatctttggcaggagtacataatgtgttccatgtgtcgcaattgaaaaagtgtttaagggtacctaccgaagaagctaatattgagcagatagaagtccaagaggatttgacttatgttgagaaaccaatccgtatcctggaaacaagtgagagaagaaccaggaatcgagttatccgtttttgcaaagtccagtggagtaatcactcggaagaagaatcaacttgggaacgagaagatgaattgaagtcagctcatccgcacctgttcgccagttcttccgaatctcgaggacgagattctgtttaa

SEQ ID NO: 14901 - DNA, 2561 bp, Oryza sativa
  Clone ID: TFbOSC400718j.C1.o80.np
cgaggtcctcgcaactcagctcgcgaaaatcatgatcttcgcgaccaccgccgccgccgccgcggattccgccgcatcccgccatccccgcgcaccattaagagggggaaatcactccccgtgattccctccctcttttcccccgctttcccctctctctctccctcgggttcgttcggatttgctcccgcgatcttcgccggcgcatcaatggcgcccgagatggccgcggccgtttccttcccctccggcctctctctctccctcccggcgctatataatcgttccccgtgcctccctcctccgtttccgccgctcgccgctcgctctccccgtcggaatcaagcccgcgccgtcgtcctctctctccgccgtcgccgccgagctccggttcgccgccgtcgtcgccccggacctcctcccgcttcggcgtcgcctccttcggcttcgccgcgtcttcgtcgacctcgtccgctccttcgtttcgcccgccgaccgccggagcgccgccgtcctcgtcgatccgaaccgcgccgccgcctctcgccgtttcggtcgccgtttccgtcaccgccgtcgacccggggtgagccgaggaccgccgcttcgcttccctcttctctcctctctctcggccgccgctccgccgtgcctatggccgccgccggcgaccataggggcgcgggcgcgccgcctcccgtcggccgtgccggcgaggccgccttcgggcgcgccccgtggctgccaggtggggcccggccgtcagccgcccgcgcccgcgggtgcggctgacgcgtgggacccacggcgccggccggctttgcttaatcaacttgcagaataagcctaacatacatcataacagcaaaagacttagatctgttaaggtcctatccttagtttctaatctgtctctcccctttgttttctctctctccctctccaaacctttgcaacagatggctaacaatgagaaaggcaataaggtcagaagtcaggacattggtacctcaagctcccgagtgaatgaagcaccagacaccagttgtgtgacactggtccaacacttgattaaccagaaccgattgcttatagagatactacagcagcatcagacgccaattctgaatctgagtcagatacaacctcaagtgcagttggaggcagtccaagcactcacaccacgagtcagcatgccgccagcatcccgaaagacccatggtgacgtgccacatgttgactcaaaagaagcaagcaagggagtgtcctcagcagaaaagaaaaacaccaatgcgaaccgaagatgaagtccgtaagatgatcattaccagcacagaatggcctccaccaggaatgacaaaacgtcaaagaagaaataccttccgaggtgcaccacagttgacagagcatcttttagctaatggaggtagagtgtttgatagtgaagattcagatcaagtctcctcagatgatgaagatgaaatggaacgtaaggcatgctctcgttgtggagaaatcggtcatgttgccagctcgtgtgccactacatgcgttcattgtgaggaagaccatccacccgacaggtgtccaacgagcaggatcacttgtttcttttgtgaaggaactgatcatgtactaaaagattgtcaattcagttttctgctgacgaagaagatggccaaccaacccgccagttccaacggagagaagcatcaaggcaacacaaatcctcgccaagattacagtttcagcctaactccagtgccaggacagaggaatcaaaatgagaagaaaatgccgagtccgggaagatatctgttgcttcaattgtcaaggaatgggtcatttcgccgacaagtgcccaaaaccgagaaacatagctgccggcccgtcagtccacgcaactccctgcaatcagaagcttgctcctcagcgaattgtcatccatgcatcccgaagcagcccaatagcccgcgttgcaacagctccaaccccagcgagtgcattaccacaaggtgtcaatgctcaatttcagccccagccgtcagttgacaagacagaggccagtatcggcattgtacctttggatgttccagcacagcagccaagaaatcaagtacaagatgaagaacccgagcaagaccatccaccaggggagtgccccactcgcaaggtgacatgttttctgtgcgaagaaacaaaccatgtgcccaaggattgccaactcagtgtgttgttgaccaagaccgcagaaatccaacgaacaaccctacgattgtctcatcagctagtcagctccaacagcaacattgacgatatcatccacagcaccaatgctcctcctgctccacctaactctgcaacaaatcatagcactaataccttcagcaccaaccattctctgcaccgacagcctcagcaaagaattgtcgtcgatggaagaagttgtttctcgacctactccaggccgagcgaagggcaatcaacctcaggagggcgataccaagcagaagaccgttattcgcttcaaccagcaatcagaaggaagcttctcctgtgaa

SEQ ID NO: 14902 - DNA, 1725 bp, Oryza sativa
  Clone ID: TFbOSC30299j.C1.o3.fg
atggatatctctgaggcaaatgaaggctacgcgagctgcggctcggtaatcgagatgtctaggcaaatgaagactacacgggttggcctgggttggcttgggacgagctgggacccaggtcgggttgccagttcggtccgaatcatcgtaggccttgggttaaggcagaataagcctaacatacatcataacagcaaaagacttagatctgttaaggtcctatccttagtttctaatctgtctctcccctttgttttccctctctccctctccaaacctttgcaacagatggctgacaatgagaaaggcaataaggtcagaagtcaggacattggtacctcaagctcccgagtgaatgaagcaccagacaccagttgtgtgacactagtccaacacctgattaaccagaaccgattgcttatagagatactacagcagcaccagacgccaattctgaacttgagtcaaatacaacctcaagtgcagttggaggcagtccaagcactcacaccacaagtcagcgcaccgccaacatcccagaaggcccctcatgccatgccacatgttgactcaaaagaagcaagtatcatctgttttatgtgtgatgagcaagggcactatgcaaggaactgtcctcagcagaaaagaaaagcaccaatgcgaaccgaagatgaagtccgtaagatgatcattaccagcacagaatggcctccaccaggaatgacaaaatgtcagagaagaagttccttccgaggtgcacaacagttgacagagcatcttttagctaatggaggtagagtgtctggtagtgaagattcagatcaagtctcctcagatgatgaagatgagaagtctccccaaggttttaaccagaataaaatagaacttaaggcatgctctcgttgtggagaaatcggtcatgttgccagctcgtgtgcctctgcatgcgttcatggtgaggaagaccatccacccgacaggtgtccaacgagcaggatcacttgtttcttttgtgaaggaactgatcacgtaccaaaagattgtcaattcagttttctgctgacgaagaagatggccaaccaacccgccagttccaacggagagaagcatcaaggaagcacaaatcctcgccaagattacagtttcagcctaactccagtgccaggacagaggaatcaaaatgagaaaagaaaatgccgagtccgggaagatatctgttgcttcaaatgtcaaggaatgggtcatttcgccgacaagtgcccaaaaccgagaaacgtagctgccagcacgtcagtccacgcaaccccccgcaatcagaagcttgctcctcaacgaattgtcatccatgcatcccgaagcagtcctatagcccgcgttgcaacagctccaactccaatgagtgcactaccacaaggtgtcaatgctcaatttcagccccagccaccagctgacaagacagaggtcagtatctgcgttgtacctttggaagttccaatacagcagctgagaaatcaagtacaagatgaagaacccgagtgtaagaaagttattgtttgttacaactgcagtgaagaagggcattactccaaaaactgtccccaaccaaggcaaaatcggcctccacattttcgccaatttacaggaagcaaccatgccaatcaccaagtagtcagtggagcaaatgcagtacctgttaagcctagtgctagtcagaagcaaccataa

SEQ ID NO: 14903 - DNA, 1434 bp, Oryza sativa
  Clone ID: TFbOSC873j.C1.o1.fg
atggctgacaatgagaaaggcaataaggtcagaagtcaggacattggtacctcaagctcccgagtgaatgaagcaccagacaccagttgtgtggcagtggtccaacacctgattaaccagaacaaattgcttatagagatactacagcagcatcggatgccaattttgaacccgagtcagatacaacctcaagtgcagttggaggcagtccaagcactcacaccacaagtcagcgcaccgccaacatcccagaaggcccctcatgccatgccacatgttgacccaaaagaagcaagtatcatctgttttatgtgtgatgagcaagggcactatgcaaggaactgtcctcagcagaaaagaaaagcaccaatgcgaaccgaagatgaagtccgtaagatgatcattaccagcacagaatggcctccaccaggaatgacaaaatgtcagagaagaaattcctcccgaggtgcacaacagttgacagagcatcttttagctaatggaggtagagtgtctggtagtgaagattcagatcaagtctcctcagatgatgaagatgagaagtctccccaaggttttaaccagaatgaaatagaacttaaggcatgctctcgttgtggagaaatcggtcatgttgccagctcgtgtgcctctacatgcgttcattgtgaggaagaccatccacccgataggtgtccaatgagcaggatcacttgtttcttttgtgaaggaactgatcatgtaccaaaagattgtcgattcagttttctgctgacgaagaagatggccaaccaacccgtcagttccaacggagagaagcatcaaggaaacacaaatcctcgccaagattacagtttcagcctaactccagtgccaggacagaggaaacaaaatgagaaaagaaaatgccgagtccgggaagatatctgttgcttcaattgtcaaggaatgggtcatttcgccgacaagtgcccaaaaccgagaaacgtagctgccagcacgtcagtccacgcaaacccccgcaatcagaagcttgctcctcaacgaattgtcatccatgcatcccgaagcagtcctatagcccgcgttgcaacagctccaatttcaatgagtgcactaccacaaggtgtcaatgctcaatttcagccccagccaccagctgacaagacagaggccagtatctgcgttgtacctttggaagttccaatacagcagctgagaaatcaagtacaagatgaagaacccgagtgtaagaaagttattgtttgttacaactgcagtgaagaagggcattactccaaaaactgtccccaaccaaggcaaaatcgacctccacattaccgccaatttacacgaagcagacattccaatcgtattgtggtcactggagcaaacgccgtacccgtaaggcctcgtgttaatcagaacccatag

SEQ ID NO: 14904 - DNA, 3397 bp, Oryza sativa
  Clone ID: TFbOSC400680j.C1.o16.np
gggagagcactcaaacacaagaggcaggaatacaccgttgaggggttgatagcctctcttgatgttgaggagaaagctcggggaaaagacgtcatgtctaaggacgatggtgggcagtccagtgccaatgttgtgcacaaggcccaaaacaagaacaaagggaaatacaaaccccagcagaccaccaacttcaagcagaagaagaacaacaacaatccaaaccaggatgagagaacttgctttgtgtgtggctagcctggtcacctggccaagaagtgtccacaacgcaaggggatgaaggcaccgacagggcagccttctatgaccattggcaacactgtagatggaagcgggtatggtaatttacctactgttttttcagttaatcagtctactaactggtgtgttgatattggggccaatctatatgtttgtgctgacatctcattgttttcttcttaccaggtcacacgggattccaccgtcctaatgaggaatgggttacatgcttctattcatggtgctgaaacggtagatctgaagtttacttcgagaaagatcgtgcagctgaagaacgtgcagcctgtccctactatcaacaggaatcttgttagtggctcttgtctaactagagacggatttaagttggtgctttaatataataaagtagttgtgtctaaacatggattttattggtaaaggctatgagtgtggaggcttgttccacttttccatttctgatttctgcaataagtctgtgaactatatttgtggcagtgttgatgatgaggctaatgtttggcactcacgtttatgtcatattaattttcgcttgatgtctcagctttctagtatgtgttttattcctaaattttccattgtcaaaggttctaagtgccatagctgtgtgcaatcaaagcaacctcgcaagcctcacaaggcggctgaggagagaaacttggcacctctagaacttctacattcagatcttcgtgaaatgaatggggtgttgacgaacggtggaaaatgatatttcatgatgttgattgatgatgctactagagtttgctatgtgtatttgctgaaaatgaaagacgaggctctagactattttaaaatgtataagacagaagttgaaaactaacttgacaaaaagataaaaagacttaggtctgatcggggtggagagttttattcaaacgagtttgacttattccgtgagaaacatagcatcatacatgagaggacgcctccctattctcccgagtctaatgggattgccgaaaggaagaaccgcacactaacttacttgttgaatgccatgttggacaccgcgggactacctaaggcatggtcgggggagttgtcacgtcctgataaattcatcccgaattaaaaatcattttccaaacagggttaaacgtgcttggcctggagcaatttgggatggccggaagccaatctccaaagaactccagggttaagcgtgcttggcctggagcaatttgggatgggtgaccgatcgggaaattcttcccgggtgcacacgagtgaggacaaaacttgtcgcgtatgcaaatcactaacatgcaaattcttcccgggtgcacacgagtgaggacaaaacttgtcgcgtatgcaaatcactaacatgcaggagctgcaggtaaatgactatctacgagacaacatgctactaaaagtcacagactctgatccgtggtatggaaccatcgtcaacttcatggtcgcaggcatgtaccaccggaagaaaataagaaaaggttaatctacgagagccgcaagcacttacgggatgcacgctatctctacatagtctgttcagacggtctactacgaagatgcgttctggtagatgaaggcatgaagatcattgagaagtgttgtgctgccccatatggaggtcactatggagcattcaggacacacacacagatctggcagagtggattcttttggccatcaataccttccgaaactttttgcaagaacttggggctcagcacaacattgccatccgtatcatccccagacaagtggacaagcagaaatgagcaacaaacaaatcaaaaatattctgcaaaagactgtcaatgatatggggaagacatggaagaacaagctacctaatgcactttgggcatataggactgcttataagacgcccatcggcatgtcaccataccaacttgtccacggaaagacttgtcaccttccagtagagttggaacacagggcgcactgggcaatccggatttggacgtgatgatgaaaaaaaaagaaaagaaaaaaaagatagccatgcactctcccaaatttcaaaagagaaaaaataaatggaggaggaggtatacaaaaggagttattattattagtattttcctttgttcacccacaaatttaccatacacatgcacattcttgaccagaaagtatgtcttgtattttcatggatcctttatttgactttgcagtatatgtggaagtcataactctgttgtagagtccatagccttcactcgggacgagcaaaggttaagtgtgggggtgttgttgacggtacttaaatcataatatttgaccgtcaatacttgcatataatgaaataaaatatggtatccaacttagtggtagggtttattactaatcatttccaccagtgttggtgaaatatgtgtatgcaggtattttgaggaaaaaacacatccgtcaagcgacaaactgcacctccgcgcattcaggacacatttacatggattggaggccccataagtccagaggtattccgtgcgcttgcggatttatctgtggtcgtaagaaataccaacaatgatcattggcgtgcgcttgagtgagtggtctatctaagagatactatggacctggagcttcactatactgggtatcttgcggtactagagagatatagtgatgctaattggatctctgatatggatgagatcaaagccaccagtggatatgtcttcacactgggtggtggtgctgtttcattgaggtcttgcaaacataccatttcgatgaggtcaaccatggaagtagagatactgctactgttgaggcagaatggctgcgtgatctattgatggatatgcctattgttgaaaaaccggtgccggctattcttatgaactgtgacaattaaacggtaattatcaaagtgaacagttctaaggataacatgaaatcgtctggatatgtgaaaatacgattgaagtatgttaggaaattgagaaactccggggttataacgttggattacatccaaataggtagaaacctagcaaatcccttcatgaagggactatcacgaaatatgatagacaattcttcgaatgagatgggtctgagacccatg

SEQ ID NO: 14905 - DNA, 1030 bp, Oryza sativa
  Clone ID: TFbOSC30459j.C1.o1.fg
atggagaacactcaatttagccgtccaaaggcggtaccctataatgactcctgggagatacccaattctgactatattctcttgtatctcaatgacaaacaaactgggaagatcacttgcatggtatgtgggaaagaaggacactacacttgtgagtgccccatgaagaataaagaaaaatatgtcatatgtactctttgtggcaaggttggccactgtcacttatggtgctgccatcagaatgagagtgagaggcgtgcttgccgtcgttgtggagaaaaaggacactatgataattggcatcacctaggttgctccagctgtgagaagcatcatccactcgggagatgtcctatgggaaaaattacatgttttctttgtgaaggcaatggacatgtccctgttcaatgtcatttgagtccaatgctcactgcaataactcagaatcaacgagagagtttccgagctactctgagacaagcattgagagaaacaagcaacacagcagtcacaccaattacattgaccagagaattagagccatataatgataagaatggaggccaacctaaaggggacaatgaaatggtgcccagggtcttaggcttcaatcaaggagaggaaggccattctgctttgaggaaccctaacagatgccatgtaccatcctctgacaaggctaacgttgctgcagataaggcaccaaaccaatctttaggagtaacctgcttcaactgtgggggcaaaggtcactattcaaataaatgtcctcaaaagcaaaagcaacatggagtcagatcaaccaatgctgcagctatgaaagataagacaccgaacctaacaggagtgacctgcttcgactgtggtgacagaggtcacttttcttatacatgtcctcaaaatctactagaagtcatgttgactgcagaactagagccacatgatgatacctatgaacgccaacctaaagcggataatggaacagtaccaactgtcctaagcctgaattgtggtgaggcaagccattgtg

SEQ ID NO: 14906 - DNA, 1248 bp, Oryza sativa
  Clone ID: TFbOSC900137j.C1.o21.fg
atgccgcttgaagatgctcatctcatttggaccacgcttaaggagagatgcaacaagtccaaatgtgatgatgatatagtctttatggaagaaccacttgaggagtgttcaacttcatcaccaaattgcgaagaacctcaagtgactactttcgatgatcaagataatcatccagcgtccaccttatcatcaacacatgactacgttgaaggtgatgaattggtgagtaaggttgacgatcgtccaatattcccaatggattcaaacaacaccgataatgaaattgtcatattgcattgtgttgttaactcatgcatctcacctagcaccaagtatgtgtgtgaggatgatatggataaatgctctacttcctatagtacttgtggaactaaccttttaaaggaagaagtaaatgagttccaatggacaagtgaagaatccacctcacaaagatgctcatcttctatttccgaaaattatgcttgctttatgggtgaagatggtgactccgagtttgatcacttgagcaagaaggatataacaatggtgatcaagctcatggaagccattcaaaagcaacaagcatgcactattaagaagaatgaagaaatcatgagtctaaccgaagaacataagaaacttaaggattttcattcttcattgattatgagaagcaaaatcaagagcttaaatctcaacttgacgagatcactaacaagtaaaagggagaagcaaatagatcatggacttgtgtgcattgctcaaccatctcaagataaccgtgagagcatggtgaagaagcttgaggagggatcaaccgtggcttgcaccaagatccatcaaagggatagcaagtccatcaatgcttataccaagggacgaagtcaaaagacgatcaagagttccattacttgcttcaagtgcaaaaaggtgggacatcatattagagattgcccttcgaagaaaggaaataagttgagcaagaaggaggacattcctcacatcaagtgcttcaagtgcaccgaagcgggacactttgccttaaggtgtccttgcacattggatgaacaatgcaaaacatcaagtgagaggcaaaccggcaacaagcaaaccaacaagcaatatagaagcaacatgggtaacatattggtaaaaattgtcccatgggtaacattcctaagtcaagtctctcatttgatcataatttacttaggaatgccaaaaaagacatttgtgctactagggtga

SEQ ID NO: 14907 - DNA, 1911 bp, Oryza sativa
  Clone ID: TFbOSC14742j.C1.o1.fg
atgtcgaacgaggagttcgatagagtgagcaaccttgagaccgcatatgagatttggaacaagttggcggagatccatgagggtccaagtgagtacaaggatgccaagcttcatttcctcaagatccaatataagacattctccatgttgcctcatgagagtgtgaatgacatgtatgggaagctcaatgtcattgtgaatgatctcaaggggcttggggcaaactacaccgatcttgaggttgcccaaaagatgcttagagccctaccggagaagtatgagacccttgtcaccatgctcatcaactccgacatgtcaagaatgacacccgcaagcctcttggggaagatcaacaccaatgacatgtacaagctgaagaagaaggagatggaggaagcctcaccctccaagaagtgcattgctctccaagccgaagttgaagacaagagcaagagcaaggtgaatgaagtcaatgaggacttggaggaagagatggtccttcttgctagaaggttcaatgatctcttaggaaggagaaaggagagaggaaggggctccaactccaataggagaagaaatagaagacccaacaagactctctccaacttgaggtgttttgagtgtggtgagaagggacactttgcttccaagtgcccttccaaggatgatgatggagacaagtcatccaagaagaagagtggaggctacaagctcatgaagaagcttaagaaggaagggaagaagattgaggctttcatcggggaatgggactcaaatgaggagagctccgcctcatccgggtccgaggaagaaggtggtgatgatgcaagctccaagaagaagaagatggccgttgttgccatcaagaaggctccatcactcttcgctccactttgtctcatggcaaagggctcctctaaggtaacatctcttagtgatagtgagagtgatgatgattgtgatgatgtttcctatgatgagcttgtgagtatgtttgaggagctccatgcttatagtgagaaggagattgtcaagttcaaggccctaaagaaggatcatgcttctttgaaggtcttgtatgaggagctaaagacctctcatgagagactcaccatttctcatgagaagtttaaggaagctcatgacaacctcctttccactactcaacatggagctcacattaatgttggcatatcttgtgatttgcttgatgatagtgctacttgccatattgctcatgttgcatcatctagcatttctacctcttgtgatgatcttatggatatgcctagcccttgctctagttctagctcttgtgtttctatttgtgatgcctcacttgctgttgagaacaatgagcttaaggagcaagtggctaagctcaacaagagtttggagagatgcttcaagggtaagaacactcttgacaagattttgagtgagcaacggtgcatccttaacaaggagggacttggattcattccaaagaagggtaagaaaccttctcaccatgccactcgttttgtcaagagaaatggtaagtattgctccaagtgtcgtgaggttgggcatttggtgagtgattgccccggaggtaagcctcctaagacatgcatgtttgattctcattatatgcttacaaaggctcatgatggtagcattgttgctagatatgtgggtttccctatactcggtggtaaaaacaatgccatttggatgcccaaagctttggtctctaacctccaaggacccaaacaagtttgggtgaactaccggaccgatgggagccattgggtgcttgatagtggatgcactcaacacatgatcggtgatagggctatgttcaccacatttgaagtaggagggaatgaacaagagaaagtgacatttggagacaatagcaaaggaaag

SEQ ID NO: 14908 - DNA, 5262 bp, Oryza sativa
  Clone ID: TFbOSC401487j.C1.o9.fg
atgtcgaacgaggtgaaccatgtagggaaggctcccatgtttaatggcacaaactactccacttggaaaattaaaatgtctactcacctcaaagctatgagcttccatatttggagtattgtggatgtaggctttgccatcaccggcacacccttgacggagattgatcaccgcaacctccaactcaatgcccaagccatgaatgccttgttcaactctttgagccaagaggagttcgatagagtgagcaaccttgagaccgcatatgagatttggaacaagttggcggagatccatgagggtacaagtgagtacaaggatgccaagcttcatttcctcaagatccaatatgagacattctccatgttgcctcatgagagtgtgaatgacatgtatgggaggctcaatgtcattgtaaatgatctcaaggggcttggggcaaactacaccgatcttgaggttgcccaaaagatgcttagagccctaccggagaagtatgagacctttgtcaccatgctcatcaactccgacatgtcaagaatgacacccgcaagcctcttggggaagatcaacaccaatgacatgtacaagttgaagaagaaggagattgaggaagcctcaccctccaagaagtgcattgctctccaagccgaagttgaagaccagagcaagagcaaggtgaatgaagtcaatgaggacttggaggaagagatggtccttcttgctagaaggttcaatgatctcttgggaaggagaaaggagagaggaaggggctccaactccaataggagaaaaaatagaagacccaataagactctctccaacttgaggtgttttgagtgtggtgagaagggacactttgcttccaagtgcccttccaaggatgatgatggagacaagtcatccaagaagaagagtggaggctacaagctcatgaagaagcttaagaaggaagggaagaagattgaggctttcatcggggaatgggactcaaatgaggagagctccgcctcatccgggtccgaggaagaaggtggtgatgatgcaagctccaagaagaagaagatggccgttgttgccatcaaggaggctccatcactcttcgctccactttgtctcatggcaaagggttcctctaaggtaacatctcttagtgatagtgagagtgatgatgattgtgatgatgtttcctatgatgagcttgtgagtatgtttgaggagctccatacttatagtgagaaggagattgtcaagttcaaggccctaaagaaggatcatgcttctttagaggtcttgtatgaggagctaaagaccactcatgagagactcaccatttctcatgagaagcttaaggaagctcatgacaacctcctttccactactcaacatggagctcacattgatgttgacatatcttgtgatttgcttgatgatagtgctacttgccatattgctcatgttgcatcatctagcatttctacctcttgtgataatcttatggatatgcctagcccttgctctagttctagctcgtgtgtttctatttgtgatgcctcacttgttgttgagaacaatgagcttaaggagcaagtgtctaagctcaacaagagtttggagagatgcttcaagggtaagaacactcttgacaagattttgagtgagcaacggtgcatccttaataaggagggacttggattcattccaaagaagggtaagaaaccttctcaccatgccactcgttttgtcaagagaaatggtaagtattgctccaagtgtcgtgaggttgggcatttggtgagtgattgccccggaagtaagcctcctaagacatgtatgtttgattctcattatatgcttaagaaggctcatgatggtagcattgttgctagatatgtgggttcccctatactcggtggtaaaaagaatgccatttgggtgcccaaagctttggtctctaacctccaaggacccaaacttgtttgggtgaactaccgcaccggtgggagccattgggtgcttgatagtggatgcactcaacacatgaccggtgatagggctatgttcaccacatttgaagtaggagggaatgaacaagagaaagtgacatttggagacaatagcaaagtgaagattattctcgctatacttggggtgttctttttgcatgataagtctattgttgccgagcttttcaaaaagtttgcaaaaagggcccaaaatgaatttagttgcactcttgtgaaaattagaagtgataatggttccgaatttaagaataccaatatcgaggactattgtgatgatcttggtatcaaacacgaactttccgctacctactcacctcaacaaaatggtgtagtggaaaggaaaaatcgtacattgattgagatggcaaggactatgctagatgaatatggtgtttccgattccttttgggcggaagccataaacaccgcttgccatgcaatcaataggctttatttgcatcgtctcttgaaaaagacttcctatgagctaattgttgggaggaagccaaatgtcgcctattttcgagtttttggttgcaagtgttatatttaccataagggtgttagactaaccaaatttgaaagtcggtgtgataaagggtttcttctaggttatgcctcaaatagcaaggcataccgggtctacaacaagaacaaaggtgatgaaggcttgatgagagctatgaagaacatgtatattggagatgtcaagcctattgaagtagaagacaagccatccacctccactcaagatgagccatctacttccgcctcgtcaagtcaagctcaagttgaagtggaggatgagaaggcacaagatccacctatgcctccaagaatacacactgctctttccaaggatcacccaattgaccaagtgttgggtgacattagtaagggtgttcaaactcgatctcgtgtcgcttcgatttgtgaacattactcgtttgtttcttgtcttgagccaaaacatgtagatgaaactctttgtgatccggattggatgaatgctatgcatgaagagctcaacaactttgcaagaaacaaggtgtggactttgattgaaagacctagagaccacaatgtcatagggacaaagtggatctttagaaacaaacaagatgagaacggattggtggtgagaaacaagacaaggttggtggcgcaaggtttcacacaagttgaaggtttagactttggtgaaatttttgcccccatggcaagacttgaggctattcgcatcctttttgcatttgcatcatgctttgatataaaactatttcaaatggatgtgaaaagtgcttttctaaatggtgaaattgccgaacttgtctttgttgaacaacctcccggttttgaagatcctaaaaatccaaaccatgtttacaaactctcaaaagctctttatggtttaaaacaagctcctagggcttggtatgaaagattgaaagattttcttttgtcaaaggatttcaaaattggaaaagttgacaccactctttttacaaaaatcattggtgatgatttctttgtgtgtcaaatttatgttgatgacatcatattcagttctactaatgaggtattttgcaaggaatttggtgatatgatgtctagggaatttgagatgtccatgattggagagttgagcttcttccttggacttcaaatcaagcaactcaaggatgggacgttcgtgagccaaaccaagtacatcaaagatctactcaagaggtttggcttggaggatgcgaagcctatcaagacacctatggcaaccaacgggcatctcgaccttgatgagggaggtaaactggtagatttaaagctttatcgtttcatgattggtagcttgctttaccttaccgcatctaggccggatatcatgtttagtatttgcatgtgtgcacggtttcaagccgctcctaaggagtgtcacttagtggccgtgaaaaggatttacccaaaaggtgctaaatttcagcttgttggctattccgattcggattataccggttgcaaagtggatagaaagagcacatccggtagttgccaaatgcttgctatgcctccccgcactcggcatggtcgtcgtgctcccacgcccgatcccgttagtgaaaatgaggaatcaagcggagatgagtatgttcaaagtgatgaggacaatatggaaaatgttgagggtgatgagatggaagtaagtgatgatggtgatgacaatgagagtggaaatggtgaagatgatgaggcaagtgatgatgggagtcctctcgattcctccatccaatttgtgcttaatttgaggaatgctcaacaatacactatcttccgtcatcatgatcaattccggaggcctaacgattgtaatgatccaagatttcatacacggttccaaaagtccgtgtatgtacaagtgtatgccaacaaagccttcgccaaacacaaatggatctcttggaggcacattggtgagacaccggagtttgagaatttgcaagagatgttccggaccgttgggattgatagaattgtcaccatgaagcaaccttttgatgaagatctcatccggcaattctatgccaccgtatgggtgtccggcgattgtgatgcaatgaagtggatgttggggaccctccgatgctctatcaaccgccgtgaattcaaggagctcttgcacattcgcttcaacaacggggatgaccttcatgatgagcacacccacaatcccttccccattgatcacttttctcagttttatgaagaagggggaaggcacacatatggaaaggtggcgggtttaagggctctcccaagtgtgatcaaccacatagtaagggccaccatcctcccaagatgcggcaacaatgatgacatacgcagagttgcttggcatgttattgatgccattatggatggtcgtcggtttgatgttatcaaccttatgatgaaggagattgccatctcaaaggggactattggacaaggaatctattatgctctctacataatgaggttgccgcctcctagacggcttgtggaggagttgcccggtgacctctccgagaagattgtggaggaggcccggcgccggtttgtgagtggtttggagttcaccaccttcggagtgaaggaagaactaccccgagtgatcgaggcttgggtagtcctctccgtgggccagctcccgccttgcccatcccttgacgaagggggcgtgcggtggcttcgtggttga

SEQ ID NO: 14909 - DNA, 3804 bp, Oryza sativa
  Clone ID: TFbOSC900326j.C1.o11.fg
atggagggcgcggaggactcaggctttgctattaccggcacgcccttgacggagattgatcaccgcaacctccaactcaatgcccaagctatgcatgctttgttcaactctttgagccaagaggagttcgatagagtgagcaaccttgagaccgcatatgagatttggaacaagttggcggagatccatgagggcacaagcgagtacaaggatgccaagcttcatttcctcaagatccaatatgagacattctccatgttgcctcatgagagtgtgaatgacatgtatgggaggctcaatgtcattgtgaatgatctcaaggggcttggggcaaactacaccgatcttgagttgaagaagaaggagatggaggaagcctcaccttccgagaagtgcattgctctccaagccgaagttgaagacaagggcaagggcaaggtgaatgaagccaatgaggacttggaggaagagattgcccttcttgctagaaggttcaatgatctcttgggaaggagaaaggagaaaggaatgggctctaactccaataggagaagaaatagaaggcccaacaagactctctccaacttgaggtgctttgagtgtggtgagaagggacactttgcttccaagtgcccttccaaggatgatgatggagacaagtcatccaagaagaagagtggaggctacaagctcatgaagaagctcaagaaggaaggcaagaagattgaggccttcatcggggaatgggactcaaatgagaagagctccgcctcattcggggctcctctaaggcaacatctcttagtgatagtgagtgatgatgattgtgatgatgtttcctatgatgagcttgtgagtatgtttgaggagctccatgcttatagtaaaaaggagattgtcaagttcaaggccctaaagaaggatcatgcttctttggaggtcttgtatgaggagctaaagacctctcatgagagactcaccatttctcatgagaagcttaaggaagctcatgacaacctcctttccactactcaacatggagctcttattgatgttggcatatcttgtgatttacttgatgatagtgttacttgccatatttctcatgttgcatcatctagcatttctacctcttgtgatgatcttgtggatatgcctagctctagctctagctcttgtgtttctatttgtgatgcctcacttgttgttgagaacaatgagcttaaggagcaagaggccaagctcaacaagagtttggagaggtgcttcaagggtaagaacactcttgacaagattttgagtaagcaatggtgcatccttaacaaggagggacttggattcattccaaagaagggtaagaaaccttctcaccgtgccactcattttgtcaagagcaatggtaagtattgctccaagtgccgtgaggttgggcatttggtgagtgattgccccggtggtaagccttctaagacatgcatatttgattctcattatatgcttaggaaggctcatgatggtagcattgttgctagatatgtgggttcccctatactcggtggtaaaaagaatgtcatttgggtacccaaagctttggtctctaacctccaaggttgggtgaactaccgcaccggtggaagccattgggtgcttgatagtggatgcactcaacacatgaccgatgatagggctatgttcaccacatttgaagtaggagggaatgaacaagagaaagtgacttttggagacaatagcaaaggaaagtctattgttgccgagcttttcaaaaagtttgcaaaaagggcccaaaatgaatttaattgcactcttgtgaaaattagaagtgacaatggttccgaatttaagaataccaatatcgaggactattatgatgatcttggtattaaacacgaactttccgctacctactcaccccaacaaaatggtgcagtggagaggaaaaatcgtacattgattgagatgggtgttagactaaccaaatttgaaagtcagtgtgatgaagggtttcttctaggttatgcctcaaatagcaaggcataccgggtctacaacaagaacaaaggtattgtggaagaaaccgccgatgttcaatttgatgagaataatggctcccaagaagggcacgagaatttggatgatgtaggtgatgaaggcttgatgagagctatgaagaacatgtgtattggagatgtcaagcctattgaagtggaagacaagccatccacctccactcaagctcaacaactttgcaagaaacaaggtgtggactttgcatcatgctttgatataaaactatttcaaatggatgtgaaaagtgcttttctaaatggtgaaattgccgaacctgtctttgttgaacaacctcccggttttgaagatcctaaaaatcctaaccatgtttacaaactctcaaaatctctttatggtttaaaacaagctcctagggcttggtatgaaagattgagagattttcttttgtcaaaggatttcaaaattggaaaagttgacaccaaccttttcacaaaaatcattggtgatgatttctttgtgtgtcaaatttatgttgatgatatcatattcggttctactaatgaggtattttgcaaggaatttggtgatatgatgtctagggaatttgagacgtccatgattggagagttgagcttcttccttggacttcaaatcaagcaactcaaggatgagacgttcgtgagccaaacgaagtacatcaaggatctactcaagaggttcggcatggaggatgcgaagcccatcaagacacctatggcaaccaacgggcatctcgaccttgatgagggaggtaaaccggtagatttaaagctttatcgttctatgattggtagcttgctttaccttaccgcatctaggccggatatcatgtttagtgtttgcatgtgtgcacggtttcaagccgctcctaaggagtgtcacttagcggccgtgaaaaggattctaagatatttaaagcattcctctactattggcttgtggtacccaaaaggtgctaaatttaagcttgttggctattccgacttggattatgccggttgcaaagtggatagaaatagcacatccggtagttgccaaatgcttggtagatcccttgtgtcatggtcatccaagaaacaaaactccgtagccctctctaccgccgaggcggaatatgtttcggcggtgatgcctccccacactcgccatggtcgtcgtgcacccactccggatcccgtgagtgagcctgtggaatcgagcggaaatgagtacgctcaaagtgatgaagaggttgaggccaatgttgaaggggctagtgaggaggcaagtggagatgatgtcagtggaagtggagaggatgaggacgaaggaactgatgatatgcacattgatccctccatccagtttgttgtgaacatgaggaatccatcgcagtataccatcttgaggtaccatgatcagtttttgaggcctcgggacaccccggatccccgttttcacaccgctttccagaagagtgtgtatgagcaggtttatgcagggaaagcttttgcagagcataagtggatttcttggagagacatcaatgagactctagagtttgagggcttacaggatctcttcgagactgttggcattgaccagattgtgactttcaaacaagactacaatgaagatttgatccggcagttctatgctacagtgtgggtggctggagactatagtgagatgaattgctttagctcgttgcaacacacgggcattttactagtttaa

SEQ ID NO: 14910 - DNA, 1695 bp, Oryza sativa
  Clone ID: TFbOSC13279j.C1.o6.fg
atggatatctctgaggcaaatgaaggctacgcgagctgcggctcggtaatcgagatgtctaggcaaatgaagactacacgggttggcctgggttggcttgggacgagctgggacccaggtcgggttgccagttcggtccgaatcatcgtaggccttgggttaaggcagaataagcctaacatacatcataacagcaaaagacttagatctgttaaggtcctatccttagtttctaatctgtctctcccctttgttttccctctctccctctccaaacctttgcaacagatggctgacaatgagaaaggcaataaggtcagaagtcaggacattggtacctcaagctcccgagtgaatgaagcaccagacaccagttgtgtgacactagtccaacacctgattaaccagaaccgattgcttatagagatactacagcagcaccagacgccaatgctgaacttgagtcaaatacaacctcaagtgcagttggaggcagtccaagcactcacaccacaagtcagcatgccgccaacatcccgaaggacccatgatgacatgccacatgttgacccaaaagaagcaagtatcatctgttttatgtgtgatgagcaagtgcactatgcaagggagcgtcctcagcagaaaagaaaaacaccaatgcgaaccgaagatgaagtccgtaagatgatcattaccagcacagaatggcctccaccaggaatgacaagacgtcagagaagaaataccttccgaggtgcaccacagttgacagagcatcttttagctaatggaggtagagtatctgatagtgaagattcagatcaagtctcctcagatgatgaagatgaaatggaacgtaaggcatgctctcgttgtggagaaatcggtcatgtcgccagctcgtgtgccactatatgcgttcattgcgaggaagaccatccacccgacaggtgtccaacgagcaggatcacttgtttcttttgtgaaggaactgatcatgtaccaaaagattgtcaattcagttttctgctgacgaagaagatggctaaccaacccgccagttccaatggagagaagcatcaaggaagcaccaatcctcgccaagattacagtttcagcctaactccagtgccaggacagaggaatcaaaatgagaaaagaaaatgccgagtccgggaagatatctgttgcttcaattgtcaaggaatgggtcatttcgccgacaagtgcccaaaaccgagaaacatagctgccggcacgtcagtccacgcaaccccccgcaatcagaagcttgctcctcaacgaattgtcatccatgcatcccgaagcagtcctatagcccgcgttgcaacagctccaactccaatgagtgcactaccacaaggtgtcaatgctcaatttcagccccagccaccagctgacaagacagaggtcagtatctgcgttgtacctttggaagttccaatacagcagctgagaaatcaagtacaagatgaagaacccgagtgtaagaaagttattgtttgttacaactgcagtgaagaagggcattactccaaaaactgtccccaaccaaggcaaaatcggcctccacattttcgccaatttacaggaagcaaccatgccaatcaccaagtagtcagtggagcaaatgcagtacctgttaagcctagtgctagtcagaagcaaccataa

SEQ ID NO: 14911 - DNA, 689 bp, Oryza sativa
  Clone ID: TFbOSC20836j.C1.o2.np
tccgtcgaccccgtcgacccgagccgcgccgccgccttccttcgctccggccgcctttttcgtcgtcgccgtcgacctagggtgagccgtggaccgccgcctcttttccctcttcccttcccctctctcggccaccgctccgccgtgcctatggccaccgccggcgaccataggggcgcgggcgccgcctcccgccggctgcgccggcttggctgccctcgggcgcaccgagtggctgccgcgtggggcccggccatcagccgcccgcgcccttaggtgcggctgacgcgtgggacccacggcgctggccggtgcgagcccgagtgcgcccagtccaccgtggacccacctcggccatataaggaccggtcttcgggcctctgttgcaaagcactaccgtacttccacaagtctagtgggacaaatgaaggctacacaagctgcggcccggtagtcgagatgtcatggcacagggccggtgtcctgctgctaggggctcagtcctgcctacctgtcccggggtttccggccgtaggtgggattgggttgatgtacacctctgatcagagtataatctattcgaatagccgcgccttcggttatgggaaagccgagcaatgtacccaatgggcggctacgacatcccggcgaggacgcgggtgttcatcaacacgttcgccatggggcgc

SEQ ID NO: 14912 - DNA, 3699 bp, Oryza sativa
  Clone ID: TFbOSC400337j.C1.o8.fg
atgtctgcacttgtagccgctgccgcctcacctagagccggcgccgctgccaccgtccctggagatggcatgccgggagccggagccgctgtgaacgacaacgtcaacggaggcagttctgcctcacaatccagtggagggacattctcgggatcaccccacattgttcatgtcatgattattgtcttaatattttggattaaaatatgccgatatatgaccatatttccaacaatccaaaaacctgataggtcattttcggtagttggctttgctctgaaaccacatgcatttgatggttctaactataagaggtggaaagcacgtgcactattgtggttgacagcgatgcaatgcttctatgtttcacggggtaaacgaagtgaaccacctctctctcctgaagaagaggttaagttcgaggcttcggattgcctgttccgtggagcattgatcagtatactcgctgacaacatagtggacgtgtacatgcacatgccttccgggaaggacatgtgggatgcacttgaggccaagttcggagtttccgacgccggcagtgagctgtatgtcatggagcagttctatgactacaagatggtcgatgaccgttctgtagtagaacaagctcatgagattcagatgctggctaaggaacttgagaacaacaactgtgagttgtcggacaagtttgtggcgggtggcattattgccaagttgccaccttcttggtcggactttgccacttctctaaagcacaagagacaagagttcagtgtttctgatctcattggctctttgggtgttgaggagaaggcgagggcaaaggacaaccggcacaaaaaggttgagggaggttctagtgccaatatggtacagaagaagaaccctcatgcatcccacaacaacaagaaagtcaagcctgatggcaaacccaaggctacaaccaattttaagaagaaaggcaagggaaaggcaaatggagactgctttgtgtgtggcaagtctgggcattgggccaaggactgtcctaagcgcaaagacaggaagtctgccaatatggtcattagcaagggcggagaaacatcggggtacggtaaattattacctacagttctctctgtttttcattcatctgattggtgggttgatactggtgctaatattcatgtcgggagaggttcctccttgtcgatgggaaacgggtcgcttgcggctgttcatggtgttggtatggtcgatttgaagttaacttcgggaaagaccgtgcagctgaagaacgtgcagcatgtcctttcaataaagaagaatcttgttagcggctctctattgtgtagagaaggttttagacttgtgtttgaatccaataaatgtgtcgtatctaaatatggaacttttgttggaaaaggttatgacagaggaggcttgttccgcttttctttggatgacatgtgtaataatcataatgttgtgaaccatattagcgagaatggttctaagtgccatacttgtgttcaatcgaaacaatctcgcaagcctcataaggcatctgaggcgaggaatttggcacctctagaacttgttcatttcgatttgaaagcattgcattactttaagacctataaagctgaggtagaaaaccaacttgaaaggaaaatcaaacggttgaggtctgatagaggtggggagtatttttccaatgagtttgcatccttttgcgaagagtttggaattattcatgagaggacgcctctctattcaccccaatcaaatggggtggccgaaagaaagaaccgtactctaactgagatggtgaatgccatgttagacactacggggctttccaaggaatggtggggtgaggcagttttgactgcgtgtcatgtcctgaataaaattctaatgaagcataaggatgtgacaccattcgaggaatgggaaaggaagaaattaaatctctcatacctacgaacatggggctgtttggccaaggtaagtgtacctatagctaaaaagcgaaaacttggaccaaatactgttgattgtgtgttcattggttgtgctattcacagtgtgggttatagattcttaatagtaaactctggagtacccgacatgcgtgttggtacaattattgagtctagggatgctacattctttgagaatgaatttcccatgaaacatacacctcgcacttctagtcaagaaactgttataccccatgagcactttgcaccgatagaacacaatgatcaaacgcctgagggaaatcctgaggaggacaacattgtagatactcgtaagagtaagcgacaaagggttgcaaaatcctttggagatgactacattgtatacctcgtggatgacaccccaagaaccatagaagaggcatattcatctcctgacgcttactactggaaggaagcagtacgcagtgagatggactcgattatgtctaatgcctctcatggtcttctcgtccatcagatggatgttaagacagctttcctaaacggagagctggaggaggagatctatatggatcaaccagacgagtatgtactagaaggtcaggagggaatgggttgtaaactgttgaaatccttgtatggccttaagcaagcacctaagcaatggcatgagaagtttgacaccacacttatatctgttggctttgttgtgaacgaagctgacaaatgtgtgtactatcgctatggtgggggagaaggagtgatcttgtgcttatatgtcgatgacatattgatctttgggaccagcctcaatgtgattgaggaggtcaaggactttctgtccaagagttttgaaatgaaggatttgggagtggctgatgttattattaacattaagctactaagaggagatgagggtgggattacacttgtgcaatcccactatgtggacaaggttttgagtcgctttggatatagtgactgcatgccagctcctactccttatgatcccagcgtgctattaaggaaaaaccgaagaatagcaagggatcaactgagatactctcaaatcattggttcattgatgtacttggctagtgcaacgaggcctgacatctcatttgctgtaagcaagctgagccggtttgtctcaaatccgggagatgatcattggcaggctctggaaagagttatgcgctatctaaagggcactatgagctatggaattcactataccaggtatccaaaattactagaagggtatagtgactcaaactggatatctgatgctgatgagataaaagccgcaagtgaatatgtgttcacacttggaggtggcgttgtttcctggaagtcttgcaagcagaccatcttaacgaggtcaacaatggaagcagaacttacagcactagatactgcgacagttgaggccgagtgccttcgtgaactcctgatggatttgccgatggttgaaaaaccagtgccagctatcctaatgaactatgataatcaaacaatgattattaaagtgaacagttcaaaggacaacatgaagtcatctaggcatatcaagagaagactgaaatctgttagaaagcataaaaactccggagtgatagcattcgactatgtccaaacagctagaaatctggcagatcagtttaccaaggggctaccacgtaatgtgatagacagtgcatcgagggaaatgggcttgatacccacctaa

SEQ ID NO: 14913 - DNA, 4029 bp, Oryza sativa
  Clone ID: TFbOSC400572j.C1.o23.fg
atgtcgaacactggagacaaggagaaggagactcccgtcaacaccaacggaggcaatactgcctcaaactccagcggaggactattcttggggtataaccttattacattatttcaattagaagttttactgttaatgttcatcgcaatgtcaacattgtgtcattatgtgattgttgatgcttattcaacgttaagcatgctcatgttgattacattcaccactatcactggatcaaatcctattgtaaatatcatgtttattatcttgttattttggattaaaatatgccgaattatgaccaaatttccaacaatccaaaaacctgataggtcattttcggtagttggctttgctgctgcactgaaaccacatgcctttgatggttcaaactataagagatggaaagcacgtgcactattgtggttgacagcgatgcagtgcttctatgtttcacggggcaaacgaagtgaaccacctctttctcctgaggaagaggctaagttcgaggcttcggattgcctgttccgtggagcattgatcagtgtactcgctgacaacatagtggacgtgtacatgcacatgccttctgggaaggacatgtgggatgcacttgaggccaagttcggagtttctgacgccggcagtgagctgtatgttatggagcagttctatgactacaagatggtcgatgaccgttctgtagttgaacaagctcatgagattcagatgctggctaaggaacttgagaacaacaactgtgagttgccggacaagtttgtggcaggtggcattattgccaaactaccaccttcttggtcggactttgccacttctctaaagcacaagagacaagagttcagtgttcctgatctcattggctctttgggtgttgaggagaaggcgagggcaaaggacgtccggggcaaaaaggttgagggaggttctagtgccaatatggtacagaagaagaaccctcatgcatcccacaacaacaagaaagtcaagcctgatgtcaaacccaaggctgcaaccaattttaagaagaaaagcaagggaaaggcaaagggagactgctttgtgtgtggcaagtctgggcattgggccaaggactgtcctaagcgcaaagacaggaagtctgccaacatgatcattagcgagggcggaggaacatcggggtacggtaaaatattacctacagttctctctgtttttcattcacctgattggtgggtggacactggtgctaatattcatgtcgggagaggttcctccttgttgatgggaaacgggtcgcttgcggctgttcatggtgttggtacggtcgatctgaagtttacttcgggaaagaccgtgcagctgaagaacgtgcagcatgtcccttcaataaagaagaatctagttagcggctctctattgtgtagagaaggttttagacttgtgtttgagtccaataaatgtgtcgtatctaaatatgggacttttgttggaaaaggttatgacagcggaggcttgttccgcttttctttgaatgacatgtgtaataatcataatgctgtgaaccatattagcgagaatgatgagtctaatgtgtggcattcgcgactctgtcatgtgaatttcggttgtatgacgcgcttagctaacatgagtttaattccaaaattcactttggtaaaaggttccaagtgccatacttgtgttcaatcgaaacaacctcgcaagcctcacaaggcatctgaggcgaggaatttggcacctctagaacttgttcattccgatttgtgcgaaatgaacggcgtgttgactaaagggggaaagaaatatttcatgacactgatagatgattgcactagattttgctatgtgtatctattgaaaacaaaggatgaggcattgcatttctttaaaatctataaagctgaggtagaaaaccaacttgaaaggaaaatcaaacggttgaggtctgatagaggtggggagtatttttccaatgagtttgcatccttttgcgaagagtttggaattattcatgagatgacgcctccctattcaccccaatcaaatggggtggccgaaagaaagaaccgtactctaactgagatggtgaatgccatgttagacactgcggggctttccaaggaatggtggggtgaggcagttttaactgcgtgtcatgtcctgaataaaattccaatgaagcataaggaagtaacaccattcgaggaatgggaaaggaagaaattaaatctctcatacctacgaacatggggctgtttggccaaggtaaatgtacctatagccaaaaagcggaaacttggaccaaaaactgttgattgtgtgtttcttggttatgctatccacagtgtgggttatagattcttaatagtaaactctggagtacccgacatgcatgttggtataattcttgagtccagagatgctacattctttgagaatgaatttcctatgaaatatacacctatcacttctagtaaagaaactgtcatgccccatgagcactttgcaccgatagaacacaatgatcaaacgcctgaggaaaatcctgaggaggacaacattgtagatactcgcaagagtaagagacaaagggttgcaaaatcctttggagatgactacattgtatacctcgtggatgacaccccaagaaccatagaagaggcatattcatctcctgacgctgactactggaaggaagcagtacgcagtgaaatggactcgattatgtctaatggtacttgggaagtcgttgagcgtccatatgggtgcaagcccgtaggatgcaaatgggttttcaagaaaaagcttaggcctgatggtacaatcgaaaagtacaaggcaaggcttgtggccaagggttatacccaaaaggaaggcgaggacttcttcgacacatactcaccagttgctcgcttgaccacgattcgacaagcacctaagcaatggcatgagaagtttgacaccacgcttacatctgcaggctttgttgtgaacgaagctgacaaatgtgtatactatcgctatggtgggggagaaggggtgatcttgtgcttatatgtcgatgacatactgatctttgggaccagccttaatgtgattgaggaggtcaaagactatctgtccaagagttttgaaatgaaagatttgggagaggctgatgttattcttaacatcaaactacaaagaggagatgagggtgggattacacttgtgcaatcccactatgtggacaaggttttgagtcgctttggatatagtgactgcaagccagctcctactccttatgatcccagcgtgctattaaggaaaaaccgaagaatagcaagggatcagctgagatactctcaaatcattggttcattgatgtacttggctagcgcaacgaggcctgacatctcatttgctgtaagcaagctgagccggtttgtctcaaatccgggagatgatcattggcaggctctggaaagagtaatgcgctatctaaagggtactatgagctatggaattcactataccgggtatccaaaagtactagaagggtatagtgactcaaactggatatctgatgctgatgagataaaagccacaagtggatatgtgttcacacttggaggtggcgctgtttcctggaagtcttgcaagcagaccatcttaacgaggtcaacaatggaagcagaacttacagcactagatactgcgacagttgaggccgagtggcttcgtgaactcctgatggatttgccggtggttgaaaaaccagtgccagctatcctaatgaactgcgataatcaaacagtgattattaaagtgaacagttcaaaggacaacatgaagtcatctagacacatcaagagaagactgaaatctgtcagaaagcagaaaaactccggagtgatagcattggactatgtccaaacggctagaaatctggcagatcagtttaccaaggggctaccacgtaatgtgatagacagtgcatcgagggaaatgggcttgatacccacctaa

SEQ ID NO: 14914 - DNA, 3741 bp, Oryza sativa
  Clone ID: TFbOSC401435j.C1.o29.fg
atggagcggcgtccgccgattcggccggactggcaagctaacaagcgtcaggcgatggagcaaggcggaggtgactgggggatccgcgacgtccgggaggaggagggcctccggcgtccactccccaatcaaccaagggtgaatccaaatgtcaagcctcaaggtcgtcaagctgcggagatggagcgtggggctggtacgatgaagatcaagtgcttcaaatgtggccgtgaaggtcaccaccaggcaaactatactaatccccccctctgttactcttgccacaatactggacacattgcttctcattgcccgctgatttctgctaaaagatgtgttaagctctgtggatttgggatcccagggcaagggttctatagtttgcaagtagagatttctgacgcagaggtggctagagctcctgtgagaggtattttgacagtgattcagggggaagcttctgtgagtaaagtgctagctgaactgaaacacttgtttgtaggtttaacttgggattggaaaattaagcagctaaatgctaaagaatttctcaaaaaattcccttcatatgaagttaggagtcagatttcaacttgcaagagctttgactttgagacatcccagattaaagctagtgtggtggagactggtataactgaagaggctgttgatgaattagtggctgtctgggtgaaaatctatgggattccaaaaatggccagatcagaagactatatcaaatctattgtggagctggttggggagtttgaggctgtagaggttgcaagtatcaggagagatggtccagtaagggtgagagttgcctgtaaggatcctagagagctatatttctctattcatctgtacataaacaaggtgggttacatgattcgttgggaacctaaggggtacttaccttatgagaatagacagaatcctccagatgatgatgacaaagatgataaggatgatgaggggctagaggatgatatgaatctagatgacgaattcaagaatcatgacatctctagaggaagacctcttaaaggcgagggaagccaacatgagagtagagcaggagctttttctgctccacccacttacaagggcaaagtcagttctgaacagggaggaagtataaaaatgatagcctctaagaaaacctctcttttgaaacaccctgacttatttgagagttgtacttctttagtgatatggggagacaaaaagcaagagatgattgcagagcaggaatcccaagagttggaggcacctgaattgtcccaaaatgagactagacccgagttctcaacactgttagagtttgatgaggatcttgagagatgccaaatccctactgattctgacattgagaggctgagagaagaagaagatagggaggaggaggacagtttccaggaggtctctaacaggaagaaggggaaggctaaaaggactgaacctgcagttacttcaagaatgagcttaagacatagagagttagctgttgttcctattccaaagagagctaagatcctgacccaaaggaaaaatttggagcaaccagactctgttgaattgaaaaagattgatgtagctgctaatatagatctaggcagtaaccctgttgagattgacaacaatattgagactttaaaagccaaagagttagtccaagctaagttagctgagttgaattggaagaatcaattggagaaacagaaacctcaggcaggagatgtttctgttcctgcaaaggtgattgagtcagaagatgtgtcatccattaaagagttggaaacagatttgagagttgaaaaagatggcataagccctgagcctaacaagagagaaactcatgcaggggctttttttcttagtaatgtcattaaattgaattatgataattcttgttgggagatcatggtgatttatggtcctgtggataacaatctgaaacaggcttttctggatgaactgaattggcacattctttatagatcccatcatgtggtgattgggggggattttaatttgtataggtttgctagtgagaaatcgaacaccaacactaactctagaaatatggatatgttcaattctttcattgctaacttagatctgagagagatttatcgcagtggccctaaattcacttggactaacaagcaagattctcttgtgcaagaagtcctagataggattctagtgaccactgactgggatgatatgtaccctactgctcttctttcctctatcttaagagtgggttctgaccacatccctcttctactagatacttgtgaaggtattatagtcaagagtaagtactttaagtttgaatctgcttggcttgctgaagagagttttaaagagttggttattcagaggctgttacctagagacaattcttatattttagagttttggaataaaaaacaaagcagtctgagacgattcctggtaggatggggcaaaaacaatcgctctaaaaagctgagggagaaaagaactttgcagtgtaaaatagaagaacttgataagaaggctttgactgaggaactgacttcagatgagtggaatcagagatacagttgggagaatgatcttgagcacatctatgagatggaagaactttactggcataaaagatgtggagagcaatggattcttgaaggagatagaaacacagagttttttcacagagttgctaatgggaggaaaagaaagtgtcacattacatccttgatggatggagaaacagagttgacctctaagagtgaaatccgagagcacattgtggagtactacaaaaccctctttagagatgtccccactgccaacattcacctttcccagggggtttggacgaaccacctcaacctttcagatgctagtaaagaaaacctgactaggccctttgtaatggcagagttagataaagttatcaatgaagctaaacttaacacagctcccggccctgatggttttagtatccctttctatagagctttttggccccaagtgaagaatgatttgtttgagatgttactcatgctacacaatgaagatctggacttaaaaagacttaactttggagttatttccttaattcctaagaacaacaatcccactgacataaaacagtttagacccatttgtgttcttaatgactgttttaaattcctaagtaaggtggtgactaatagattgacagaagtagctgatgaagttgtttctcaaacacaaactgcttttatccctggtagatttatccttgagggttgtgtcattattcatgaggtgctccacgagttgaaaagcaaaaattcagaaggtattattctgaaaattgacttcgagaaagcgtatgataaagtgaactgggagtttttaatagaagtgatggaaagaaaaaatttcccaaagaagtggattagttggatcaagtcctgtgttatgggaggtagagtttgtataaatataaatggtgagagaactgacttttttagaacttttaggggccttaggcagggtgaccctctctctcctctcctctttaatcttgtgagtgatgctctagctgctatgtttgacagtgccaaagctgctggagttttatgtggattagttcctaacattttcccggggggtattactcatcttcaatatgcggatgacacagtcctatttgttgctaatgatgttaatcaaattgtggccacaaagttcatcctctaa

SEQ ID NO: 14915 - DNA, 1086 bp, Oryza sativa
  Clone ID: TFbOSC14937j.C1.o3.fg
gatgccacatcagtaaaaccggacaaaaatactgccgagggacctcaggagatgcctcgctatgatgatcattatggaagcacacgcttgtatgttggtagactgtcttcgcgcactcgttctcgtgacctagaatatcttttcggcagatatggaaggtcttgtgtgtttgacttgaatgatcttgttgaaggtttttcggttttttacacaacccgggagtggaagttgcaagtcggtgatgcatttgagtacttgagtcatgatggcttactgtttggcaaccattggtgcagaatacgtgaagtggagttgaagcgcgactacgcgtttattgaattcagtgatccccgtgatgctgatgaagcgcggtataacctagatggcagggatgttgatggaagccgcattcttgttgagtttgctaaaggagttccacgtggtgctgctggtggttcacgtgaatatatggggagaggacctcctccaggaacaggtcgctgttttaactgtgggattgatggtcactgggcaagagactgcaaggctggtgactggaagaacaaatgttaccgttgtggagaaagaggtcacatagaaagaaactgccaaaacagtccaagaaatctcagccgatctaggtccagatccctatctggatctcccaggggacgcagagatcgtgatgataggagatcaaggagtcttagctacagcagaagtcccaggcgatccatctccccagcagcaaatggaaaggagcgcaaccccagcccgaatggtaggcggagtccaaggagtccacaggatcgggtaagcccaccacccaaggataatgatgagcgcaatggtgacagcccctggggcagggagaacagcaggagcccatctgacggctaccgtagccctgtggctgccaatgggcgcagcccaagcccaaggaacaatggaagccctagtccaatggacaacaatagccgaagcccaagggacaacggcagcccgagccctagggatggaaatggtgatggtggtagccgtggcggctcacgctcgcccagagcaagcgagtcccctgaagcttga

SEQ ID NO: 14916 - DNA, 975 bp, Oryza sativa
  Clone ID: TFbOSC2613j.C1.o1.fg
gagatgccgcgctatgatgatcgttatggaagcacgcgcttgtatgttggtagactgtcttcccgcactcgttctcgtgacctagaataccatttcagcagatatggaagaatacgtgaagtggagttgaagcgcgactacgcatttattgagttcagtgatccccgtgatgctgaggaagcaaggtacaaccttgatggcagggatgttgatggaaaccccattcttggtgagtttgctaaaggggttccacgtggtcctggtggttcacgtgaatatatggggagaggacctcctcctggaacaggtcggtgttttaactgtgggattgatggtcactgggcaagagactgcaaggctggtgactggaagaacaaatgttaccgctgtggggagagaggtcacatagaaagaaactgtcaaaacagcccaagaaatctcaggcgtgagagaagttattcatgctctccatcgccacgccgtggacgtggtcgcagtcggagctatagccggagccggagccggagccgcagttacagccggtctaggtccagatccctgtctggatctcccagggcacgcagagagcttgaaagatcaaggagtcttagttacagcaggagtcccaggcgatccatctccccagcagcaaatgaaaagaagcgcagccccacccctgatggtagccgtagtccaaggagtccacaggaccaggtgagcccaccacccaaggataatgctgagcgtaatggctcagatcacggtgacagcccccggggcagggagaacagcaggagcccgtctgatggctaccgtagccctgcagctgccaacgggcgcagcccaagcccaaggaacaatggaagccctagcccaatggacaacggtagccgaagtcctagggatggaaatggtgacggtggtagccgtggtggctcacgctcacctagaccgagcgagtctcctgaagcctga

SEQ ID NO: 14917 - DNA, 972 bp, Oryza sativa
  Clone ID: TFbOSC400090j.C1.o17.fg
atgccgcgctatgatgatcgttatggaagcacgcgcttgtatgttggtagactgtcttcccgcactcgttctcgtgacctagaataccatttcagcagatatggaagaatacgtgaagtggagttgaagcgcgactacgcatttattgagttcagtgatccccgtgatgctgaggaagcaaggtacaaccttgatggcagggatgttgatggaagccgcattcttgttgagtttgctaaaggggttccacgtggtcctggtggttcacgtgaatatatggggagaggacctcctcctggaacaggtcggtgttttaactgtgggattgatggtcactgggcaagagactgcaaggctggtgactggaagaacaaatgttaccgctgtggggagagaggtcacatagaaagaaactgtcaaaacagcccaagaaatctcaggcgtgagagaagttattcatgctctccatcgccacgccgtggacgtggtcgcagtcggagctatagccggagccggagccggagccgcagttacagccggtctaggtccagatccctgtctggatctcccagggcacgcagagagcttgaaagatcaaggagtcttagttacagcaggagtcccaggcgatccatctccccagcagcaaatgaaaagaagcgcagccccacccctgatggtagccgtagtccaaggagtccacaggaccaggtgagcccaccacccaaggataatgctgagcgtaatggctcagatcacggtgacagcccccggggcagggagaacagcaggagcccgtctgatggctaccgtagccctgcagctgccaacgggcgcagcccaagcccaaggaacaatggaagccctagcccaatggacaacggtagccgaagtcctagggatggaaatggtgacggtggtagccgtggtggctcacgctcacctagaccgagcgagtctcctgaagcctga

SEQ ID NO: 14918 - DNA, 1170 bp, Oryza sativa
  Clone ID: TFbOSC900030j.C1.o14.fg
atgctccgtagccgcgctcgcctgccgctgcgcctgcctccagccgtgcgccgctgccgctccccatctgcggcaaaggaaaaggatgccacatcagtaaaaccggacaaaaatactgccgagggacctcaggagatgcctcgctatgatgatcattatggaagcacacgcttgtatgttggtagactgtcttcgcgcactcgttctcgtgacctagaatatcttttcggcagatatggaaggtcttgtgtgtttgacttgaatgatcttgttgaaggtttttcggttttttacacaacccgggagtggaagttgcaagtcggtgatgcatttgagtacttgagtcatgatggcttactgtttggcaaccattggtgcagaatacgtgaagtggagttgaagcgcgactacgcgtttattgaattcagtgatccccgtgatgctgatgaagcgcggtataacctagatggcagggatgttgatggaagccgcattcttgttgagtttgctaaaggagttccacgtggtgctgctggtggttcacgtgaatatatggggagaggacctcctccaggaacaggtcgctgttttaactgtgggattgatggtcactgggcaagagactgcaaggctggtgactggaagaacaaatgttaccgttgtggagaaagaggtcacatagaaagaaactgccaaaacagtccaagaaatctcagccgatctaggtccagatccctatctggatctcccaggggacgcagagatcgtgatgataggagatcaaggagtcttagctacagcagaagtcccaggcgatccatctccccagcagcaaatggaaaggagcgcaaccccagcccgaatggtaggcggagtccaaggagtccacaggatcgggtaagcccaccacccaaggataatgatgagcgcaatggtgacagcccctggggcagggagaacagcaggagcccatctgacggctaccgtagccctgtggctgccaatgggcgcagcccaagcccaaggaacaatggaagccctagtccaatggacaacaatagccgaagcccaagggacaacggcagcccgagccctagggatggaaatggtgatggtggtagccgtggcggctcacgctcgcccagagcaagcgagtcccctgaagcttga

SEQ ID NO: 14919 - DNA, 384 bp, Oryza sativa
  Clone ID: TFbOSC13213j.C1.o5.np
tgcaatgtcaacatcattcaccaaggtgtcgacgatagtatcaatgatggcacccaaaatgacaaccctagcaattgggactctgaaaaagactccaatggtgatagcaactatggtaccactgatgccaatgttaccaaggatttccaaccaccaattccaactccaagtcaaaatgatcgtccccagatggatagctcagcaaaaaagacgttgatttgctacaattgcaaaaaaccagggcattactcgagggactgcctgcaatcaaggcaaagtcgacctccacattaccgccaatttacacgaagcagacatcccaatcgtattgtggtcactggagcaaacgccgtacccgtgaggcctcgtgttaatcagaaccca

SEQ ID NO: 14920 - DNA, 412 bp, Oryza sativa
  Clone ID: TFbOSC14509j.C1.o1.np
cggaagatccggccgccattgatgcgccggcgaagtttgcgggagcggtttccaaccgaatccgagggagagagggagggaaaattggggggaaagggagagggaatcacggggaataattccccccactttattgcgcgcggggacggcgggaggcggcgggattcgcggcggcagcggcgctagggcgcgggcggggcggcgggagcggcgggaggatagggatgacaggtgggccccacccgtcagcgagagtggcgggcgggcccgcccgtcagcggcgcgcgcgcggggagaggccgagtgggccgcggggagaggagggagaggggagggagatgggccgggctggccagagagagagagggaaggaaaaagatatttttagcttttcctttttataaaatcattt

SEQ ID NO: 14921 - DNA, 4383 bp, Oryza sativa
  Clone ID: TFbOSC413089j.C1.o13.fg
atggctagccgcccccgccgtgcagctcgtgcaccagcccgctttggttttgaagatggtagagtcgagccagaagcaaatcatgagtcagctaatgagcggtctcaccacagcaaccgttcgcaccgtactgcttcccgcaacgcagaagttgagcaacctcgccgcagcaaccgctcgcatcgcacagcttcccgtgatgcagagattgaacagtctcaccgctctcaccgcactgccagtcacaattctggagaagaacgcctcccttccccacctcatgtggaaaacaacatgcagcacctgatggcagttcagacacaaatcttgcaaggattagccgcagccgtagctggttttcagcataatgcgcatggaaatggccaccctcacacgaataacaatagatccaagctgacagattttctgaggtctcgtccgccagagttctctcagaccgtcgagcccgtcgaggctgacgattggctgaaggatgttgatagaaaactcaacttagtgcagtgtactccggttgagaagacgctctacgcctctcaccagctaagaggacctgctgcagattggtgggagaattactgcaacgcacaccctgaacccactaacattgcttgggatgagtttgctacggctttccgtgcagctcatgtgcctgaaagcactattgacatgaagaaagaggaattcaacagacttaagcaaggcaacagcagtgtcaatgagtacctaagtatgttcaacaagttggctcggtacgcccctgaggaagtggacacagacaagaagaagatcaggaaattcttgaaaggaatcgcagttggaatgagactccagttgcttgctcatgacttccccacttttcaatatatgatcaacaaggcacttctacttgaggatgccagaaaagaggctaccgaagaatacaagaaacgcaagtctaaccatcagggaaattcttcccgaggcgcacctcaccctcgctacggtcaacccatgcaataccaccagtcggtcactcaggctaaccgccagccaggctacgcccctcgtcctcagatgaaccgtccggcacctcagccacagcagcgtgcccctagtggcaatactgcgccaaacagtgttacctctttcaagtcaccgcagggaccaacaacagttcagtgtttccggtgcgaccagatgggccactatgccagacagtgccctcagaatcctaccaacaccaactcagggcatgctaatggcagcactgccagaactcctactccagcggcagctcagtttcgtcctagctctcaggcaagtggacaaggttcacgtgcttccaacaactttggtcgaggccgggtgaaccacattcaagctgaaaccgctcaggatgctccagacgttgtgatggtacattcccctgggaggaatataagggcaactcaaatatgcccggaagttaaccttagaattgaggaagttgacttcctagccaaaccgatagtcctagactcgcaaagcttggacatcatcctagggatggattggttcgctaagcacaaaggacagatagattgtgccaaaaagtccatcaccttgcaaggacctggaggaaagcaagtccgctttacctctaacacccctaccgcaagtcggtctatcctaacctgtttacaagtcacctccttggagtcggtgcctatagtctgtgaatatcccgacgtatttccggaagaattaacgagtatgccaccagaccgagagattgagttcgccatagaactggcgccaggcactgcaccaattgcaaaaagaccctaccgaatggcagctaatgagttagcagaagttaaaagacaaatcgaagagttggagagtaaaggttatgtgcgacctagctcatccccttggggagccccagtgcttctggttaagaaaaaggatggctctgagagaatggtaatcgactatagagccctgaatgaagtaactataaagaacaagtacccgttgccatggattgacgacttgttcgatcaacttaaaggagcaagagttttctcaaaaattgacttgagatcaggttaccaccaactgaaaatcagatctgaagatatcccgaagaccgctttctcaacgcgttatggtctatatgagttcacagtgatgtccttcggactcaccaatgctccagcgttcttcatgaacttaatgaacaaaatctttatggattacctggaccagtttgtcgtggtgttcatcgatgacatcctgatatactccaagaacgaggaagaacatgccgaacacctgaggctgataatggaaaagctcagagatcaccaactattcgctaaattctcgaaatgtgaattctggttagaccgaatagcatttcttggacacgtgatctcctccagtggtgtcgaagtagatcccagcaaggttgaagctgtacttgcttggaacccgcccaagaatgtgtcagagattcgcagcttccttggcttagctggatattatcgaagattcattgaaggattctctaagctagccagacctatgaccgagctgttaaagaaggaaaagaaatttcaatggtctgcagcctgtgaagacagctttcaagaaatgaagaaaaggttgaccactgccccagttctcaccttgccagatatccgaaaagatttcgagatcttctgtgatgcatcaagacaaggcttaggatgtgtcctaatgcaagaacgaaaggttgtggcctatgcatccaggcagctcaggcctcatgaagtcaattatcccacccatgatctcgagttggcagccgtggttcatgctcttaagatctggaggcactatttaatcaggaacagatgtgaagtatacaccgatcacaaaagtcttaagtacatcttcactcagaccgagttaaacatgaggcagagaagatggctggaactaatcaaggattacgatcttggaatccattaccaccccggtaaagctaacgtggtcgctgatgcgctaagtcgcaaggcctattgcaatgtagctcaaatacggcctaaccaagaacgcctgtgcagagaattagagaagttaaggctgaccgtggtacagtcaggtgtccctgccagcttgacagtacagcctaccctagaatcgcaaattcgggaggctcagaaagatgacgaagggataaaagagttaataaaaagaatacaggagaagaaagacaccaacttctccatagacgatcaaggcacagtttggtgcggtccacgcatctgtgtaccggccaagaaggagttaagagatatcatcctaaaggaagctcatgagtccgcctactccattcatccaggaagtacgaagatgtaccaagatatcaaggcatacttctggtgggctggaatgaagcgagatgtcgcagaatacgtagccttgtgtgacatttgccaaagagtcaaggcagagcatcagaggccagctggtctgctgcaacccctaccgattcccgagtggaaatgggaagagatcggaatggatttcatcaccggtttgccaagaacccctagcgggtatgactccatctgggtaatcgtggaccgactcacaaaatcagctcatttcgtgctagtgaaaaccacctttgatggaaagaaactagcagaactctacatgacccatgtcgtatgtagatttggttgtcccaagaagattgtgtcagaccgaggcactcagttcacctcaaggttctggaagcagttgcatgaagccctcggaaccgatctaaactttagtacggcctaccatccgcagaccaatggtcagacagagagggtaaaccaaatcctagaagacatgctacgtgcgtgtgccctggatttcgaaggcacttgggatcgttgtttgccgtatgctgagttctcatacaacaacagttatcaggccagcattcagatgtcgccgaatgaggcaatgttcggaagaaagtgccgcactcccttgtgctggaatgaggtgggcgaagcgctggtattcggtcctaacatactcaagtcagcagaagaacaagttaagctaatccgagaacgtttaaagacagcgcagaaccgtcagaagaattacgctgacaatcggagacgtgaccttgagttcgaaaaaggagatcatgtgtacctgcgggtatcgcctctccatggtataaggaggtttgggatgtccggcaagttagcaccttgctacatcggcccctacctcataaccgccagacgtggcgaagtggcttatcagcttgagttacctgaaggtctcgcagatgtgcacaacgtgttccacgtatcccagctaaagaaatgtcttcgagttccataa

SEQ ID NO: 14922 - DNA, 2092 bp, Oryza sativa
  Clone ID: TFbOSC400545j.C1.o13.np
taagcggcggtgagatgggaagctgcgggcggcggcggcgccctcccctccgccggatccggcgggaggggaggcgggagtcaggaggcgggaggcgggggcgacgggcttcatcaacggagacaattatgcctcacaatccagcggagggccattctctgggtataatctctctatactattgtttactgcgttaattcttattgtgtttctgtttagcgcaatgttttcaatgcattgctgtatgatggatgtctatgcttattatatattaagcatgattcgttcgttacatttgtttaacaattgcactagtttattccctgttaaagtcatgattattatcttgataatttggattaaaatatgctgaattgtgaccatatttccaacaatccaaaaacctgataggtccttttcggtagttggatttgccgcatcactgaaaccgcacgctttcgatggttcaaactataagagatggaaagcacgtgcactactatggttgacagcgatgcaatgtttctttgtttcacggggcaaactgagtaaaccgcctctctctcctgaggaggaggccaagttcgaggctgcggattgcatattccgtggagcattgatcagtgtgctcatcgacaacatagtggacgtgtacatgcacatgccttcaggaaggaaatgtgggatgcacttgaggcgaaattcggggtttctgatgctggcagtgagctgtatgtcatggagcagttctatgactacaagatggtcgatgatcgatctgtagtggaacaagctcatgagatacagatgctggcaaaggaacttgagaacaaccgctatgagttgccagacatgttcgtggcgggaggtatcatagccaaattgccacctttttggtccgactttgctacttctctaaaacacagaggcaagagctcagtgtcactgatctcataggctctttgggtgttgaggagaaggcgagggcaaaggacaaccgcggcaaaaaggtggaggggagttctagtaccaatttggtatagaagaaaaaccctcaagcatcccataacaacaagaaagtcaagcctgatgtcaaacccaaggctacaactacttttaagaagaaaggcaagggaaaggctaagggtgactgctttgtgtgtggcaagcctgggcattgggccaaggactgtcctaagcgcaaagacagaaagtctgcaaacatggtcattagcaagggcggaggaacatcggggtatggtaaatttttacctacagttcttcctatttgtcactcacctgattggtgggttaacactggtgttaatattcatgtgtgtgctgacatttccttgttttcttcttatcaagtcgggagaggttcctccttgttgatggaaaatgggtcgcttgcggctgttcttggtgttggtacggtcgatctaaagtttacttcgggaaagaccgtgcagctgaaaaacgtgcagcatgtcccttcaataaagaagaatctagttagcggctctctactgtgtagacatgattttagatttgtgtttgaatccaataaatgtgttgtatctaaatatggaacgtttattagaaaatgttatgatagcggaggcttgttccgcttttctttggaccatgtaagcaatgatgacgagtcaaatgtgtggcattcgcgactctgtcatgtgaattttggttgtatgacgcgcttagccaacatgagtttaattccaaaatttgctttagttaaaggttccaagtgtcatacctgttttcaatcgaaacaacctcgcaagcctcacagtgcatctgaggcgaggaatttggctcctctagaacttgttcattccgatctatgcaaaatgaacagtgtgttgactaaagggggaaagaaatatttcatgatactgatagatgattgcactagattttgctttgtgtacttattgaaaacaaaggatgaagcactgcattactttaagatctataaggctgaggtagaaaaccagctggaaagaaaaatccaacgattgaggtcagataggggtggagaccgactcacggatacttttaggttcac

SEQ ID NO: 14923 - DNA, 3603 bp, Oryza sativa
  Clone ID: TFbOSC401345j.C1.o5.fg
atgtctggagttgccgccgccgccgctgctggaggagatggcggaggtggtgcgccgccaacaggagctggatccggagccggagctggtgcgccaggaggtgccatgaacgacagcaacaacggaggcaattctgcctcaccatccagcggagggctattctcgggcatgttattgcgttactgttatgttcctgttcctgacattcatgatgcgcatagtatgatactggttatgttaagatcaccctacactgcttatgccatgattattgctttaacattttggattaaaatatgccgattaatgactatatttccaacaatccaaaaacctgataggtcattttcggtagttggctttgctgctgctctgaaaccacatgcttttgatggttcaaactataagagatggaaagcacgtgcactattgtggttgacagcgatgcagtgcttctatgtttcacggggcaaacgaagtgaaccacctctttctcctgaggaagaggctaagttcgaggcttcggattgcctgttccgtggagcattgatcagtgtactcgctgacaacatagtggacgtgtacatgcacatgccttctgggaaggacatgtgggatgcacttgaggccaagttcggagtttctgatgccggcagtgagctgtatgtcatggagcagttctatgactacaagatattcgatgaccgttctgtagtagaacaagctcatgagattcagatgctggctaaggaacttgagaacaacaactgtgagttgccggacaagtttgtggcgggtggcattattaccaaactaccaccttcttggtcggactttgccacttctctaaagcacaagagacaagagttcagtatttctgatctcattggctctttgggtgttgaggagaaggcgagggcaaaggacgtccggggcaaaaaggttgagggaggttctagtgccaatatggtacagaagaagaaccctcatgcatcccacaacaacaagaaagtcaagcctgatgtcaaacccaaggctgcaaccaattttaagaagaaaggcaagggaaaggcaaaggtagactgctttgtgtgtggcaagtctgggcattgggccaaggactgtcctgagcgcaaagacaggaagtctgccaacatggtcattagcgagggcggaggaacatcggggtacggtaaaatattacctatagttctctctgtttttcattcacctgattggtgggtggacactggtgctaatattcatgtcgggagaggtttctccttgttgatgggaaacgggtcgcttgcggctgttcatggtgttggtacggtcgatctgaagtttacttcgggaaagaccgtgcagctgaagaacgtgcagcatgtcccttcaataaagaagaatctagttccaagtgccatacttgcgttcaatcgaaacaacctcgcaagccttacaaggcatctgatagatgattgcactagattttgctatgtgtatctattgaaaacaaaggatgaggcattgcattactttaaaatctataaagctgaggtagaaaaccaacttgaaaggaaaatcaaacggttgaggtctgatagaggtggggagtatttttccaatgagtttgcattcttttgcgaagagtttggaattattcatgagaggatgcctccctattcaccccaatcaaatggggtggccgaaagaaagaaccgtactctaactgagatggtgaatgccttgttagacactgcggggctttccaaggaatggtggggtgaggcagttttgactgcgtgtcatgtcctgaataaaattccaatgaagcataagaaagtaacaccattcgaggaatgggaaaggaagaaattaaatctctcatacctacgaacatggggctgtttggccaaggtaaatgtacctatagccaaaaagcggaaacttggaccaaatactgttgattgtgtgttccttggttatgctatccacagtgtgagttatagattcttaatagtaaactctagagtacccgacatgcatgttggtacaattcttgagtccagagatgctacattatttgagaatgaatttcctatgaaacatacacctagcacttctagtaaagaaactgtcatgccccatgagcactttgcaccgataaaacacaatgatcaaacgcctgaggaaaatcctaaggaggacaacattgtagatactcgcaagagtaagagacaaagggttgcaaaatcatttggagatgactacattgtatacctcgtggatgacaccccaagaaccatagaagaggtatattcatctcttgacgctgactactggaaggaagcagtacacagtgaaatggactctattatgtctaatggtacttgggaagtcgttgagcgtccatatgggtgcaagcccgtaggatgcaaatgggttttcaagaaaaagcttaggcctgatggtacaatcgaaaagtacaaggcaaggcttgtggccaagggttatacccaaaaggaaggcgaggacttcttcgacacatactcaccagttgctcttttgaccacgattcgagtactacttgctctggcagcctctcatggtcttctcgtccatcagatggacgttaagacagctttcctaaacggagagctggaggaggagatctatatggatcaaccagacgggtatgtactagaaggtcaggagggaatggtgtgtaaactgttgaaatccttgtatggcctcaagcaagcacctaagcaatggcatgagaagtttgacaccacgcatacatctgcaggctttgttgtgaacgaagctgacaaatgtgtatactatcactatggtgggggagaaggggtgatcttgtgcttatatgtcgatgacatattgatctttgggaccagccttaatgtgattgaggaggtcaaggactatttgtccaagagttttgaaatgaaggatttgggagaggctgatgttattcttaacatcaaactacaaagaggagatgagggtgggattacacttgtgcaatcccactatgtgaacaaggttttgagtcgctttggatatagtgactgcaagccagctcctactccttatgatcccagcgtgctattaaggaaaaaccaaagaatagcaagggatcaactgagatactctcaaatcattggtttattgatgtacttggctagcgcaatgaggcctgacatctcatttgctgtaagcaagctgagccggtttgtctcaaatccgggagatgatcattggcaggctctggaaagagtaatgcgctatctaaagggcactatgagctatggaattcactataccgggtatccaaaagtactagaagggtatagtgactcaaactggatatctgatgctgatgagataaaagccacaagtggatatgtgttcacacttggaggcggcgctgtttcctggaagtcttgcaagcagaccatcttaacgaggtcaacaattgaagcagaacttacagcactagatactgcgacagttgagaccgagtggcttcgtgaactcctgatggatttgccggtggttgaaaaccagtgccagctatcctaa

SEQ ID NO: 14924 - DNA, 1249 bp, Oryza sativa
  Clone ID: TFbOSC21561j.C1.o2.hg
tgaatgggcggccaaaattgcaattagccccttgtcgccctcgggcctaatcgcaattttggccgacggcggcagacagcgcggtcgacccaccgtctgccacgtcagcttgccgcccaccaattgggcggcaggggctatttctgcaatttttttgtcgatctccccgtcgcttcggtctcgactcctcgtctcctcggccgccgccgccgccgccgccgccgagcagaggcgatctccacccgcgagcagcggcgccgtcgccggtttcaagatgcctcgctatgatgaccgtgatcgctacgatgaccgttacggcggcaacacgaggctgtacgtaggtcgtctttcctcgcgcacccggacccgggaccttgaagaccttttcggcagatatgggagagtgcgatatgtggatatgaagcacgagtttgcatttgttgaatttagtgatgctcgggatgctgatgaggcaaggtacaacctggatggtcgggactttgatggaagccgcatgattgttgagtttgctaaaggggttccacgtggccctggaggatcacgtgaatatatgggcagaggaccaccacctggttctggccgctgctttaactgtgggattgatgggcactgggcccgtgactgcaaagctggagactggaaaaacagatgctatcggtgtggagacaggggccatatagaaagggactgccggaacagccctaagaatctcaagcgtggaagaagctactcaagatccccatcccctcgtcgtgggaggagccgtggtaggagctacagcaggagccgtagcaggagctacagccgctcccagtctccaaggagggatagccgtaatgaaaggagatcaaggagccctcgtgacagtcggagccctaggggaagcccccgtgacagtcgcagccctagggggagcccccgtgacagtcgcagccctaaggggagccctcgcgacacccagagccctaggggaagccctcgtgatagccgcagccctaggagaagtgcttcaccacccaacgggaggaaccgcagccctacccctaatgccagcaggagtcctgcaccaagggacagcaggagcccaatgagagctgacagccgtagccctgctgaccatgagcgccgtgacatgagtacagctgccaatggccggagcccaagccccagggattatgaagacaatggcaatcatcgggcctcgcctagaggaagcgcatccccttga

SEQ ID NO: 14925 - DNA, 626 bp, Oryza sativa
  Clone ID: TFbOSC415629j.C1.o19.gp
tttacaagattgcagacaaggacaatatactttttaaggtagcgatacaaagtccagatcacaaggttccctgcccagtggacattggaggtaataaaggcataaacataaggcaggtttaacaactatacacgatacaccgatgccatccaagatgaacaaaatcaagatgctgctgctgctgctgcttcttcccttgcaaaatacttcagtagccaccaacaaaggattgcctattgtaaccccttgatgctgcaacattattcccatatgtctggtgctgggcgccagtagactgccctggacaatctctagcgaagtgcccaggctgtttacatttgaaacactccgagccaccagtagactgcactggacagtctctagaaaagtgcccaggctgtttacatttgaaacactccaagccaccagtggactgccctggacagtctctagcatagtgcccgggctgtttacatttgtaacactccgagctgccgttgccagcgatggagttgtagttacccatggagcttccaccggctgatgtttcctgcatatccatatctgcacccacatggcagatctgggcgctgtgcccatttgctccacaaatgctgcatgtctgc

SEQ ID NO: 14926 - DNA, 3615 bp, Oryza sativa
  Clone ID: TFbOSC16296j.C1.o1.fg
atggcagatcaggggcactctgtgtctgacggctatgaaatgcttctggatgatctgtatatcatggagcagtttcatgactacaagatggctgacaaccgttttgtagtcgaacaggctcatgagatacaaaccatggttaaggaactcgaactccttaagtgtgtcttacccgacaaatttgtggccgggtgcattattgcgaaactacctccatcatggagaagttttggtactgcactcaaacacaagagacaagaatactccgttgaggggttgatagcgtctcttgatgttgaggagaaagctcgggaaaaagacgccgcatctaagggcgatggtgggcagtccagtgccaatgttgtgcacaaggcccagaacaagagcaaggggaaatacaaagctcaacagaccaccaacttcaagaagcagaagaagaacaacatcaatcctaaccaggatgagaggacttgctttgtgtgtaggcaacctggtcatctggctaggaagtgtccacaacgcaaggggatgaaggcacctgcagggcaaacttctaagtctgctaatgtgacaattggcaatactggagatggaagcaggtatggtaatttacctactgttttttcagttaatcagtctactaattggtgggttgatactggggccaatgtcgcacggggttccactgtcctaatggggactgggtcacatgcttctgttcatggtgttggcacagtagatctgaagtttacttcgggaaagatcgtgcagctgaagaacatgcagcatgtcccttctatcgacaggaatcttgttagtggctcccgtctgactagagacggatttaagttggtttttgtgtctaataaagtagtcgtgtctaaacatggatattttattggtaaaggttatgagtgcggaggcctattccgcttttccttttctgatttctgcaataagtctgtgaaccatatttgtggcagtgtggatgataagactaatgtttggcactcacgtttatgtcatattaattttggcttgatgtttcggctttccagcatgtgtttaattcctaagttttccattgtcaaaggttctaagtgccatagttgtgtgcaatcgaagcaacctcgcaagcctcacaaggctgccgaggagagaaacttggcacctctagaactcctacattcagatctttgtgaaataaatagggtgttgacgaagggtggaaaacgatatttcatgacgttgattgatgatgctactagattttgctatgtatacttgttaaaaacgaaagacgaggctctagactattttaaaatttataagacagaagttgaaaatcaacttgacagaaagataaaaaggcttaggtctgatcgtggtggagagtttttctcaaacgagtttaacttattctgtgaggaacatggcatcatacatgagaggacgcctccctattctctcgagtctaatgggattgctgaaaggaagaaccgcacactgactgacttggtgaatgccatattggacaccgcgggactacctaaggcatggtggggggaggcattgttgacctcgaatcatgtgttaaatagagttcctaacagaaataaggacaaaacaccatatgagatatggattgggagaaaatcatcactttcttatttgcgcacattggggtgcttggcgaaagtcaatgtaccaataacaaagaagcgcaaacttagacctaagactgtggactgtgtctttctgggatatgctcatcataggattgcctatagatttttaatagttaaatccgaggtacctgacatgcatgttggtacaattatggagtctcgtgatgctaccttctttgagagctttttcccaatgaaggatacacatagtagttcgagtcaaccctctgaagtaatttccagtttaatcacaccaccagaacaaactgaacatacacatgaacatgtcactgaggaggatgtcagtgaagctcctcgaaggagtaagagacaaaggacggctaagtcctttggtgatgatttcactgtgtacttcgtggatgacactcctaagtcaatttcagaagcatatgcatctcctgatgcagactactggaaggaggctgtccgtagtgaaatggattccattatcgctaacgggacttgggaggtgacagagcgaccctatgggtgtaaatctgcggggtgcaagtgtgtgttcaagaagaagcttaggtctgacggtactattgaaaagtacaaggctcggcttgttgctaagggctatattcagaaagaaggcgaagatttctttgacacttactcacctattgctagattgaccacaattcgtgtgctactttccttaccagcctcacatggtcttctcgttcatcaaatggacgttaagacaatttttcttaatggagagctggatgaggagatctatatggatcaacttgatgggtttgtagttgaaggtcaagaaggcaaagtgtgcaaattgttgaagtctttgtatggtctgaaacaagctcctaagcaatggcatgagaaatttgacaaaacattgacatctgcaggctttgcagtcaatgaggcagataaatgtgtgtactatcgccatggtgggggtgagggagttattctgtgcttgtatgttgacgacatactgatatttgggacaaaccttgaggtgataaatgaggttaaatcattcttgtctcaaaattttgatatgaaggatttgggagtagctgatgttatcttaaacattaagctaattagaggtgagaatgggattacactcttgcagtcccattatgtggagaagatcttgaatcgctttggctacattgatagtaagccttctccaacaccttatgatcctagcttgttgcttcgcaagaacaaaagaattgctaagaatcaactggaatactcccaaatcattggctcgctgatgtacctggctagtgcaataaggcctaatatctcctttgttgtgagcaagttgagccggtttacctctaatccgggagatgatcactggcgtgcacttgagcgagtaatgcgctatctgaaaggtactatggaattggggcttcactatactgggtatcctgcggtattggagggttatagtgattctaactggatctctgatgtggatgagatcaaagccactagtggatatgtcttgacattgggtggtggtgctgtttcgtggaggtcttgcaaacagaccattttgacgaggtcaaccatggaagcagaactgacggcactggatactgctactgttgaggcagaatggctgcgtgatctattaatggatctgcctattgttgaaaaaccgatgccggctatcctaatgaactgtgacaatcaaacggtaattgtcaaagtgaatagttctaaggataatatgaaatcatctagacatgtgaaaagacgattgaagtctgtcaggaaattgagaaactccggagttataacgttggattacatccaaacagctagaaacctggcagatcccttcacgaagggactatcacgaaatgtgatagataatgcatcgaaggagatgggtttgagacccatgtga

SEQ ID NO: 14927 - DNA, 3615 bp, Oryza sativa
  Clone ID: TFbOSC16300j.C1.o2.fg
atggcagatcaggggcactctgtgtctgacggctatgaaatgcttctggatgatctgtatatcatggagcagtttcatgactacaagatggctgacaaccgttttgtagtcgaacaggctcatgagatacaaaccatggttaaggaactcgaactccttaagtgtgtcttacccgacaaatttgtggccgggtgcattattgcgaaactacctccatcatggagaagttttggtactgcactcaaacacaagagacaagaatactccgttgaggggttgatagcgtctcttgatgttgaggagaaagctcgggaaaaagacgccgcatctaagggcgatggtgggcagtccagtgccaatgttgtgcaccaggcccagaacaagagcaaggggaaatacaaagctcaacagaccaccaacttcaagaagcagaagaagaacaacatcaatcctaaccaggatgagaggacttgctttgtgtgtaggcaacctggtcatctggctaggaagtgtccacaacgcaaggggatgaaggcacctgcagggcaaacttctaagtctgctaatgtgacaattggcaatactggagatggaagcaggtatggtaatttacctactgttttttcagttaatcagtctactaattggtgggttgatactggggccaatgtcgcacggggttccactgtcctaatggggactgggtcacatgcttctgttcatggtgttggcacagtagatctgaagtttacttcgggaaagatcgtgcagctgaagaacatgcagcatgtcccttctatcgacaggaatcttgttagtggctcccgtctgactagagacggatttaagttggtttttgtgtctaataaagtagtcgtgtctaaacatggatattttattggtaaaggttatgagtgcggaggcctattccgcttttccttttctgatttctgcaataagtctgtgaaccatatttgtggcagtgtggatgataagactaatgtttggcactcacgtttatgtcatattaattttggcttgatgtttcggctttccagcatgtgtttaattcctaagttttccattgtcaaaggttctaagtgccatagttgtgtgcaatcgaagcaacctcgcaagcctcacaaggctgccgaggagagaaacttggcacctctagaactcctacattcagatctttgtgaaataaatagggtgttgacgaagggtggaaaacgatatttcatgacgttgattgatgatgctactagattttgctatgtatacttgttaaaaacgaaagacgaggctctagactattttaaaatttataagacagaagttgaaaatcaacttgacagaaagataaaaaggcttaggtctgatcgtggtggagagtttttctcaaacgagtttaacttattctgtgaggaacatggcatcatacatgagaggacgcctccctattctctcgagtctaatgggattgctgaaaggaagaaccgcacactgactgacttggtgaatgccatattggacaccgcgggactacctaaggcatggtggggggaggcattgttgacctcgaatcatgtgttaaatagagttcctaacagaaataaggacaaaacaccatatgagatatggattgggagaaaatcatcactttcttatttgcgcacattggggtgcttggcgaaagtcaatgtaccaataacaaagaagcgcaaacttagacctaagactgtggactgtgtctttctgggatatgctcatcataggattgcctatagatttttaatagttaaatccgaggtacctgacatgcatgttggtacaattatggagtctcgtgatgctaccttctttgagagctttttcccaatgaaggatacacatagtagttcgagtcaaccctctgaagtaatttccagtttaatcacaccaccagaacaaactgaacatacacatgaacatgtcactgaggaggatgtcagtgaagctcctcgaaggagtaagagacaaaggacggctaagtcctttggtgatgatttcactgtgtacttcgtggatgacactcctaagtcaatttcagaagcatatgcatctcctgatgcagactactggaaggaggctgtccgtagtgaaatggattccattatcgctaacgggacttgggaggtgacagagcgaccctatgggtgtaaatctgcggggtgcaagtgtgtgttcaagaagaagcttaggtctgacggtactattgaaaagtacaaggctcggcttgttgctaagggctatattcagaaagaaggcgaagatttctttgacacttactcacctattgctagattgaccacaattcgtgtgctactttccttaccagcctcacatggtcttctcgttcatcaaatggacgttaagacaatttttcttaatggagagctggatgaggagatctatatggatcaacttgatgggtttgtagttgaaggtcaagaaggcaaagtgtgcaaattgttgaagtctttgtatggtctgaaacaagctcctaagcaatggcatgagaaatttgacaaaacattgacatctgcaggctttgcagtcaatgaggcagataaatgtgtgtactatcgccatggtgggggtgagggagttattctgtgcttgtatgttgacgacatactgatatttgggacaaaccttgaggtgataaatgaggttaaatcattcttgtctcaaaattttgatatgaaggatttgggagtagctgatgttatcttaaacattaagctaattagaggtgagaatgggattacactcttgcagtcccattatgtggagaagatcttgaatcgctttggctacattgatagtaagccttctccaacaccttatgatcctagcttgttgcttcgcaagaacaaaagaattgctaagaatcaactggaatactcccaaatcattggctcgctgatgtacctggctagtgcaataaggcctaatatctcctttgttgtgagcaagttgagccggtttacctctaatccgggagatgatcactggcgtgcacttgagcgagtaatgcgctatctgaaaggtactatggaattggggcttcactatactgggtatcctgcggtattggagggttatagtgattctaactggatctctgatgtggatgagatcaaagccactagtggatatgtcttgacattgggtggtggtgctgtttcgtggaggtcttgcaaacagaccattttgacgaggtcaaccatggaagcagaactgacggcactggatactgctactgttgaggcagaatggctgcgtgatctattaatggatctgcctattgttgaaaaaccgatgccggctatcctaatgaactgtgacaatcaaacggtaattgtcaaagtgaatagttctaaggataatatgaaatcatctagacatgtgaaaagacgattgaagtctgtcaggaaattgagaaactccggagttataacgttggattacatccaaacagctagaaacctggcagatcccttcacgaagggactatcacgaaatgtgatagataatgcatcgaaggagatgggtttgagacccatgtga

SEQ ID NO: 14928 - DNA, 1782 bp, Oryza sativa
  Clone ID: TFbOSC421766j.C1.o6.gm
atggaggcgtcggcgaggggaaacctgaggaatgggggcgctagggtctctggaacctctgccttcgacgtcctgcaccgggagaaggcggcaataaggcgctgtgattttactatggctggttttgccgatgcactgaggctggataaattcaccgtccagtgccaatattttgcacaggcccagaacaagagcaaggggaaatacaaagctcaacagaccaccaacttcaagaagcagaagaagaacaacaacaatcctaaccaggatgagagaacttgctttgtgtgtaggcaacctggtcatctggctaggaagtgtccacagcgcaaggggatgaaggcacctgtagggcagacttctaagtctgctaatgtgactattggcaacactggagatagaagcgtcgcacggggttccaccgtcctaatggggaatgggtcacatgcttctgttcatggtgttggcacggtagatctgaagtttacttcggaaaagatcgtgcagctgaagaacagctttttcccaatgaaggatacacatagtagttcgagccaaccctctgaagtaattcccagttcaatcacaccaccagaacaaactgaacatacacatgaacatgtcactgaggaggatgtcagtgaagctcctcgaaggagtaagagacaaaggacggctaagtcctttggtgatgatttcactgtgtacctcgtggatgacactcctaagtcaatttcagaagcatatgcatctcctgatgcagactactggaagaaggctgtccgtaatgaaatggattccattatcgctaatgtcaatgaggcagataaatgtgtgtactatcgccatggtgggggtgagggtgttattctgtgcttgtatgttgatgacatactgatatttgggacaaaccttgaggtgataaatgagtcccattatgtggagaagatgttgaatcgctttggctacattgatagtaagccttctccaacaccttatgatcctagcttgttgcttcgcaagaacaagagaattgctaggaatcaactggaatactcccaaatcattggctcgctgatgtacctggctagtgcaactaggcctgatatctcctttgctgtgagcaagttgagccgatttacctctaatccgggagatgatcattggcgtgcgcttgagcgagtaatgcgctatctgaaaggtactatagaattggggcttcactatactgggtatcctgcggtattggagggttatagtgattctaactggatctctgatgtggatgagatcaaagccactagtggatatgtctttacactgggtggtggtgctgtttcgtggaggtcttgcaaacagaccattttgacgaggtcaaccatggaagcagaactgacggcattggatactgctactgatgaggcagaatggctgcgtgatctattaatggatctgcctattgttgaaaaaccggtgctggctatccttatgaactgtgacaatcaaacggtctccggaacctctgccttcgacgtcctgcaccgggagaaggcggcaataaggtttttgggaagcgcttcgcgcgactgctccctgttcgtccgcgacggctcgccttcctctccgctcgtgtgcttcgcgccttcgtcgacgctcgcaaccgcgagtagttcctaccgagcaaccgaattgatccagatggatagtacttggccttcggaatctgagcacacagagaatcaggctcctgaagcagccgccaacattgctttgctagcatag

SEQ ID NO: 14929 - DNA, 972 bp, Oryza sativa
  Clone ID: TFbOSC401810j.C1.o39.fg
atggccttctccggcgggcagctgatgatgacggggacgagcgttagccggcaacgcctcgccgtccatggacttgggcggctcagcggtgtccacggcaactccagcgagatggttcgggacgcagccggagctgatgacgccttgcgggcaccgagtagtggcgctccggccggcgttctcttcaagcagcaagacaatcatcgtctgcctggtgatcgtctcctccttagcgcgcttcctcagcgcacgcgcctcctcgccggacaccgaggaaaaagggagaatcatatggatcatggacttgtggacaaggctcaaccttctcaagataaccgtgggaacatggtgaagaagcttgagaagggatcaaccgtagcttgcaccaagtcctgtcaagaaaacaataagtccaacaacaagagtaaggggcaaattcaaagttggatcaaaactctcattacttgcttcatgtgcaagaaagtgggacactatgccttgatatgttccaacaagattgatgaccaagtcacacttccaaagaggagaacaagaagaagcaataggaagtgctatggatgcaatgagaagagtcatgaagttgcatcttgccctcacatgaagaatcactttgtgtcatcaaggaagaagcttaatatcaaggtagcaagtagcaaggtagcagagaagatgcaagatgtggtgaagaaagcaccatgtaaagacaagaatcgactttgctacaattgccgtgcaaagggacatattggtaacaattgtcccatgggtaacattcctaagccaaactcctcatttgattatgatttgcctagggatgccaaaaaggacatttgtgctattagggtgattagttcaccacatgctagcataaaatccatttgggtacctaagtctcatgtgacttacctttatggacccaatgttgttgaagaccaaaatgtgctaaaatga

SEQ ID NO: 14930 - DNA, 159 bp, Oryza sativa
  Clone ID: TFbOSC101387j.C1.o4.np
atggtgggttgtgagcacatggttttgatggtcgtgctcatgacaattaaggaccggttcacgagtttcgattgtgaaacattaatcgtgccaaccacaagccagcatgggcaacggctttatcttttgtatagcatggttcattgcggggcaccagac

SEQ ID NO: 14931 - DNA, 3685 bp, Oryza sativa
  Clone ID: TFbOSC20344j.C1.o4.np
atggcttattgtgccaatgcactgaggctggataaattctccggtatacactttaagggatggtagaacagggtcactctatggttgacggcgatgaaatgcttctgggttagtaatggcaaatctaaaggaattctcattgctgaaaagcagaaaaaattcataaatgatagaattggatgcattgttagcgttcttggcaatcgtctagtcgaggtgtatatgcacatgattgacactaaggagttataggatgcactgaataccaaattcgatgctactgatgctagcaatgatctgtatgtcatggagcagtttcaagactacaagatgattgataaccattctgtagttgagcagactcacgaaacacatacaaaggctaaggaactcgaactccttaagtgtgtcttacccgacaaatttgtggtcgggtgcattattgcgaaactaccttcattttggaaaaatttcaatattgcacttaaaacacacgagacatgaatactatgttgaggggttaatagcatctcttgatgttgaggagaaaactcgggaaaaagacatcgcgtctaaggagaacttgctttgtgtgtggcttgcctggtcatctggccaagaattgtccacaacgcaaggggatgaaggcacctgcagggtagtcttctaagtcttccaatgtgaccattggaaacactggagatgaaagcgggtatggtaatttacctactatttttttctgttaatcagtctactaactggtgggtagatacaggggccaatgtacatgtttgtgctgacatctcactattttgttcttatcaggtcgcacgggattccaccgtcctaatggagaataggtcacatgcttcagttcatgtattgacacggtagatctgaagtttacttcaggaaagatcgtgcaactgaagaacatgcagcatgtccctactatcgacaaaaatcttgttagtgtctcccatctatgtagagatggatttaagttggtgtttgaatctaataaagtagtcgtgtctaaacatggatattttattggtaaaggctatgagtgtggataatgaggctaatgtttggcactcacatttatgtcacattttattgggcttgatgtctcggctttacagtatgtgtttaattcataagttctccattgttaaaggttctaagtgtcataattgtgtgcaatcaaagcaacctcgcaagccttacaaggcagccggggagagaaacttggcacctctggaactcctacgtttagatctttgtgaaatggatggggtcttgagaagggagaaaaacgatatttcatgacgttgattgatgaagctacttgattttgctatgtgtatttgttgaaaacgaaagatgatggtccagactattttaaaatctataaggcagaaattgaaaaccaacttgacagaaagataaaaagatttaggtctgatcgtagtggagagtttttctcaaacgagtttgacttattctgtgagaaacatggcatcatacatgagaggacgcctccctgttcacactgactgacatggtgaatgccatgttggatactgtgggactacaggcatggtggggggaggcattgttgacctcgaatcatgtcttaaatagggttcctaatagaaataaggacaaaacaccatatgagcaatggatcgagagaaaaccatcactttcttacttgtgcacatgggggttcttggtgaatgtcaatgtaccaataacgaagaagtgcaaacttggaactaatactgtggaccgtgtctttctaggatatgctcattacagcattgcctatagatttttaatagttaaatcggaggtacctcacatgtatgttggtacaattatggagactcatgacgctaccttctttgaaagcttttttccaataaaggatacacacagtacttctagccaatcctgtgaaataattctcagttcaatcacaccaccaggacaaactgaacatacacatgaatatatcactgaggaggatgactgaggaggatgacagtgagactccttggagaagtaagaaacaaaggactactaagtcttttagtcatgatttcactgtgtacctcgtagatgacactcctaagtcaattttagaagcatacgcatctcctggtgctgactactagaaggaggctatccatagtgaaatggattccattattgctaacaggattttggaggtgacagagtgaccctatgggtgtaaacatgtgggatgcaagggggtgttcaagaaaaagctttggcctaatggtactattgaaaagtacaaggatcagcttgttgcaaagggctatactcagaaagaaggcgaagatttcttcgacacttactcacctgttggtagattgaccacaattcatgtactacttccctagctgcctcacatggtcttctcattcatcaaatggacgttaagacagcttttcttaatgtagagctggatgagatctatatggatcaaccttatgggtttatagttgaaggtatagaaggcaaggtgtgcaaactacgtagatcctcataccaacggaccccaataccctctatatccggtctacgggtatcccccgtcgacagatatctgtaggctttgcagtcaatgatgcaaaaaaatatgtgtactatcaccatggagggggtgagggagttattatatgcttgtatgttgatgacatactaatattttggacaaatcttgagttgattaatgatgttaaatcattcttatctcaaaattttgatatgaaagatttgggagtagctgctgttatcctaaacattaagctaattagaggtgaggatgggattacactcttacagtcccattatgtggagaagatcttgagtcactttggctactaatagcaagccttctccaacaccttatgatcctagcttgttgcttcgcaagaagaagagaattgctaggaatcaattggaatactcccaaattattggctcacttatgtacctacctaccacaactaggactgacatctcctttgctgtgagcaagttgagccggtttatctctaacctgggagatgatcactggcgtgcgcttgagtgagtgatgcactgtctaaaaggtactatggaattggggcttcactgtgctaggtatcctgcgttactagaggaatatagtggttttaattggatctctgatgtggatgagatcaaaaccactagtggatatgtcttcacatcaggtggtggtgctgtttcatgaaggtcttgcaaactgactattttgatgaggtcatccatagaagcagagctgatggcagaagatactgctattgttgaggcggaatggctgcgtgttctgttgatggatctgtctatggttgaaaaactgaaatgtgaaaagacaattgaactttgtcaggagattgagaaactccgaagttataccattggattacatccaaacagcaagcaacctggtagatccttcacgaagggactatcacgaaatgtgatagacaatgcatagaaggagatggtttgagaccatgtagcattcttgaaagaactcacatttgtgagcttgactgttggtcgcagtctatggagattttgggtgaatcttctaggaagcttaataagagaccaaggagta

SEQ ID NO: 14932 - DNA, 3912 bp, Oryza sativa
  Clone ID: TFbOSC400810j.C1.o4.fg
atgtctgatgatggcgggcgatacacaccgcccggacgccgtggtggcggtggcggcggcggaagcggcagcgggcgcggaggcgcaagtggcagcggcgcgggggatggcgcagacggcgcgaaccttcctctcgtgccacaggggagagatgctgggcacactgctcgcctcccggtgctgtcgaggaccaattatccggattgggcattgttgatgcgtgtaaacctacaggcgcaggggttgtggacggcgattgaacccggatacgcggagtaccgcgacgatcgggcggctctctcggcaatccttcaggcggtgccgcgcgagatgttgcgcgggctggcgaagcatgacacggcgaaggcggcgtgggacgccatcaagacaatgcgggtcggcgtcgaccgtgcgatgcgcttcaaggatggagagacaccggaggagttcgcgatgcgactcactgccgtcgtcgcggacattcgcgacatgggtggagtcatggaagacgaacacatcaacaagaaactgctgcgcgttgtgcccaagaagtacaagccggtggcgatttccctcgagcagcttctcgacgtgaaaacgatggcccttgaggagctcgttgggcggctgtcgatggtcaactcatacagtgatgatgaggaggaaggtggcggcgacaagctctacctcacggaggaacagtggcaggcacgcgcaaggaaacaggagcaggaaggctccggcggcagcagcaagagcaggggcagctctggcacccagaacaaccgtcggggcaaggccggtgggtcaccgaaggggaaggagacgatcaacagtgggaacaccagccgtgactactccaaggtaaaatgtttcaattgtgatgagtttgggcattttgcaaggcagtgccgcaagccgcggcgccaacgtcgaggggaagtaaacctgacgcagggggaggaggagccgaccttgctcatggctcacgtcatgggggtgtctctcgccggtgaggagacactcgggcgaacacctggtgtgcatgaggtgcatctcactgagaaaaaggtaaagcgctccccaagcttcctgtacattctgaagttgaacatggcgaggcccatctgtttggcggcgaatggcaccgagacggcgtggcgttggcacgcccgtttcggccacctcaatttccaggccctccggagattggcgcaagcggagatggtccgtggactccccgtgattgaccacgtcgatcaactgtgtgatgggtgcctcgccggcaagcagcgacgagtgccgttcccagacaaagccaggttcagggcgcaggatgcgctcgagttggttcatggcgacctgtgcgggccgattgcgccggcaacgccaggcggcaggaaatatttcctgctccttgttgatgacatgagccgtttcatgtggatacggctcctctccggcaagcacgaggcagcggctgcgatcaagcagttcaaggccggcgtcgagatggaaagcggccgaaaactgcgggcgctgcgcaccgaccggggaggagaatttacctctgtcgagttcactgagttctgtgccgatcggggtgtgagtcgccagctcacggctccatactcgccgcaacaaaatggggtcgtcaagaggcgaaacctgactatcgtcgctgctgctcgctctatgctcaaggcggcggggatgccggcacatttctggggagaggcagtcgtggcggctgtgtatctattgaatcggtcgcccacaaagagcctggatggtgtgacgccatatgaagcgtggcacgggcgacgtccctcggtcgaacacctgaaggtgtttggctgtgtcggctacgtcaagacagtgaagccaaatttgaggaaacttgatgatcgtggcacacgaatggtgttcattggttatgagcagggctcaaaagcctatcggatgtatgatccggtgtcacggcgagtttatgtgtcacgcgacgtcgtctttgatgaggcggcaatgtggccatggcgtgatccggaggtcactcaaactggaggcgaggaggatttcactgtggagtttttttccactccgctaggtggaaatcgtgttcctgacgtggttgtggaacatggaggcgcacgggaaactgaaaccgcaccaagtccgctggccacgcccgacgcggcgcccgtgtggtctccagtgacatcaagctcacctgccggtgttgagttctgtacaccaccatctgatgccagtattgaaagcgatggagctcctccccgttttcggacggtgaacaatgtgctggccaccacaactccggtgctcgatttcgactacgacgacgagtgtctcatagcggagcaggagcctttcagtttcaaggaagctgagaaggagcagtgctggatgaaggcgatggaagaggagatgagctccattgaaggtaacaatacttggttcctctgtgacttaccatctgaccatagggcaattggtctcaaatgggtttacaagatcaagagaagtgccgaaggtgagatattgaagtacaaagcaagattggtggcaaaggggtatgttcagcaacaaggcatagattatgaagaagtatttgctccagtagcaaggatggaaactgtgaggttgctggttgctttggcagcacatgagggttggcaaatacatcacatggatgtgaagtcagctttcctcaatggtgaattggaggaagaggtgtatgtagtccaaccacctggttttgttgttgagcacaaggagaacaaagtactgaagttaaaaaaggccctatatggtttaaagcaggcgccaagagcttggtatgcaaagctggattctacacttgcaaatctggattttgtaagaagtgcaacagagaatgcagtgtacactagaggggaaggtaatgccagactcatggtgggggtatatgttgatgatcttatcattacaggagctttggggacagaaatagcaaaattcaaggagcagatgagaagtatgtttagtatgagtgatcttggattactgtcctattacctgggaatggaggttaaacagactgaagaaggcattacaatgtcccaagctgggtatgcaggaagaattttagagaaggctgggatgcaaggttgcaatccttgtcaggttcctatggatgctagactgaagctgaaaaaaggagtagaagattgcattgatgcaacacagtttagaagcattataggaagcctgaggtatttggttaatacaaggcctgatctatcctactctgttggatatgttagtagatacatggagaatccaggtgctgaacattgggctgccatgaaacatattttgcgctatgtggcaggaagtctgaatattggtctcaagttcagaaagggagaagagaaatttcctcggctagttggctatagtgatagtgatatggctggggatgtggatgatagaaagagtacaacaggggtgttgtttaagctgggagaaaacttaatcacatggcagtctcagaagcaaaaaatagttgcattatcatcttgtgaagctgagtatattgctgctacaactgctgcctgtcaggggatttggttagcacgtttgctgggagaactgcaaatgaagaagccctgttgtgccatgttaaaagttgacaacaaatctgcaatcaatctctgcaagaatcctgtacttcatgatagaagcaaacacattgatacaagatatcatttcatccgtgagagggttgaaagaaaggaggtcgaagtggagtacacaagttcagcagaacaacttgcagacatactgacaaagcctcttggcaaggtccgatttctggagctgaggggaaagctgggtttgtctccagtgtga

SEQ ID NO: 14933 - DNA, 4270 bp, Oryza sativa
  Clone ID: TFbOSC401706j.C1.o1.np
tccgcacgactgctccgctccagttcgtcttcctctgcatcgtcttcgccaacatgtcgaacaccggtgacaacagcaacactggacacaaggagaaggaggctcccgccaacaccaacggaggcaatactgcctcaaattctagcaaagggccattctcagggtacaactcaactttcatcgtgttcatgttcttttctcaaatactactgttaggtgcaatgttttcattgcattcccatgtgacaaatgtttatgcttattctatattaagcatgatatgtagtcagtggcagacgtaggtttaaaatacagatttggcggcagagctagccctaattagttgcactagtttattccctgcagatgtcatacttattgtcttaatattttagattaaaatatatcgaattgtgaccatatttctaacaattcaaaaacctgataggtccttttcggtagttggctttgccgcatcactgaaaccgcacgctttcgatggttcaaactataagagatggaaagcatgtgcagtattatggttgacagcgatgcaatatttctttgtttcacggggcaaaccgagtgaaccgcctctctctcctgaggaggaggccaagttcgaggctgcagattgcctgttccgtggagcattgatcagtggtgctcgccgacaacatagtggacgtgtacatgcacatgcctttagggaaggaaatgtgggatgcacttgaggcgaagttcagggtttccgatcctagcagtgagctgtatatcatggagcagttctatgactaagagatggtcgatgatcgatctgtagtggaacaggctcatgagatacagatgctggcaaaggaacttgagaacaaccgctgtgagttgccatacaagtttgtggcgggaggcatcatcgccaaattgccaccttcttggtccgactttgctatttctctaaaacacaagaggcaagagttcactgtcactgatctcatatgctctttgggtgttgaggagaaggcgagggcaaaggacaaccgcggcaaaagggtggaggggagttctagtgtcaattaagcatcccataacaacaagaaagtcaagcctgatgtcaaactaaaggctacgaatacttttaagaagaaaggcatgggaaagcctaagggtgactgctttgtgtgtggcaagcctgggcattaggccaaggactgtcctaagcgcaaagacagaaagtttgcaaacatggtcattagcgagggtggacgaacatcggggtatggtaaatttttacctacaattgtttctgtctgtcactcacctgattggtgggttgacactggtgctaatatccatgtgtgtgctaacatttccctgttttcttcttatcaggccaggagaggttcctccttattgatgggaaatgggtcgcttgcggctgttcttggtgttggtacggtcgatctgaagtttacttcgggaaagaccgtgcagctgaaaaacatgcagcatgtcctttcaataaagaagaatctagttagcagctctctactatgtagagatggttttagactggtgtctgaatctaataaatgtgtcgtatctaaatatgaaacgtttattggaaaaggttttgacagcggaggcttgttccgcttctctttggataacatgtgtaataagattgtgaactatgtaagcaatgatgacgagtcaaatgtgtggcattcgcgactctgtcatgtgaactttggttgtatgacgcacttagacaacatgagtttaattccaaaatttactttagtgaaaggtgccaagtttcatacctgtgttcaatcgaaacaacctcgcaagcctcatagggaatttgaggcgaggaatttggcacctctagaacttattcattctgatctgtgcgaaatgaatggcgtgtagactaaagggggaaagaaatatttcatgacactgatagatgattgcactagattctgctatgtgtacctattaaaaacaaaggatgaagcattacattactttaagatatatatggctgaggtagaaaaccagctggaaaggaaaatcaaacggttgaggtctgataggggtggagagtttttccaatgagcttacctctttctgcgaagagtttggaattattcatgagaggatgcctccatattcaccctagtcaaacggagtagccaaaagaaagaactgcactctaactgagttggtgaatgccatgttagacaccgcgggactttccaaggaatcgtggggtgaggcaatcctgattgcatgtcatgtcctgaatagaattcctaccaagcataaagaagtaacaccattcgaggaatgggaaaggaggaaattaaatctctcatacctgctcacttggggttgtttggccaaggtaaatatatctataggtgcaaacttggaccaaagaccgtagattatgtgttcctcggttatgctatccatagtgtgggatataggttcttaatagtaaattctggagtacctgacatgcgtgttggtacaattactgagtctagagatgctacatttagcacttctagtgaagaacctatcttaacccctgagcattttgcaccgatagaacacattgatcaaacgcctgagggaaatcctgaggaggataataatgtagctactcgcaagagtatgagacaaagtactgcaaagtcggtttgtgatgactacattgtatacatagtggataacactccaagaaccatagaagaggcatattcatctcctaacgctaattattggaaggaagcggtacacagtgagatggactcgattatgtctaatggtacttgggaagttatcgagcgtccatttgggtgcaagccataggatgcaaatgagttttaaagaaaaatcttaggcttgatggtacaattgaaaagtacaaggcaagacttgtggccaagggttatacccaaaaggaaggcgaggattttttgacatttactcatcggttgcttgcttgaccacgattcgagtattattcgctacggcagcctctcatggtctacttgtccatcagatggacgttaagatagctttcctcaatggagagttggaggaggagatccatatggatcaaccaaacgggtatacattggaaggtcaggagggaataatgtgcaagctgttgaagtccttgtatacattggaagctgttgaagtcctcaaacaagcgcctaagcaatggcatgagaagtttgataaaacacttacatctgctggctttgttgtgaacgaagctgacaaatgtgtattctatcgctatggtgggggagagagagtgatcttgtgtttatatgtcaatgacatgtcgatctttgggaccagcctcaatttgattgaggaggtaaaggactttctatccaaaagctttgaaatgaaggatttgggagtggctgatgttattcttaacattaagctactgagaggagatgagggtgggattacacttgtgcaatctcactatgtggacaagaaggtagttcctactccttatgatccccgcgtgctattaaggaaaaaccgaagaatagcaagggatcaactgagatactcccagatcattggttcattgatgcacttagctagtgcaacgaggcctaacatctcatttgctgtgagcaaattgagccggtttgtctaaaatccgggagatgatcactggcatgctatggaaagagtaatgcgctatctaaagggcacaatgagctatggaattcactacgccgggtacccgaaagtaccgaagggctatagtgattcaaactggatatctgatgctgatgagataaaagccacaagtgggtatgtgtccacacttagagatggcgctgttccctagaagtcttgcaagcagaccatcttaacgaggtcaacaacggaagcagaactcacagcactagatactgccacagttgaggccgagtggcttcgtgagctcctgatggatttgccagtggttgaaaaagcagtgccagctatcctgatgaactatgataatcaaacagtgattatcaaggtgaacagttcaaaggacaacatgaagtcatcaaggcatgtgaagagaagactgaaatctgtcagaaggcagaagaactccagagtgatagcgttggactatgtctaaacagctaaaaatctggcagatcagtttacaaaggggctaacacgtaatgtgaaaaggcccacttaaagttgcaccatagtagaaacc

SEQ ID NO: 14934 - DNA, 4083 bp, Oryza sativa
  Clone ID: TFbOSC413692j.C1.o3.fg
atgtctgatgatggcgggcgatacacaccgcccggacgccgtggtggcggtggcggcggcggaagcggcagcgggcgcggaggcgcaagtggcagcggcacggggggtggcgcagacggcgcgaaccttcctctcgtgccacaggggagagatgctgggcacactgctcgcctcccggtgctgtcgaggaccaattatccggattgggcattgttgatgcgtgtaaacctacaggcgcaggggttgtggacggcgattgaacccggatacgcggagtaccgcgacgatcgggcggctctctcggcaatccttcaggcggtgccgcgcgagatgttgcgcgggctggcgaagcatgacacggcgaaggcggcgtgggacgccatcaagaccatgcgggtcggcgttgaccgtgtgcgtgaggcgaaggagcagggcttccgtcgccaattggaggcgatgcgcttcaaggatggagagacaccggaggagttcgcgatgcgactcactgccgtcgtcgcggacattcgcgacatgggtggagtcatggaagacgaacacatcaacaagaaactgctgcgcgttgtgcccaagaagtacaagccggtggcgatttccctcgagcagcttctcgacgtgaaaacgatggcccttgaggagctcgttgggcggctgtcgacggtcgactcatacagtgatgatgaggaggaaggtggcggcggcaagctctacctcacggaggaacagtggcaggcacgcgcaaggaaacaggagcaggaaggctccggcggcagtagcaagagcaggggcagctctggcacccagaacaaccgtcggggcaaggccggtgggtcaccgaaggggaaggagacgatcaacagtgggaacaccagccgtgactactccaaggtaaaatgtttcaattgtgatgagtttgggcattttgcaaggcagtgccgcaagccgcggcgccaacgtcgaggggaagtaaacctgacgcagggggaggaggagccgaccttgctcatggctcacgccatgggggtgtctctcgccggtgaggagacactcgggcgaacacctggtgtgcacgaggtgcatctcactgagaaaaagtttggtgatggctcagttgtggacatcaggggacgcggcaccgtgttgttccagtgcaagaatggagatcatcgctcgctagaggcagtgtatttcatccccaagctgtgcaagaatatcatctccatcggccggcttgacgcgcgtggctacgatgctcacatataccatggtgtctgcacgctgcgtgatcctgatggtctactgcttgccaaggtaaagcgctccccaagcttcctgtacattctgaagttgaacatggcgaggcccatctgtttggcggcgaatggcaccgagacggcgtggcgttggcacgcccgtttcggccacctcaatttccaggccctccggagattggcgcaagcggagatggtccgtggactccccgtgattgaccacgtcgatcaactgtgtgatgggtgcctcgccggcaagcagcgacgagtgccgttcccagacaaagccaggttcagggcgcaggatgcgctcgagctggttcatggcgacctgtgcgggccgattgcgccggcaacgccaggcggcaggaaatatttcctgctccttgttgatgacatgagccgtttcatgtggatacggctcctctccggcaagcacgaggcagcggctgcgatcaagcagttcaaggccggcgtcgagatggaaagcggccgaaaactgcgggcgctgcgcaccgaccggggaggagaatttacctctgtcgagttcactgagttctgtgccgatcggggtgtgagtcgccagctcacggctccatactcgccgcaacaaaatggggtcgtcgagaggcgaaacctgactgtcgtcgctgctgctcgctctatgctcaaggcggcggagatgccggcacaattctggggagaggcagtcgtggcggctgtgtatctattgaatcggtcgcccacaaagagcctggatgtgaagccaaatttgaggaaacttgatgatcgtggcacacgaatggtgttcattggttatgagcagggctcaaaagcctatcggatgtatgatccggtgtcacggcgagtttatgtgtcacgcgacgtcgtctttgatgaggcggcaatgtggccatggcgtgatccggaggtcactcaaactggaggcgaggaggatttcactgtggagtttttttccactccgctgggtggaaatcgtgttcctgacgtggttgtggaacatggaggcgcacgggaaactgaaaccgcaccaagtccgctggccacacccgacgcggcgcccgtgtggtctccagtgacatcaagctcacctgccggtgttgagttctgtacaccaccatctgatgccagtattgaaagcgatggagctcctccccgttttcggacggtgaacaatgtgctggccaccacaactccggtgctcgatttcgactacgacgacgagtgtctcatagcggagcaggagcctttcagtttcaaggaagctgagaaggagcagtgctggatgaaggcgatggaagaggagatgagctccattgaaggtaacaatacttggttcctctgtgacttaccatctgaccatagggcaattggtctcaaatgggtttacaagatcaagagaagtgccgaaggtgagatattgaagtacaaagcaagattggtggcaaaggggtatgttcagcaacaaggcatagattatgaagaagtatttgctccagtagcaaggatggaaactgtgaggttgctggttgctttggcagcacatgagggttggcaaatacatcacatggatgtgaagtcagcttttctcaatggtgaattggaggaagatgtgtatgtagtccaaccacctggttttgttgttgagcacaaggagaacaaagtactgaagttaaaaaaggccctatatggtttaaagcaggcgccaagagcttggtatgcaaagctggattctacacttgcaaatttggattttgtaagaagtgcaacagagaatgcagtgtacactagaggggaaggtaatgccagactcgtggtgggggtatatgttgatgatcttatcattacaggagctttggggacagaaatagcaaaattcaaggagcagatgagaagtatgtttagtatgagtgatcttggattactgtcctattacctgggaatggaggttaaacagactgaagaaggcattacaatgtcccaagctgggtatgcaggaagaattttagagaaggctgggatgcaaggttgcaatccttgtcaggttcctatggatgctagactgaagctgaaaaaaggagtagaagattgcattgatgcaacacagtttagaagcattataggaagcctgaggtatttggttaatacaaggcctgatctatcctactctgttggatattttagtagatacatggagaatccaggtgctgaacattgggctgccatgaaacatattttgcgctatgtggcaggaagtctgaatattggtctcaagttcagaaagggagaagagaaatttcctcggctagttggctatagtgatagtgatatggctggggatgtggatgatagaaagagtacaacaggggtgttgtttaagctgggagaaaacttaatcacatggcagtctcagaagcaaaaaatagttgcattatcatcttgtgaagctgagtatattgctgctacaactgctgcctgtcaggggatttggttagcacgtttgctgggagaactgcaaatgaagaagccctgttgtgtcatgttaaaagttgacaacaaatctgcaatcaatctctgcaagaatcctgtacttcatgatagaagcaaacacattgatacaagatatcatttcatccgtgagagggttgaaagaaaggaggtcgaagtggagtacacaagttcagcagaacaacttgcagacatactgacaaagcctcttggcaaggtccgatttttggagctgaggggaaagctgggtttgtctccagtgtga

SEQ ID NO: 14935 - DNA, 4488 bp, Oryza sativa
  Clone ID: TFbOSC415431j.C1.o2.fg
atgtctgatgatggcgggcgatacacaccgcccggacgccgtggtggcggtggtggcggcggaagcggcagcgggcgcggaggcgcaagtggcagcggcgcggggggtggcgcagacggcgcaaaccttcctctcgtgccacagaggagagatgctgggcacactgctcgcctcccggtgctgtcgaggaccaattatccggattgggcattgttgatgcgtgtaaacctacaggcgcaggggttgtggacggcgattgaacccggatacgcggagtaccgcgacgatcgggcggctctctcggcaatccttcaggcggtgccgcgcgagatgttgcgcgggctggcgaagcatgacacggcgaaggcggcgtgggacgccatcaagaccatgcgggtcggcgtcgaccgtgtgcgtgaggcgaaggagcagggcttccgtcgccaattcgaggcgatgcgcttcaaggatggagagacaccggaggagttcgcgatgcgactcactgctgtcgtcgcggacattcgcgacatgggtggagtcatggaagacgaacacatcaacaagaaactgctgcgcgttgtgcccaagaagtacaagccggtggcgatttccctcgagcagcttctcgacgtgaaaacgatggcccttgaggagctcgttgggcggctgtcgatggcacgcgcaaggaaacaggagcaggaaggctccggcggcagcagcaagagcaggggcagctctggcacccagaacaaccgtcggggcaaggccggtgggtcaccgaaggggaaggagacgatcaacagtgggaacaccagccgtgactactccaaggtaaaatgtttcaattgtgatgagtttgggcattttgcaaggcagtgccgcaagccgcggcgccaacgtcgaggggaagtaaacctgacgcagggggaggaggagctgaccttgctcatggctcacgtcatgggggtgtctctcgccggtgaggagacactcgggcgaacacctggtgtgcacgaggtgcatctcactgagaaaaaggtgattctgaatcatgaggttgcagaagaggaggacaacaccacggaatggttcctggataccggggccaccaatcatatgaccggctctcggtcggcattcgctgacctcgacaccggtgttgttggtactgtgaagtttggtgatggctcagttgtggacatcaggggacgcggcaccgtgttgttccagtgcaagaatggagatcatcgctcgctagaggcagtgtatttcatccccaagctgtgcaagaatatcatctccatcggccggcttgacgcgcgtggctacgatgctcacatataccatggtgtctgcacgctgcgtgatcctgatggtctactgcttgccaaggtaaagcgctccccaagcttcctgtacattctgaagttgaacatggcgaggcccatctgtttggcggcgaatggcaccgagacggcgtggcgttggcacgcccgtttcggccacctcaatttccaggccctccggagattggcgcaagcggagatggtccgtggactccccgtgattgaccacgtcgatcaactgtgtgatgggtgcctcgccggcaagcagcgacgagtgccgttcccagacaaagccaggttcagggcgcaggatgcgctcgagctggttcatggcgacctgtgcgggccgattgcgccggcaacgccaggcggcaggaaatatttcctgctccttgttgatgacatgagccgtttcatgtggatacggctcctctccggcaagcacgaggcagcggctgcgatcaagcagttcaaggccggcgtcgagatggaaagcggccgaaaactgcgggcgctgcgcaccgaccggggaggagaatttacctctgtcgagttcactgagttctgtgccgatcggggtgtgagtcgccagctcacggctccatactcgccgcaacaaaatggggtcgtcgagaggcgaaacctgactgtcgtcgctgctgctcgctctatgctcaaggcggcggggatgccggcacaattctggggagaggcagtcatggcggctgtgtatctatggaatcggtcgcccacaaagagcctggatggtgtgacgccatatgaagcgtggcacgggcgacgtccctcggtcgaacacctgaaggtgtttggctgtgtcggctacgtcaagacagtgaagccaaatttgaggaaacttgatgatcgtggcacacgaatggtgttcattggttatgagcagggctcaaaagcctatcggatgtatgatccggtgtcacggcgagtttatgtgtcacgcgacgtcgtctttgatgaggcggcaatgtggccatggcgtgatccggaggtcactcaaactggaggcgaggaggatttcactgtggagtttttttccactccgctgggtggaaatcgtgttcctgacgtggttgtggaacatggaggcgcacgggaaactgaaaccgcaccaagtccgctggccacgcccgacgcggcgcccgtgtggtctccagtgacatcaagctcacctgccggtgttgagttctgtacaccaccatctgatgccagtattgaaagcgatggagctcctccccgttttcggacggtgaacaatgtgctggccaccacaactccggtgctcgatttcgactacaacgacgagtgtctcatagcggagcaggagcctttcagtttcaaggaagctgagaaggagcagtgctggatgaaggcgatggaagaggagatgagctccattgaaggtaacaatacttggttcctctgtgacttaccatctgaccatagggcaattggtctcaaatgggtttacaagatcaagagaagtgccgaaggtgagatattgaagtacaaagcaagattggtggcaaaggggtatgttcagcaacaaggcatagattatgaagaagtatttgctccagtagcaaggatggaaactgtgaggttgctggttgctttggcagcacatgagggttggcaaatacatcacatggatgtgaagtcagcttttctcaatggtgaattggaggaagatgtgtatgtagtccaaccacctggttttgttgttgagcacaaggagaacaaagtactgaagttaaaaaaggccctatatggtttaaagcaggcgccaagagcttggtatgcaaagctggattctacacttgcaaatctggattttgtaagaagtgcaacagagaatgcagtgtacactagaggggaaggtaatgccagactcgtggtgggggtatatgttgatgatcttatcattacaggagctttggggacagaaatagcaaaattcaaggagcagatgagaagtatgtttagtatgagtaatcttggattactgtcctattacctgggaatggaggttaaacagactgaagaaggcattacaatgtcccaagctgggtatgcaggaagaattttagagaaggctgggatgcaaggttgcaatccttgtcaggttcctatggatgctagactgaagctgaaaaaaggagtagaagattgcattgatgcaacacagtttagaagcattataggaagcctgaggtatttggttaatacaaggcctgatctatcctactctgttggatatgttagtagatacatggagaatccaggtgctgaacattgggctgccatgaaacatattttgcgctatgtggcaggaagtctgaatattggtctcaagttcagaaagggagaagagaaatttcctcggctagttggctatagtgatagtgatatggctggggatgtggatgatagaaagagtacaacaggggtgttgtttaagctgggagaaaacttaatcacatggcagtctcagaagcaaaaaatagttgcattatcatcttgtgaagctgagtatattgctgctacaactgctgcctgtcaggggatttggttagcacgtttgctgggagaactgcaaatgaagaagccctgttgtaccatgttaaaagttgacaacaaatctgcaatcaatctctgcaagaatcctgtacttcatgatagaagcaaacacattgatacaagatatcatttcatccgtgagagggttgaaagaaaggaggtcgaagtggagtacacaagttcagcagaacaacttgcagacatattgataaagcctcttggcaagcgatatcatggtgccacggaaggcgacaacgtagtgaggagccaacgggtggcggccgggcttgctggcaggcagagccggcagcacatgctcgtataccgcgccgatgatgaactggtcgttgttgttggagtcgtccttgatcactcggaggaggcggaagccaaagctctcccaccaagccggcgcgagagcgttggtatgcaccctgcgcctgttactgtcgttctccatggtatagacgcctttcacaagacaggcagcgacgcaccggcggtgttcctcattgtccctgcgtga

SEQ ID NO: 14936 - DNA, 2184 bp, Oryza sativa
  Clone ID: TFbOSC402671j.C1.o1.np
ttgaggagcttaaataggggtagtgccttctctcacagcctcgtagcgccgccgccgccgcgaatcccgccgctcccgtccgccccgcgtgcaatcaagaggggggaattaatccccgcgttcccctcccccgtttccccctctttcccctctctctctccctcggattcgttcgaatcaagcccgtaatcgtcgccggcgcaatcaatggagccgaatcttccgcgcgcgattcctccctctccggccgctctttccttcccccggcgctatttaaaccctccccgagctccgctctttcgtttccgccgctcgccgctcactctcgccgtcggaatcgtgctcgcgccgtagcaccttctctccgccgtcgccgccgtgcttcggttagccgccgccgccgctccgctcctcctcccgactcggcgacacctccctcggcatcgccgcatcgccgtcgacctcgtccgcgcctccgtttcgctcgccgaccgtcggagcaccgtcgtcatcgtcatcccgagccgcgccgccgtctccctccgctccggccgccgttctcgtcgtcgtcgttgtcccggggtgagccgaggaccgccgttcgccttcccccttccctcctctctctcgggcgccgctccgccgcgccgatggtcgccggcggtgaccatcggggcgcgggcgcgtcgctcccgtcggccgcgccggcgaggccgccctcgggcgcgccctcgcggctgccaagtgggcccggccgtcagccgcccgcgcccgcgggtgcggctgacgcgcgggacccacggcgccgaccgccgccagccgcgtgcgcccggtccaccgtggaccgtggggctgacgcgtgggccccactccccgtggacccgggcaaatgaaggctacacgagctgcggcccgatggctgacaatgagaaaggcaataaggtcaggagtcaggacattggtacctcaagctcccgagtgaatgaagcacaagacaccagttgtgcggcagtggtccaacacctgattaaccagaacaaattgcttatagagatactacagcagcatcggatgccaattttgaacccgagtcagatgcaacctcaggtgcagttggaggcagtccaagcactcacaccacaagtcagcgcaccgccaacatcccagaaggcccctcatgccatgccacatgttgacccaaaagaagcaagtatcatctgttttatgtgtgatgagcaagggcactacgcaaggaactgtcctcagcagaaaagaaaagcaccaatgcgaaccgaaggtgaagttcgtaagatgatcattaccagcacagaatggcctccaccaggaatgacaagacgtcagagaagaaacaccttccgaggtgcaccacagttgacagagcatcttttagctaatggaggtagagtgtctgatagtgaagattcagatcaagtctcctcagaagatgaagataaaatggaacgtaaggcatgctctcgttgtggagaaatcggacatgttgccagctcgtgtgcctctacatgcgttcattgtgaggaagaccatccacccgacaggtgtccaacgagcaggatcacttgtttcttttgtgaaggaactgatcatgtaccaaaagattgtcaattcagttttctgctgacgaagaagatggctaaccaacccgccggtttcaacggagagaagcatcaaggcaacaccaatcctcgccaagattacagtttcagcctaactccagtgccaggacagaggaatcaaaatgagaaaagaaaatgccgagtccgggaagatatctgttgcttcaattgtcaaggaatgggtcatttcgccgacaagtgcccaaaaccgagaaacatagctgccggcacgtcagtccacgcaactccctgcaatcagaagcttgctcctcaacgaatggtcatccatgcatcccgaagcagtcctatagcccgcgttgcaacagctccaattccaatgagtgcactaccacaaggtgtcaatgctcaatttcagccccagcaaagaattgtcgtagatggaaggagttgtgtctctccccgacctactccaggccgagccaagggcaatcaacctccggagggcgataccaagcagaagaccgtcatccgctgcaaccaacaatcagaaggaagcttctcctgtgaa

SEQ ID NO: 14937 - DNA, 4671 bp, Oryza sativa
  Clone ID: TFbOSC400353j.C1.o2.fg
atgggttgcaagatggccgaccacccacccaaccaccgcggagaaggcatgattgactttgtggcagagttggcacgtatgacgctggtggtgggctaccccaacgcgccagagtacacgactgttccacctctcagtggtgagcttcctcaccgtgtccgcctggaggtccatggctacgtgggtacctgcctagctaatatggtggttgaggcgtccggaggcatagcagatcacgcctgtcaggaggcagcatacctgatgatgcccagactacgggagcgccacaactacatcttccacgacacggcgtaccaatttcaccctcgtcgagccagcggtgatgatgtcagtaccttccgtccaacagccggtgagaacgacaccaccttcggccacatgtgcgccgtgatgaggggaatggataggatgcactcgaatctacacaaggcgtccaaggccttgaacgatgggaagctcgtgaggatcatagctctgaaggatgagatagcacgcctaaagagggagaatgctcaattgaagggtctcccagcgccaggaggagtccggatccgcaccacgccccgcaagtcgacgactgcacctatggtctacaccaggaatggtagccgtacaacaggcgagggcagcaacggcgaagagcgcactgatggtgtgcatcccaacagcgatttcggcaatggtccgccaccactccccgagaatccgacccttgcccaagtaatggctcatcagacacagatgatgacagctatgacgcagcaggcaagtgccagatgggttgtggcacaaaagaagagggaattccgggcactccaccagggcaacaggacagtgacggagtatttccatgagttcaatcgcctcgcgcgatatgcaccggaggatgtccgtaccgacgccgagaagcaggagaaattcctagcaggtctggatgatgagctaaccaatcagttgatatctggagattacgccgactttgagaggctggttgacaaggcaatccgccaggaggatcaacgcaacaaaatggacaggaagagcaaggcggcgcagttccggtcaaaccaagggagccaccagcgaccgcgcttcactcccggacagcagagtggacctaccaccctgatcgtccaccagcaccgccctttcaatgccagcaacttccatcagggtgccagtggcagccagaaccaccatggtggtcagcccaaccgcagtgcagctccgcgcccacaaatggcactagcacagtcagctacgtccgcgcaagccaagaaggagactgggacaaagccagggtcctgcttcaactgtggcgagcttggccacttcgctaagaaatgcccgaagcctaggcgtgccgagccaaggtttgtccaggcccgtgtcaaccacgcatctacagaggaggcacaagcagcaccagaggtcgtactaggtacgtttcctgttaactcaatccctgcaacaatactttttgattctggtgcaacgcattcgttcatttcaaagaagtttgttgggatgcatgggttaataagagaggaacttagcacaccaatgcgggttcataccccagggaatagctccacttcggttcaattcagcccttctataacaatagaaattcaaagatcaccatttctggccaacctcatccttctcggatccaaagacctagatgtcattcttgggatggattggctgaccaagttcaagggagtcattgattgtgcgaatcgcacagtcaccttgaccaacgagaagggagaaacagtagtgtacaaatcaccagtctcaccaaagcaaggggtctctttgaatcagattgaggtggaaatcccagtggtcaccgaggagaagaattcgaggaaattggaagagattcccatagtctgcgagtacccaaaagtgtttcccgaagacctcactaccatgccacccaagagagagattgaattccggattgatttggcaccgggaaccgctccaatttacaagagaccgtacaggatggcagccaacgagctagcagagaagaaggacaagacaaagagaatgtgcgtcgattatcgcgcactcaatgaggtcacaatcaagaacaaatatcctttgccgcggattgatgatttgtttgatcagctgaaaggagctaaagtgttttctaagatagacctgcgatcaggctaccaccagttgagaattcgggaagaggatattccaaagacggccttcaccactcggtacgggctatatgagtgcacggttatgtctttcggacttaccaacgcacccgcattcttcatgaatctgatgaacaaagtgttcatggaatttctggacaagtttgttgtggtattcatcgatgacatacttatctattcaaagtccgaagaagaacatgagcaacatctccgtctggtactcgagaagttaaaggagcaccagttatacgctaagtccagcaagtgtgacttctggttgtctgaagtcaaatttctacgtcacgttattacagctcagggcgtggcagttgatccatcgaatgtggagtcaattaccaaatggaccccacctaaggccgtgtcgcagattcggagttttcttggacttgcgggttattaccgccgattcattgaaaacttctccaggatcgcccgacccatgactcagttgcttaagaaagatgagaagtttaaatggacagctgagtgcgacaaaagttttgaggagctcaaaaagaaattagtatccgcaccagttttgattctgcccgaccagatgaaagacttccaagtctattgcgatgcatcccgccacgggcttggatgtgttctaatgcaggaaggtagagtggtctcatatgcctcgcggcagttgcgtccacatgaagggaattatccaactcatgatctagaattggcagcagtggttcatgctttgaagatctggaggcactatctgattggcaaccgctgcgaagtatatacggaccataagagtctgaaatacatcttcacccaaccggacctaaatctccgacaacgaagatggttagaactaatcaaagactatgacatgagcattcactaccacccgggtaaagccaatgtggtggcagatgcgctaagcaggaaaagctactgcaatgccctatgcatcgagggcatgtgtggagaattgcagcaggatcttgagcgtctcaacgtgggaattgttgaacacgggttcgtagccgctctggaagcacagcctacgctcgtggatcaagtcagagcagctcaagtaaatgaccccaaaatagctgaactgaaaaagaatatgagggtgggaaaagcccgggacttccttgaggatgaacatggcacaatctggatgggagaaagattgtgtgtacctgacgacaaggaactgaaggatctgatacttatcgaggctcatcagactcagtactcaattcatccaggcagcaccaaaatgtataaagacctcaaagaaaagttttggtgggtcagcatgagaagggaaatagcggaattcgtcgcactctgcgacgtttgccaacgagtgaaggcagagcaccaaaggccagcaggtttactccaacctcttcaaatcccggaatggaaatgggaggagattggaatggactttataataggactgccccggacatcatcgggtcacgattcaatctgggtagtcgtggatcgactcactaaggttgctcacttcataccagtacataccacgtatacgtgcaaaagggagccaattcacttcaaagttctagcagaaattgcaagaggaattgggaacccggttaaatttcagcacagcctaccatccgcagaccgatggtcagacagaagagtcaatcaaatattggaggacatgttaagggcttgcgcacttgattttggtggagcttgggacaaaagcttgccgtatgcggagttctcttacaacaacagttaccaggctagccttcaaatggcactgttcaaagcattatacggtcggaagtgccgcacacctctcttctgggatcagacaggcgaacgtcaactgttcggaacagaagtgttagcggaagcagaagagaaagtcaggactgtcagagagaggctgaggattgcccagtctcgacagaaaagctacgcggacaaccgccgacgagagctcacttttgaagcaggggattacgtgtatcttcgtgttactccactccggggagtgcaccgttttcaaacgaaaggcaagttggcaccacgcttcgtgggaccatacaaaatcttggaacaaagaggagaagttgcgtatcagctagaacttccatccaatatgatcggtatccatgacgtgttccacgcatcccaattaaagaagtgcttgagggtacccaaagaacaagccaattcggagcacatcgatatccaagaagatatgacgtatgtggagaggccagttcgtatccttgagaccagcgaaaggaggactagaaacaaggtcaccaggttttgccgggttcagtggagccaccattctgaggaagaagcaacctgggaaagggaagatgagttgaaggccacccatccgcacctcttcgccagctcctccaaatctcggggtcgagatttcatttaa

SEQ ID NO: 14938 - DNA, 849 bp, Oryza sativa
  Clone ID: TFbOSC24996j.C1.o1.fg
atgtggaaaactcttactaatctctactcaggagaaggaaatgtgatgttaatggtggaggcacaggagaagataagtgttttgagacagggggagcgttctattgcagaatatgttgctgaattgaagcatttgtggtctgatttggatcattatgatcctcttgggttagagcaccctgattgtatagcaaaaatgagaaaatggattgagcgtagaagggtcattgagttcttgaagggcttaaattcggagtttgaaggaagaagggatgcaatgtttcatcaaaccacccttactaccttggatgaggctattgcagctatggcacaggaggagcttaagaagaaagtattgcctagtgccacaccatcttcaccaagccccacctatgtagttgcacaaagtaaagagaccagggagtgcttcaattgtggtgaaatggggcaccttatacgtgattgccgcgctcctcgcaagcctagttatgggagaggaagatttggtgataggggtggagcaagaggtggaagaggttatgcaggtagaggtaatagaggtagaggctatgaatataaaagtgatcacagagctaatgtggtcactcttgaaaagggttgttctggatctacaaatgttgatgttgccaatcttgttcattcttcttcagttctcattcaaattggatacttgactcgggtgcatctagacatgtcacgggagagggaaacagggaagaaacttgggattgacgtcaggcgtgatggactttggtatttggatcgaaaggcgacaagtgaagatgtatgtcttgcattgatggcttctacaagtgaagaagaggctaag

SEQ ID NO: 14939 - DNA, 5043 bp, Oryza sativa
  Clone ID: TFbOSC401337j.C1.o10.fg
atgtcgacatcattagctgaagttccgcaaggaggacatatcaaagaggtcattgcagagggctcttcgggaggcctatcatcgtcaacacagttattggctacaaaacgaaagttagcagcatcgaatcctccaacagcaaagcgaagacgatcacctattgcattgccaatagtcaggtctccaggagtgcgacaaattatttcccaaaatgaagtcatcatggagagatcacaagttgctggtcagatgtccccaagtgcagagtctccaagagctagatctatgtctccagtggcaaggttcgtatcaagtccgtctgctatcccaattgagctggatgttgaaactcagccaagggagtcaactcaatcaacacctcatgttgtgactcatcgttctgggaaaagaacactcaaatctttaatctggaaagaatttaaaccattttattcttctactggaaaggtgctctatgggaaatgcattcattgcagtaaggactggaaatttgatcctgatgtagcacgtgcagaacttttaaggatgcttgttttgcaagaacttcctttcagttttgttgaacaccctggttttagaagattttgtgcaagcttgaacccgtactttagggtgctttccagaattactataaagggtgattgcttggctgcctatcaagaacaaaagttagctttgtttgaggattggcagatagaaagtaagttgttcagtattacagtagacaatgcatctgttaatgattctatggttgtggaattgaaaggaaatctcttgggtaagcttgccatgccttgcaaaggggagctatttcatttccggtgcgcagctcacatccttaatcttattgttcaagatggattgagtactatcagtggtgccatatctaggataagggaaagtgtaaagtatataaaagcatcagaagcatgtgagcaaaaatttgaagaaatcattgcacaagtcggaattgttgaagagaagcgtccttcacttgatgtgtccactcgttggaattccacctatttgatgctttcctcatccttattattcaggagggcttttgattcattggatcggtttgatccaaactttcaagatgctccactattttttgattgggacaatgcagaagttctttgcaaacatctcaagatcttctatgatgcaactgttgtggtttccgggacatcatatcccactgtttctcgctactttcatgaattttggaaagtgaaggtgatgcttctaaatgagtccaacagtgaggatgttcttgtcgctagcatggtttctaaaatggatacaaaatttcagaaatattgggatctgcagttcctgcagatttgtgttcctgttattttttatcccagatttaagttgaaattccttgagtttaggctgaaagcaggttttggagataaggcaactggtccaaatggatatctgtctagaattaagaggatagtccgcagttggtttgttgaatattcttcacaaattggtggtccaagcgcaatcaattctcaagaagcatcaactagtggagtgaatgttggtggcagccaatttgctgactggaggcaatatcttcatgatcaaagcaagagttttggtgatccctattcaattctaactgatacggttgaggacgatgatgttaatatgcaactattagggatgagatggccttcagcagctgcgaatgctgctaccactagttttgttccctgtagtttttatttcagtaacttagttcgtttagatgcactagccgttgtcatttttgtgcatgtccagagcctgctgaaaataatacaagccttgcaaaaagcaaaacaattgattgtttctcatgaatctctaagcaagattcagccttttcaggttttctgcttgcagaagtgtgtagctagcgttaaaggactggaacaagtaatgggtaaattggtagagatgcttacaaagaagtttaatgaggctccaactacgagtagtgcagtggttcctcatactgaatcggtgcaaaaaattgagttgatgcaaaatgacattaagttggagggtgtaaaaaattatttgagttggtcaagaagagctttattgattttgaagacaaaggggttagaagcatatgttactggggaggtaaaggagcctgagaacatatcaagtgttgaatggaagacttggaggactaccaactcgttagtagtagcatggttgttaacctcacttatccctgctattgctacaactgttgagaccatctctagtgcaagtgagatgtggaaaactcttactaatctctactcaggagaaggaaatgtgatgttaatggtggaggcacaggagaagataagtgttttgagacagggggagcgttctattgcagaatatgttgctgaattgaagcatttgtggtctgatttggatcattatgatcctcttgggttagagcaccctgattgtatagcaaaaatgagaaaatggattgagcgtagaagggtcattgagttcttgaagggcttaaattcggagtttgaaggaagaagggatgcaatgtttcatcaaaccacccttactaccttggatgaggctattgcagctatggcacaggaggagcttaagaagaaagtattgcctagtgccacaccatcttcaccaagccccacctatgtagttgcacaaagtaaagagaccagggagtgcttcaattgtggtgaaatggggcaccttatacgtgattgccgcgctcctcgcaagcctagttatgggagaggaagatttggtgataggggtggagcaagaggtggaagaggttatgcaggtagaggtaatagaggtagaggctatgagtatagaagtgatcacagagctaatgtggtcactcttgaagagggttgttctggatctacaaatgttgatgttgccaatcttgttcattcttcctcagttctcattcaaattggatacttgactcgggtgcatctagacatgtcacgggagagggaaacagggaagaaacttgggattgacgtcaggcgtgatggactttggtatttggatcgaaaggcgacaagtgaagatgtatgtcttgcattgatggcttctacaagtgaagaagaggctaaggagcaagaatggaggaagccacatgaagagaaaaatcttcaagtatacacaaggagaacaaggtgtccagtaatccaacaagttgaagaggataatcaggtagaggaagatgtaagccgtgagcaaggatctttggagtcagggggagaagaagaggaagttaaagaagaatctgacttaccaattgccattagaaagagtgtgagaagcaatgcaggtaaacctccactaaggtatggttttgaagctcaagatgagggtgatgatgaaaataatatatccaactatgtttcctatgactccttgtcatccacatataaggcctttgtagcatcactagattcagtgcaaatcccaaaggattggagagaagcaaagcaagatccaaggtggcatcaagctatgctagatgaactagaggctcttgaaaagaacaaaacatgggatcttgtaccatttcctgaagggaagaaaattgtcaactgtaagtgggtttatacagtaaagcaaaatcctgatggaaaggtggaaagatacaaagtaaggttggtggctaagagatatagtcaaacatatggaattgattatgatgaaacttttgcaccagtagcaaagatgagcatggtaagaactcttatatcttgtgcagctaattttgattggccattgcatcagttagatgtcaagaatgcattcttacatggagatcttcaagaagaggtgtatatggatgtcccacctggatttgccacttcacaaactaaaggaaaggtgttgagattgaagaaatctttgtatggtgttaaacagtcaccaagagcatggtttgatcggtttaggcatgcaatgtgtgctatggactataagcaatgtaatggagatcatatagttttctatcatcatagtggagatcatataaccattcttgctgtctatgttgatgatatggttatcactggaaatgattgcttggagataactaggttgaaacggaatctaagcaaagaatttgaggtcaaggacctaggccagttgagatattttctgggtattgaaattgcaagatctcctagagggatagttatttcacagcgaaaatatgtattggacttgcttagtgaaacaggtatgcttggatgtcgcccagtctctacaccaattgatcaaaatcataagttatgtgcggagtctggagatccagtgaataggaaaagataccaaagattggtgggaagactgatatatctatgtcatacacgacctgacatagcatatgctgtcagtatggtgagtcgatatatgcatgatccaagaagtggtcatatggaggcggtgtatagaatcttgagatatctgaagggaagtccaggcaaaggcttatggtttaagaaaaatggacatcttaagatagaagggtattgtgatgcagattgggctagctgtcttgatgatagaaggtcaacttcaggctattgtgtttatgttggtggcaacttggtatcttggagaagcaagaaacaatccgtagtgtctcgctcaactgctgaagcagaatacagggcaatggtagtgagtttaagtgagttgttgtggttaagaaatcttctagttgagctgaaaattttggagaacactcccatgaagctattgtgtgataataagtcagctattaacattgctaataatccagtccaatatgatagaacaaagcatgtggaaatagatcgtttctttatcaaggaaaaactagacgagggagtgttggaattaggatttgtaacgtctggtggacaagttgctgattgtttaacaaagggcttaggtgttaaagagtgtaattgttcatgtgacaagatgggtatgatagatatctatcacccatcttga

SEQ ID NO: 14940 - DNA, 5220 bp, Oryza sativa
  Clone ID: TFbOSC418407j.C1.o7.fg
atgtcgacatcattagctgaagttccgcaaggaggacatatcaaagaggtcattgcagagggctcttcgggaggcctatcatcgtcaacacagttattggctacaaaacgaaagttagcagcatcgaatcctccaacagcaaagcgaagacgatcacctattgcattgccaatagtcaggtctccaggagtgcgacaaattatttcccaaaatgaagtcatcatggagagatcacaagttgctggtcagatgtccccaagtgcagagtctccaagagctagatctatgtctccagtggcaaggttcgtatcaagtccgtctgctatcccaattgagctggatgttgaaactcagccaagggagtcaactcaatcaacacctcatgttgtgactcatcgttctgggaaaagaacactcaaatctttaatctggaaagaatttaaaccattttattcttctactggaaaggtgctctatgggaaatgcattcattgcagtaaggactggaaatttgatcctgatgtagcacgtgcagaacttttaaggatgcttgttttgcaagaacttcctttcagttttgttgaacaccctggttttagaagattttgtgcaagcttgaacccgtactttagggtgctttccagaattactataaagggtgattgcttggctgcctatcaagaacaaaagttagctttgtttgaggattggcagatagaaagtaagttgttcagtattacagtagacaatgcatctgttaatgattctatggttgtggaattgaaaggaaatctcttgggtaagcttgccatgtcttgcaaaggggagctatttcatttccggtgcgcagctcacatccttaatcttattgttcaagatggattgagtactgtcagtggtgccatatctaggataagggaaagtgtaaagtatataaaagcatcagaagcatgtgagcaaaaatttgaagaaatcattgcacaagtcggaattgttgaagagaagcgtccttcacttgatgtgtccactcgttggaattccacctatttgatgctttcctcatccttattattcaggagggcttttgattcattggatcggtttgatccaaactttcaagatgctccactattttttgattgggacaatgcagaagttctttgcaaacatctcaagatcttctatgatgcaactgttgtggtttccgggacatcatatcccactgtttctcgctactttcatgaattttggaaagtgaaggtgatgcttctaaatgagtccaacagtgaggatgttcttgtcgctagcatggtttttaaaatggatacaaaatttcagaaatattgggatctgcagttcctgcagatttgtgttcctgttattttttatcccagatttaagttgaaattccttgagtttaggctgaaagcaggttttggagataaggcaactggtccaaatggatatctgtctagaattaagaggatagtccgcagttggtttgttgaatattcttcacaaattggtggtccaagcgcaatcaattctcaagaagcatcaactagtggagtgaatgttggtggcagccaatttgctgactggaggcaatatcttcatgatcaaagcaagagttttggtgatccctattcaattctaactgatacggttgaggacgatgatgttaatatgcaactattagggatgagatggccttcagcagctgcgaatgctgctaccactagttttgttccctgtagtttttatttcagtaacttagttcgtttagatgcactagccgttgtcatttttgtgcatgtccagagcctgctgaaaataatacaagccttgcaaaaagcaaaacaattgattgtttctcatgaatctctaagcaagattcagccttttcaggttttctgcttgcagaagtgtgtagctagcgttaaaggactggaacaagtaatgggtaaattggtagagatgcttacaaagaagtttaatgaggctccaactacgagtagtgcagtggttcctcatactgaatcggtgcaaaaaattgagttgatgcaaaatgacattaagttggagggtgtaaaaaattatttgagttggtcaagaagagctttattgattttgaagacaaaggggttagaagcatatgttactggggaggtaaaggagcctgagaacatatcaagtgttgaatggaagacttggaggactaccaactcgttagtagtagcatggttgttaacctcacttatccctgctattgctacaactgttgagaccatctctagtgcaagtgagatgtggaaaactcttactaatctctactcaggagaaggaaatgtgatgttaatggtggaggcacaggagaagataagtgttttgagacagggggagcgttctattgcagaatatgttgctgaattgaagcatttgtggtctgatttggatcattatgatcctcttgggttagagcaccctgattgtatagcaaaaatgagaaaatggattgagcgtagaagggtcattgagttcttgaagggcttaaattcggagtttgaaggaagaagggatgcaatgtttcatcaaaccacccttcctaccttggatgaggctattgcagctatggcacaggaggagcttaagaagaaagtattgcctagtgccacaccatcttcaccaagccccacctatgtagttgcacaaagtaaagagaccagggagtgcttcaattgtggtgaaatggggcaccttatacgtgattgccgcgctcctcgcaagcctagttatgggagaggaagatttggtgataggggtggagcaagaggtggaagaggttatgcaggtagaggtaatagaggtagaggctatgagtatagaagtgatcacagagctaatgtggtcactcttgaagagggttgttctggatctacaaatgttgatgttgccaatcttgttcattcttcctcagttctcattcaaattggatacttgactcgggtgcatctagacatgtcacgggagagggaaacagggaagaaacttgggattgacgtcaggcgtgatggactttggtatttggatcgaaaggcgacaagtgaagatgtatgtcttgcattgatggcttctacaagtgaagaagaggctaagtttattagaactgataatggaggggagtatataaacaatgaatttagtagctttctttcatcagaaggaatattgcatcaaacttcttgtcctgatactcctccacaaaatggggtggctgagaggaaaaaccgtcatctcttagagacagcccgctcattgatgtatactatgaatgtacctaaattcttgtggagtgaggcagtaatgacagcaacttatcttatcaaccgcacaccatcaagaatacttggaatgaagacaccatgtgagatgatatttggaaagaatgaatttgttgttccaccaaaagtgtttggttgcacttgttttgttagagatcatagaccttccattggaaaacttgatcctcgggctgtcaaatgcatctttgtaggctattcatctggccagaaggggtataagtgttggagtccattagaacgacgaacctttgagcaagaatggaggaagccacatgaagagaaaaatcttcaagtatacacaaggagaacaaggtgtccagtaatccaacaagttgaagaggataatcaggtagaggaagatgtaagccgtgagcaaggatctttggagtcagggggagaagaagaggaagttagagaagaatctgacttaccaattgccattagaaagagtgtgagaagcaatgcagcatcactagattcagtgcaaatcccaaaggattggagagaagcaaagcaagatcccaggtggcatcaagctatgctagatgaactagaggctcctgaaaagaacaaaacatgggatcttgtaccatttcctgaagggaagaaaattgtcaactctaattttgattggccattgcatcagttagatgtcaagaatgcattcttacatggagatcttcaagaagaggtgtatatggatgtcccacctggatttgccacttcacaaactaaaggaaaggtgttgagattgaagaaatctttgtatggtgttaaacagtcaccaagagcatggtttgatcggtttaggcatgcaatgtgtgctatggactataagcaatgtaatggagatcatatagttttctatcatcatagtggagatcatataaccattcttgctgtctatgttgatgatatggttatcactggaaatgattgcttggagataactaggttgaaacggaatctaagcaaagaatttgaggtcaaggacctaggccagttgagatattttctgggtattgaaattgcaagatctcctagagggatagttatttcacagcgaaaatatgtattggacttgcttagtgaaacaggtatgcttggatgtcgcccagtctctacaccaattgatcaaaatcataagttatgtgcggagtctggagatccagtgaataggaaaagataccaaagattggtgggaagactgatatatctatgtcatacacgacctgacatagcatatgctgtcagtatggtgagtcgatatatgcatgatccaagaagtggtcatatggaggcggtgtatagaatcttgagatatctgaagggaagtccaggcaaaggcttatggtttaagaaaaatggacatcttaagatagaagggtattgtgatgcagattgggctagctgtcttgatgatagaaggtcaacttcaggctattgtgtttatgttggtggcaacttggtatcttggagaagcaagaaacaatccgtagtgtctcgctcaactgctgaagcagaatacagggcaatggtagtgagtttaagtgagttgttgtggttaagaaatcttctagttgagctgaaaattttggagaacactcccatgaagctattgtgtgataataagtcagctattaacattgctaataatccagtccaatatgatagaacaaagcatgtggaaatagatcgtttctttatcaaggaaaaactagacgagggagtgttggaattaggatttgtaacgtctggtggacaagttgctgattgtttaacaaagggcttaggtgttaaagagtgtaattgttcatgtgacaagatgggtatgatagatatctatcacccatcttga

SEQ ID NO: 14941 - DNA, 1970 bp, Oryza sativa
  Clone ID: TFbOSC416075j.C1.o3.np
atggatgaagtcgggcgtcgatggacattctccagggcaaatgaaggctacacgagctgcggcccggtagtcgagatgtcatacggcggagggttggtgcccaatgctaggggctcagttctgcctgcctgtcccgggtatcccggccgtaggtaggattgggtcggtactcttgtctaaggctaggatgggttggaaactatgtcacatctttacgacgggttccaaggccatggaatgcggaataaagatgtgtcttgtgggttggcctgggttggcttgggacgagctgggacccaggtcgggttgccagttcggtccgaatcatcgtaggccttgggttaaggcagtactagatggtcagctttgcgaagaagaagatgtcgtcagttgtttgccgaagctccggaagactgcaggatccgctagcgaagcgaaggaagcagtgaagccagctgtgaagcaggaaagaagagttagttcctttaaggtcctatccttagtttctaatctgtctctcccctttgttttccctctctccctctccaaacctttgcaacagatggctggcaatgagaaaggcaataaggtcagaagtcaggacattggtacctcaagctcccgagtgaatgaagcaccagacaccagttgtgtgacactggtccaacacctgattaaccagaaccgattgcttatagagatactacagcagcatcagacgccaattctgaacctgagtcaaatacaacctcaagtgcagttggaggcagtccaagcactcacaccaccagtcagcatgccgccagcatcccgaaggactcatggtgacgtgccccatgttgacccaaaagaagcaagtaacatttgctttacgtgtgatgagcaagtgcactatgcaagggagcgtcctcagcagaaaagaaaaacaccaatgcgaaccgaagatgaagtccgtaagatgatcattaccagcacagaatggcctccaccaggaatgacaagacgtcagagaagaaataccttccgaggtgcaccacagttgaccgagcatcttttagctagtggaggtagagtgtctgatagtgaagattcagatcaagtctcctcagatgatgaagatgaaatggaacgtaaggcatgctctcgttgtggagaagtcggtcatgttgccagctcgtgtgccactacatgcgttcattgtgaggaagaccatccacccgacaggtgtccaacgagcaggatcacttgtttcttttgtgaaggaactgatcatgtaccaaaagattgtcaattcagttttctgctgacgaagaagatggccaaccaacccgccagttccaacggagagaagcatcaaggcaacacaaatcctcgccaagattaccgtttcagcctaactccagtgccaggacagaggaatcgaaatgagaaaagaaaatgccgagtccgggaagacatctgttgcttcaattgtcaaggaatgggtcatttcgccgacaagtgcccaaaaccgagaaacatagctgccagcacgtcagtccacgcaactccctgcaatcagaagcttgctcctcagcgaattgtcatccatgcatcccaaagcagtcctatggcccgcgctgcaacagcttcaactccagcgagtgcattaccacaaggtgtcaatgctcactttcagccccagcaaagaattgtcgtcgatggaagaagttgtgtctctccccgacctactccaggccgagccaagggcaatcaacctccggagggcgataccaagcagaagaccgttattcgcttcaaccagcaatcagaagggagcttctcctgtgaatgatagcattatgcagtcctatcacatcatcacaaaaccaatcaaggatgcagtcactagaacaatgccagctatgtatccacgtttgtgatcttcagttcgctacttatcaccgtaatcgaaagtttgcagcaatcct

SEQ ID NO: 14942 - DNA, 726 bp, Oryza sativa
  Clone ID: TFbOSC408704j.C1.o1.fg
atggagcaggtctgccgctgttacaatgagtccatcaaggagcaggagcaacagcaggagcagaagcagaagcagaagcgggagcaagagcaagagcaagagcaagagcaggagtcgcagcaggagcaggagccgaagccgaagccctcggcgagaaaggctgcgtattgttctgccaatcccccagacttgacccacctcaacccccaagggatcttatatgcaagaattgcaggaggcctggtcactttgctagggattgccaatctactgctacatgcaacagatgcaatcttccaggacacttcgcagcagaatgcacttctgaaactgtttgttggaactgcaagcagtctggccacattgctaccgaatgcaagaatgacgccctgtgtcacacctgcagcaagacaggtcatctggcacgtgattgcccaagttcaggatctacctgggcacatagctcgggagtgcacgaacgagcctgtttgcaacctgtgcaatgtctctgggcatcttgctcggaactgtcaaaaaacgaccatttcttcagagatacagggcggccctttccgtgacattacctgccgcttgtgtggcaagccagggcacatcagccgcaactgcatgacaaccatgatctgtggcacctgcggtgggaggggtcatatgtcatatgagtgcccatctgcaaggatgtttgatcgtgggctccgcaggttctga

SEQ ID NO: 14943 - DNA, 1993 bp, Oryza sativa
  Clone ID: TFbOSC102121j.C1.o8.np
atggatgaagtcgggggtcgatggacattctccagggcaaatgaaggctacacgagctgcggcccggtagtcgagatgtcatggcagagggttggtgccctgctgctagggtgctcagtcctgcctgcctgtcccgggtgtcccggccgtagggggattgggtcggtactcttgtctatggctaggatgggttggaaactatgtcacgtctttcgtctgtataccgtggtggtatcttgcttaacaactaaaatatggaatggttggcctgggttggcttgggacgagctgggacccagggtcgggttgccagttcggtctgaatcatcgtaggccttgggttaaggcagtactagatggtcaggtcagtgaagaagaagacatcgtcagttgtttgccgaagctccggaagactgcaggatccgctagcgaagtggaggaagcactgaagccagctgtgaagcaggacaaaagacttagatctgttaaggtcctatccttagtttctaatctgtctctcccctttgttttccctctctccctctccaaacctttgcaacagatggctgacaatgagaaaggcaataaggtcagaagtcaggacatcggtacctcaagctcccgagtgaatgaagcaccagacaccagttgtgtgacactggtccaacacctgattaaccagaaccgattgcttatagagatactacagcagcatcagacgccaattctgaacctgagtcagatacaacctcaagtgcagttggaggcagtccaagcactcacaccacgagtcagcatgccgccagcatcccgaaggacccatggtgacgtgccacatgttgactcaaaagaagcaagtatcatttgttttatgtgtgatgagcaagggcactatgcaagggagtgtcctcagcagaaaagaaaaacaccaatgcgaactgaagatgaagtccgtaagatgatcattaccagcacagaatggcctccaccaggaatgacaaaacgtcagagaagaaataccttccgaggtgcaccacagttgacagagcatcttttagctaatggaggtagagtgtctgatagtgaagattcagatcaagtctcctcagatgatgaagatgagaagtctccccaaggtttcaaccagaataaaatggaacgtaaggcatgctctcgttgtggagaaatcggtcatgttgccagctcgtgtgccactacatgcgttcattgtgaggaagaccatccacccgacaggtgtccaacgagcaggatcacttgtttcttttgtgaaggaactgatcatgtaccaaaagattgtcaattcagtttgctgctgacgaagaagatggccaaccaacccgccagttccaacggagagaagcatcaaggcaacacaaatcctcgccaagattacagtttcagcctaactccagtgccaggacagaggaatcaaaatgagaaaagaaaatgccgagtccgggaagatatatgttgcttcaattgtcaaggaatgggtcatttcgccgacaagtacccaaaaccgagagacatagctgccagcacgtcagtccacgcaactccctgcaatcagaagcttgctcctcagcgaattgtcatccatgcatcccgaagcagtcctatagcccgcgttgcaacagctccaactccagcgagtgcattaccacaaggtgtcaatgctcaatttcagccccagccaccagttgacaagacagaggccagtatcggcattttacctttggatgttccagcacagcagccaagaaatcaagtacaagatgaagaaccctcagcaaagaagacgttgatttgctacaattgcaaaggaccagggcattactcgagggactgcctgcaaccaaggcaaagtcgatctccacattaccgccaatttacacgaagcagacatcccaatcgtattgtggtcactggagcaaacgccgtacccgtgaggcctcgtgttaatcagaaccca

SEQ ID NO: 14944 - DNA, 402 bp, Oryza sativa
  Clone ID: TFbOSC102216j.C1.o9.gm
atgaccttggcggcggcggccaccgtcgcgttcgagcgggatggccagcgaggagggggccgcggctctcttattccacctgtagcaccgcttacaagagcaagcaagggcgccgctgtcggtgacgacgaccttagccgcatcaaggccgtggacgtcaccgtgccaggcggcgtcgcgctcaccgacggatcccttcctagcggctgcgaggaccgcggctacggaggcggcggaggaggtgaccgtgcgtgctacaagtgcggcaaggaggcccacatggccaaggactgctcccagggcagcgacaacggcgcgggaggatcgtccgtcatgcttcgcgggccggccgcttcgccccgcctcggtcgtcacctgctccggccgccctacggcgtctag

SEQ ID NO: 14945 - DNA, 334 bp, Oryza sativa
  Clone ID: TFbOSC11382j.C1.o6.np
agacaaaaggaagaggggatcccggggatcatttcccctctattatttataaatttaggatttttagggtgtgacattttcgaaccgtaccgatgccgagttgatgagatggcaccaggagggtaggaaaaatgacggtaagattcaacaccctgccgatgctcgacagtggaaaaactttgatgcactacacccggaatttgcaaagaacccgagaaacgtaaggtttgcctggagcacaaacggaaagaacccgttcagtgacctaagcagctttcacaaaaccacactatcgatggatggattcacccgtgagatgacgtggttgtttcat

SEQ ID NO: 14946 - DNA, 5194 bp, Oryza sativa
  Clone ID: TFbOSC420875j.C1.o3.np
gttccgacgttcccggagagtccgattttggaggggaagattttgaagaattccagggccagcaaggcaactcctggtttggaatggtatattcctggtttggagatagaactgtgcagccgggaatggttgttcaggatggttgggcctatgcaacgggatgccgcgcttcaagcctgagtacttgttcggtactgagggatttgtccaggagttgcgtacgatgtccttcgccataggatttgggactgcccctttgtatgcccagattcctcatgaccgtgatgaagagaagtgccgtgtcaaggtcaccttgaacactaatcatgaagacatcccatcgctgatgttcgaggctggagggggaaactacattcatgcttgtcaggaggtggcaaggatcgccataggagagcttcgcgattgctacagtgatcagttggccgacactgagtatcgctaccatcctcgccaaccccagggaagtgaccgtggcagctaccttgaacctgcaggaattgagaatgatgctaccacaaggcatttggttgagatgctgtgggccatggatgagttccgcgctgagattgtgttagctgctcaagatcgtgaagaccggaatcgtggtaagatatgtaagcttgaggacaaagttgatcgtttggagaaggaactagccgcgttgaagggagaagcaccaccacaaaaggccagggttcgtcttaccacaaggaagagagctctatttgtccctcgctaccagttggcgcctaagatggtgcttactcacagcaatgggaatggcccaaacaacaacaacaacaacaacaacaacaatggagagaatcccacgcttgcccaagtcctggtccaacaggcacagctcatgaacatgatgatgcagcaattccagaaccagcagaaccaggggaacaaccatgcacctccccagaacaagttagcagaatttcttcgtgtgaggccgcccactttttctagcactaccaatccagttgaggctagtgattggctgcacgccatagaaaagaaattggacctgcttcagtgcactaatcaagaaaaagtctccttcgcttcacatcagcttcatggccctgcctctgagtggtgggatcacttccgtctcaacaggaccactgcggaaccaatcacttggcttgagttcactgctgctttgcggaaaactcacataccgtcgggagtggtgtctcccaagaagaaggagttcaggacgctcactcagggatctcgctctgtcactgaatacttgcatgaatttaatcgtctagctcgctatgctccagaagatgtacgtacagatgaagagcgtcaagagaagttcttggaaggactgaatgatgagctctcttacccattaatgactggggattatcatgatttccagaagttggtggatatggccattcgccaggaggacaagtacaaccgaatggagcagaagaaacgcaggattgctcacttcaaagctcagcaggggaatagtcagaggccgtgtcttgctatgggacctcaggcagtgtcacagggaggatcttcgttggttgcccgtccacagcgtcagttcttcaacaacaattctggcaacaacaaccgcaaccaagctccacgtcctgttgcaactctagcccagcatcagcctgccaagagggagccgggaaacaagccaagagtgtgcttcaactgtggggaaccaggtcattattctgacaagtgtccgaagccccggcgcgtgaaggttgtccctgcacagaacaactccaccgcaccagtgtccaaggctcgtgtcaatcatgttgctgctgcagaagcccaaggtgctccagatgtgattttgggtacgttccttgttaactcagttcctgcaacagtgcttttcgattctggtgctacacattcatttttgtctatgagttttgcgagaaatcacgggatggaggtagaagatcttagacgtccgttgatggttagtacccccagcaaccaagcactctcgtcacaacgtagcccctccgtcagaatagagattcaaggagtaccatttctggccaaccttattctattagaatccaaagaccttgatgtcatcctagggatggactggttagcccgatataaaggtgtgatagactgtgccaatagaaaagtaactctcaccagcaatgacggtcaagttgtaactgtttacgcattgccttctgagcctttaaggtcaagtctgaaccaagtaagtttggaagagattcccatagtacaggactacccggatgtgttcccggatgatttacctggtatgccgcccaagagagatatagaattcagaatagatctggtaccaagaaaaactccgatccataagagaccttatagaatggcagccaatgaactagcagaggtcaagaggcaagtagatgatttgcttcagaaaggatacattagaccaagttcgtctccatggggagctccagtcatttttgtggaaaagaaagatcatactgagaggatgtgtatggattatcgtgcactaaatgatgtgactatcaagaataaatacccactgcctagaattgatgatttgtttgttcagcttaaaggagccaccgttttctccaagatcgatcttcgatcagggcagttgaggattaaagaggaagatatacctaagacggattttaccactcaagatgggttgtttgaatgtactgttatgtcttttggacttaccaatgcccccgctttcttcatgaacttgatgaataaggtgtttatggaatacctggacaagttcgtggtggtttttattgatgacattcttatctactcccgaaccaaagaagagcatgaagaacaccttcgccttgcactagagaagctacgagaacatcaactgtatgccaagtttagcaaatgtgaattttggttgtctgaagtaaagttccttggacacgtcatctcagccggaggagttgccgttgatccgagtaatgtggaatgagtaaccaactagaaacaaccgaagacagtctccgagattcatagtttcctgggtcttgcaggctattaccggaggttcatagagaatttttccaagattgctaagcccatgacacaactgctttagaaagatgtgaagtacaagtggtcagaagaatgtgagcagagttttcaagagttgaaaagtcgcttaatatcaacacccattttgattttgcctgatccaaagaagggtttccatgtgtactacgacgcatctaagcttgggttaggttgtgttctgatgcaagatgggaaggtggttgcgtatgcatctcgtcagttacatccgcatgagaagaactaccctagtcatgaccttgagttagccgcagtggttcatgcgttgaagatttggcgtcactacctctttggtactcgtacggaggtgtacacgaatcacaagggtttaaagtatatctttactcagccggatctgaacatgagacagcggagatggttggaactgattaaggattatgacatgggaattcattatcacccgggaaaggctaatgttgtagcagatgctctcagcaggaaaggctattgcaatgctacggaaggacggcggttgccgtgggaattatgcaaggaatttgaaagattgaatttgggaattgtcagtagaggttttgttgcagctttagaagcgaagcccactctcattgaccaggttagagaagctcaaatcaatgatcctgatattcaagagattaagaagaacatgagaaggggaaaggctatcgggtatttggaagatgagcaaggaaccgtatggttgggtgagagaatttgtgtcccagagaacaaggagttgaaaaatgcaatcttgaaggaagctcatgacactttatactccattcaccctggtagtaccaagatgtaccaagatctcaaggagaaattttggtgggcaagtataaagcgtgagatagcagagtatgtagctgtgtgtgatgtttgttagcgagtcaaggcagaacatcagaaacccacaggtttgctgcagcccttaatgataccagaatggaagtgggaggaaatttggatggatttcatcactggtctacccagaacgtcatcaggccatgactctatttgggtgatagtcgacaaacttaccaaagtggctcatttcatccctgtgaggacaacatattccggaagtcgtttggcggaattgtatatggcaagaattgtgtgtttgcacggagtgcctaagaaaatagtatccgatcgaggtagccagtttacttcaaagttttggaagaagcttcaggaagagatgggttccaagctgaacttcagtaccgcttatcatccgcagacagacggacaaattgaaagggtaaatcagattttggaagacatgttgagagcttgtgctttagacttcggtggaagttgggataagaatctgccttacgcggaattctcatacaacaacagttatcaagctagtcttcaaatggctccttatgaagcactgtatggtcggaagtgccgcactccgctgttgtgggatcaaacgcgagaacgtcaggttttcgggactgatattctgagggaagtagaagagaaggtaaagatcactcaagagaggttgcgtatagctcagtctcgtcataagagttatgccgacaatcgccgcagggatttaagttttgaggaaggagatcatgtgtaccttcgtgtcatgcctctttggggggttcatcgttttcacaccaaaggaaaattggcaccgcgttttgtgggaccttataagattgtcagtagaagaggtgaggttgcttatcagttggagttacctcaatgcttggcaggtgttcataatgtgttccatgtgtcatagttgaaaaagtgtttaagggtacacactgaagaagctaatcttgagcagattgaaatccaagaggatttgacatatgttgagaaaccaatccgtatcctggagacagatgagagaagaaccaggaatcgagttatccgtttctgtaaggtccaatggagtaatcactcggaagaagaagctacctgggaacgagaagaagaattaaagtcagctcatccgcatcttttcgccagctcttccgaatctcgaggacgagattctgtt

SEQ ID NO: 14947 - DNA, 1629 bp, Oryza sativa
  Clone ID: TFbOSC404471j.C1.o21.gm
atgccgccgccgcgccttggctcggccgagccggtctcatgccgtgcccgtgccccagccgcgccgcctcgtgaccgtccgatcggctttgtgccgatccgagccgtcggttcccgtggaccggcggtggacagcctcggtggtcccggtccacggtggaccggcgcccatgtgccgctgactggtggggcccgcttgccggcgccgcccctcccccttgatgacgtcagcgaggagttcccaatatcggcaccgaagacccctgtcaaaatgcggtccagatccccgaagataacgacagccaagtcaatgtcagaccaaaggaaagtaagtgctacctgttatgattgtggtgagcaaggtcattatataaggaactgtccatggaaggtgttcgccaggtcacctgaaaaggacgagaagcagtgcccaggaagtaaccaagctccaagtcagtctactaacaagaaagatggtactctgcagcacaactttggagcgaacaggaaggtgatatggaagatggataatggcaggaccatgatcatcaccagttcagaatttactcctgaagacgcagcaaggatacccaagcgtcagagaggaagaaataccttccgtggagcacgccagctaacccgacatctcataaagtacggtccgcccagacccgaagatgatgaatcaggagagcggtttgctgctgatgacgatgatgatgatactgatgacgatgatgatacgacccttaacagtttcatggaaagaggattggagttcaaagcatgtgctagatgtgggatagtcggacacactgctagtttatgcctccccacctgccgctgtgatcatgtgcctaaggactgtcagttgaacgcggtcatagctaagaccaagaaagaacaagggacaaccgtgcaacccattcgtcaaccaatgacaatcgacaacagcggtcacaatccttctgctcttcctccaactccagctccagtggaagccaaccatggaagaagcaacgtcaccaaggatgttcataagtctctgcttgttcccgtttcagctgccaaagtgcataatcagaagcctgcacctcgggaccaagcaagtcgattctgccgtaactgtcgtaagccaggacatcgtttcagtgattgtcctcttccaagagcagcaaaggcagttcgtcgtgattcacaagttaccagcattgcccatgacaccaatcgacacctgaatgtgcaacctccgcctcaacggattatcgtcaagggcaccgtcaaaggtcgcattgttccaccggcaaccgtttcaagcctacagcaccaacgccagcagggtaagcaatgccaggagaacaacagctcgctacagctacaaagaggtggtacgctccttcgtcagcacccgcggcaagtgttgtcagcaccaggtcgtccaactgttgtcagttctagcaatgcacctggtattgctccaatctggaggcccatcgacaaatcaccgctcggtaaccccacgggcaagaagatcctacccgttacagctgacaagacagttgcccctccaccatcgaagatcaacaagcagagcaacgttcccggtgagacttctggtagtaggaactaa

SEQ ID NO: 14948 - DNA, 1675 bp, Oryza sativa
  Clone ID: TFbOSC900396j.C1.o8.np
cttaaattttccttggtctaaaataaggtcagaagtcaaaacaagggtgcctcaacctcccgagtgaatgaagcaccagacaccagttgtgtggtagtagtccaacgcctgattaaccagaacaaactacttatagagctactacagcaacatcagacgccaattctgaacccgagtcagatgcaacctcaagtgcagtttaaggaagcccaagaactcacaccacaagtcagcgcaccgccagcatcccaactggcccatgatgccatgccacatgtggactcaaaagaagcaagaatcatttgttttatctgtgatgaacaagggcactatgcaaggaaatgtcctcagcggaaaagaaaagcaccaatgcgaaccgaagatgaagtccgtaagatgaccattaccggcacagaatggcctccaccaggaatgacaaaacgtcagagaggaaatttctttcatggtgcaccacagttgacccaacatcttttagctaatggaggtagagtgtctgatagtgaagattcagatcaagtctcctcaagggatgaagatgagaagtctctccaacgtttcaagcagaataaaatggaacataaggcatgctctcattgtggagaaatcggtcacattgccagctcatgtgtcactacctgcgtttattgtgaagaagaccatccacccggcgagtgtccaacaagcaagatcacttgtttcttgtgtgaaggaactgatcatttaccaaaagattgtcagttcagttttctgctgacgaagaagatggacaaccaagcgttccaacagagagaagcatcaaggcaacgcaattccccaccaagactacagtttcagcctaaccctagtgccaggacagaggaatcaaaatgtgaaaagcaaatcccgagttcggcaagatatcagttgcttcaattgtcgagaaatgggtcatttcaccgacaagtgcccgaaaccgacaaacacagctgccagcacgtcagtccacacaacaccttgcaatcagaagcttgctcctcagcgaatggtcatccatgcatctggaagcagtcctatagcccgaattgcaatagctccaactccaatgagtgcactaccacaaggtgtcaatgctcccttccagccccatccacctattgacaagacaaaggccagtatccgcattgtacctttggatgttccagtacaacagccgagaaatcaagtacttgatgaagaacctatgaagaaggacattactccagaaattgtccacgaccaaagcgtaacccacgccatcattccggacattatgcacgaagaagacaggatcacaatatcagggtcactggagcaaatgcagtacctgtcaagcctagtgctagacaagctggtgtcgacgcatgtcatgaaggtggtaacttgtatgaggttgactccaatgatatgaattatgagaagttctggaactgaagccccatcttcaactaccgcaacccagtcgaagtcagcaaaaggtgcaaccagggacaagtcaggtgaagagaagattccatctgcaacaggagatcaagccaagcagttccgagtggggaagttttgctggacaagtttgttatagaagacgcaacggaagaagtcagaaaataagagaagatcgcccaaccaatcttcttgc

SEQ ID NO: 14949 - DNA, 1863 bp, Oryza sativa
  Clone ID: TFbOSC401303j.C1.o3.fg
atggctgacaatgagaaaggcaataaggtcagaagtcaggacattggtacctcaagctcccgagtgaatgaaacaccagacaccagttgtgtggcagtggtccaacacctgattaaccagaaccaattgcttatagagatactacagcagcatcggatgccaattttgaacccgagtcagatgcaacctcaagtgcagttggaggcagtccaagcactcacaccacaagtcagcgcaccgccaacatcccagaaggcccctcatgccatgccacatgttgacccaaaagaagcaagtatcatctgttttatgtgtgatgagcaagggcactatgcaaggaactgtcctcagcagaaaagaaaagcaccaatgcgaaccgaagatgaagtccgtaagatgatcattaccagcacagaatggcctccaccaggaatgacaaaacatcagagaagaaattccttccgaggtgcacaacagttgacagagcatcttttagctaatggaggtagagtgtctgatagtgaagattcagatcaagtctcctcagatgatgaagatgaaatggaacgtaaggcatgctctcgttggggagaagtcggtcatgttgccagcttgtgtgccactacctgctttcattgtgaggaagaccatccacccggtgaatgccccatgagcaggatcacttgtttcttttgtgaaggaactgatcatgtaccaaaagattgtcaattcagttttctgctgacgaagaagatggccaaccaacccgccagttccaacggagagaagcatcaaggcaacacaaatccccgccaagatcaccgtttcagcctaactccagtgccaggacagaggaatcgaaatgagaaaagaaaatgccgagtccgggaagacatctgttgcttcaattgtcaaggaatgggtcatttcgccgacaagtgcccaaaaccgagaaacatagctgccggcacgtcagtccacgcaactccctgcaatcagaagcttgctcctcaacgaattgtcctccatgcatcccgaagcagtcctatagcccgcgttgcaacagctccaattccaatgagtgcactaccacaaggtgtcgatgctcaatttcagccccagccaccagctgacaagacagaggccagtatctgcgttgtacctttggaagttccaatacagcagctgagaaatcaagtacaagatgaagaacccgagttgaaggagggcattactccaaaaactgtccccaaccaaggcaaaatcgacctccacattaccgccaatttacacgaagcagacattccaaccgtattgtggtcactggagcaaacgccgtacccgtttcaccgaaaggcagcaagccaaaggacctcatcgtccccagaagcgtccgcaatccacattaaagaataccacctgatagagataggccgaaagatgattgataaaaagagattggcaaagatgttctctagcatgaaagaagtaggccgaaaggtgattgataaacagaaacatgttctgcatcgctcacggaagacccctgattgtaattgccccgcaacagtcaccttgtcattaagtaagcaagatgacctagttgataacttgtccgaggttgactccgaagatatgaatcatgagaagttctggaacggaagcatcactgcactaccgcaacctagtctgagtcagccaaaaggtgcaccctggtccaagtcaggtgaagagaagattccatccgcaacaggaggtcaagccaagcagttccgagtggtgaagttttgctggaagtttgtcaagacgcaacggaagaagtcagacaagaagagaagaccgcccaacctatcttcttgctag

SEQ ID NO: 14950 - DNA, 1996 bp, Oryza sativa
  Clone ID: TFbOSC900144j.C1.o12.np
atggatgaagtcgttgcgacgatggatatctctgaggcaaatgaaggctacgcgagctgtggctcggtaatcgagatgtctaggcaaatgaaggctacacgggtcggtgcccgggctcaatcctggcctgcctgtcccgggataccggccgtaggcagggttggatcggtacttttgttcacggctaggatgggtaaagggttatgtcacgttttttatgatgggttccaattgcaatggaatgcagagtaaaggcgtgtcttgtgggttggcctgggttggcttgggacgagctgggacccaggtcgggttgccagttcggtccgaatcatcgtaggccttgggttaaggcagtactaggtggtcagctttgcgaagaagaagatgtcgtcaattgtctgccgaagctccgcaagactgttggatctgctagcgaagcgagggaagcagtgaagccagatgtgaagcaggagaaaaagtgtagctctgttaaggtcctatccttagtttctgatctgtctctcccctttgtttttcctctctccctctccaaaacctgcaacagatggcggataatgagaaaggcaataaggtcagaagtcaggaaatgggtacctcaagctcccgagtgaatgaagcaccagacaccaattgtgtggcagtggtccaacacttgattaaccagaacaaattgcttatagagatactacagcagcatcggatgccaattctgaacccgagtcagatgcaacctcaggcgcagttggaggcaatccaagcactcacaccacaagtcagcgcaccgccaacatcccagaaggcccctcatgccatgtcacatgttgactcaaaagaagcaagtatcattggttttatgtgtgatgaacaagggcactatgcaaggaactgtcctcagcagaaaagaaaagcaccaatgcgaaccgaagatgaagtccgtaagatgatcattaccagtacagaatggcctccaccaggaatgacaaaacgtcagagaagaaattccttccgaggtgcaccatagttgacagagcatcttttagctaatggaggtagagtgtctgatagtgaagattcagatcaagtctcctcagatgatgaagatgagaagtctccccaagggttcaaccagaataaaatggaacataaggcatgctctcattgtggagaaatcggtcatgttgccagctcatgtgccactacctgctttcattgtaaggaagaccatccacccggcgagtgccccatgagcaggatcacttgtttcttgtgtgaaggaactgatcatgtaccaaaagattgtcaactcagttttctgctgacgaagaagatggccaaccaacatgcccgttctaatggagagaagcatcaaggcaacaccaatcctcgccaagattacagtttcagcctaactccagtgccaggacagaggaatcaaaatgagaaaagaaaatactgagtccggaaagatatctgttgcttcaattgtcaagaaatgtgtcatttcactgacaagtgcccaaaaccgagaaacatagctaccagcacgtcagtccacgcaactccccacaatcagaagcttgctcctcagcgaattgtcatccatgcatcccgaagcattcctatagcccgcgttgcaacagctccaactccagtgattgcactaccacaaggtgtcaatgctcaatttcagccccagccaccagttgacaagacagaggccagtatttgcgttgtacctttggatgttccagcacagcagccaagaaatcaagtacaagatgaagaacccgagcgtaaaaaagttatagtctatttcaactgtagagaagaagggcattactcgagggactgtcccctaccaaggcaaaatcagcccccacattttcgccaatttacaggaagcagacataccaatcgccaagtggtcactggagcaaatgcagtacctgttaagcctagtgctagtcaaaagcaa

SEQ ID NO: 14951 - DNA, 4290 bp, Oryza sativa
  Clone ID: TFbOSC100841j.C1.o2.fg
atggctggttttgccgatgcactgaggccggataaattcaccggtgtgcattttaagagatggcagatcagggtcactctgtggctgacagctatgaaatgcttctgggtgagtactggcaaacctgaaggagttcttaccgctgaacagcagaagcaattcgaggaagccactactctctttgtgggatgcattcttagcgttcttggcgatcgtctggtcgaggtgtatatgcatatgaccgacgctaaggagttgtgggatgcactgaatactaaattcggtgctactgatgctagcaatgatctgtatatcatggagcagtttcatgactacaaaatggctgacaaccgttctgtagtcgaacaggctcatgagatacaaaccatggctaaggaactcgaactccttaagtgtgtcttacccgacaaatttgtggccgggtgcattattgcaaaactacctccatcttggaggagtttcggtactgcactcaaacacaagagacaggaatactccgttgaggggttgattgcgtctcttgatgttgaggagaaagctcgggaaaaagatgccgcgtctaagggcgatggtgggcagtccagtgccaatgttgtgcacaaggcccagaacaagagcaaggggaaatacaaagctcagcagaccaccaacttcaagaagcagaagaagaacaacaacaatcctaatcaggatgagaggacttgctttgtgtgtggccaagttggtcatctggctaggaagtgtccacaacgcaaggggatgaaagcacctgcagggcagacttctaagtctgctaatgtgaccattggcaacactggagatggaagctggtatggtaatttacctactgttttttcagttaatcaatctactaattggtgggttgatactggggccaatgtacatgtttgtggtgacatctcattgttttcttcttatcaggtcgcacggggttccaccgtcctaatggggaatgggtcacatgcttctgttcatggtgttggcacggtagatctgaagtttacttcgggaaagatcgtgcagctgaagaacgtgcagcatgtcccttctatcgacaggaatcttgttagtggctcccgtctgactagagacggatttaagttggtttttgagtctaataaagtagtcgtgtctaaacatggatattttattggtaaaggttatgagtacggaggcctgttccgcttttccctttctgatttctgcaataagtctgtgaaccatatttgtggcagtgtggatgatgaggctaatgtttggcattcacgtttatgtcatattaattttggcttgatgtctcggctttccagcatgtgtttaattcctaagttttccattgtcaaaggttctaagtgccatagttgtgtgcaatcgaagcaacctcgcaagcctcacaaggctgccgaggagagaaacttggcaccactagaactcctacattcagatctttgtgaaatgaatggggtgttgacgaagggtggaaaacgatatttcatgacattgattgatgatgctactagattttgctatgtgtacttgttgaaaacgaaagacgaggctctagactattttaaaatttataaggcagaagttgaaaatcaacttgacagaaagataaaaaggcttaggtctgatcgtggtggagagtttttctcgaacgagtttgacttattctgtgaggaacatggcatcatacatgagaggacgcctccctattctcccgagtctaatgggattgctgaaaggaagaaccgcacactgactgacttggtgaatgccatgttggacaccgcgggactgcctaaggcatggttgggggaggcattgttgacctcaaatcatgtgttaaacagagttcctaacagaaataaggacaaaacaccatatgagatatggattggtagaaaaccatcactttcttatttgcgcacatgggggtgcttggcgaaagtcaatgtaccaataacgaagaagcgcaaacttggacctaagactgtggactgtgtttttctgggatatgctcatcatagcattgcctatagatttttaatagttaaatccgaggtaccggacatgcatgttggtacaattatggagtctcgtgatgctaccttctttgagagctttttcccaatgaaggatacacatagtggttcgaaccaaccctctgaaataattcccagttcaatcacaccaccagaacaaactgaacatacacatgaacttgtctctgaggaggatgtcagtgaagctcctcgaaggagtaagagacaaaggacagctaagtcttttggtgatgatttcattgtgtacctcgtggatgacactcctaagtcaatttcagaagcatatgcatctcctgatgcagactactggaaggaggctgtccgtagtgaaatggattccattatcgctaacgggacttgggaggtgacagagcgaccctatgggtgtaaacctgtggggtgcaagtgggtgttcaagaagaagcttaggcctgacggtactattgaaaagtacaaggctcggcttgttgctaagggctatactcagaaagaaggcgaagatttctttgacacttactcacctgttgctagattgaccacaattcgtgtgctactttccctagcagcctcacatggtcttctcgttcatcaaatggacgttaagacagcttttcttaatggagagctggatgaggagatctatatggatcaacctgatgggtttgtagttgaaggtcaagaaggcaaagtgtgcaaattgttgaagtctttgtatggtctgaaacaagctcctaagcaatggcatgagaaatttgacaaaacattgacatctgcaggctttgcagtcaatgaggcagataaatgtgtgtactatcgccatggtgggggtgagggagttattttgtgcttgtatgttgacgacatactgatatttgggacaaatcttgaggtgataaatgaggttaaatcattcttgtctcaaaattttgatatgaaagatttgggagtagctgatgttatcttaaacattaagctaattagaggtgagaatgggattactctcttgcagtcccattatgtggagaagatcttgaatcgctttggctacattgatagtaagccttctccaacaccttatgatcctagcttgttgcttcgcaagaacaagagaattgctaggaatcaactggaatactcccaaatcattggctcgttgatgtacctggctagtgcaactaggcctgatatctcctttgctgtgagcaagttgagccgatttacttctaatccgggagatgatcactggcgtgcgcttgagcgagtaatgcgctatctgaaagactccaaaatctggcgtgcgcttgagcgagtaatgcgctatctgaaaggtactgtggaattggggcttcactatactgggtatcctgcggtactggagggttatagtgattctaactggatctctgatgtggatgagatcaaagccactagtggatatgttttcacactgggtggtggtgctgtttcatggaggtcttgcaaacagacaattttgacgaggtcaaccatggaagcagagctaacggcactggatactgctactgttgaggcagaatggctgcgtgatcactggcgtgcgcttgagcgagtaatgcgctatctgaaaggtactgtggaattggggcttcactatactgggtatcttgcggtactggagggttatagtgattctaactggatctctgatgtggatgagatcaaagccactagtggatatattttcacactgggtggtggtgctgtttcatggaggtcttgcaaacagacaattttgacgaggtcaaccatggaagcagagctaacgacactggatactgctactgttgaggcagaatggctgcgtgatctattaatggatctgcctgttgttgaaaaaccggtgccggctatccttatgaactgtgacaatcaaacgacatgtgaaaagacgattgaagtctgtcaggaaattaagaaactccggagttataacgttggattacatccaaacagcgagaaacatggcagatcccttcacgaagggactatcacgaaatgtgatagacaatgcatcgaaggagatgggtttgagacccatagcattcttgaaggaactcacctttgtgagcttgactgttggtcgcagtctatgaagattttgggtgaatcttctaggaagcttactaaagacctaggagtatga

SEQ ID NO: 14952 - DNA, 4326 bp, Oryza sativa
  Clone ID: TFbOSC101706j.C1.o9.fg
atggctagaggtggagcagcgtgtcgcaccaccaatccatctcgtcggcttcggcggcggcaacagccgacggggacgaggccgacaggttcagatcgagcagcagcggcgagcagcgtggagcggtcggcggcgcccgaggcgccgtcctcgcagagcacggaggatgaggagccgacggggagagcgaggaggccgccgtcgtcatccatggaagctggtggagaggcgacggaggccggcggcgtggggggcggccctcttgctcccacatcgtcgccgccgccgccacatcgcccgtcgagatctaatgatgcgttcatgctagttttcatctgtaatgtcatgatttatttatggaatagattaaatcattatatgtctataatctcaacaatccaacaaccttattataggcactgtgattttactatggctggttttgccgatgcactgaggccggataaattcaccggtgtgcattttaagagatggcagatcagggtcactctgtggctgacagctatgaaatgcttctgggtgagtactggcaaacctgaaggagttcttactgctgaacagcagaagcaattcgaggaagccactactctctttgtgggatgcattcttagcgttcttggcgatcgtctggtcgaggtgtatatgcatatgaccgacgctaaggagttgtgggatgcactgaatactaaattcagtgctactgatgctagcaatgatctgtatatcatggagcagtttcatgactacaaaatagctgacaaccgttctgtagtcgaacaggctcatgagatacaaaccatggctaaggaactcgaactccttaagtgtgtcttacccgacaaatttgtggccgggtgcattattgcaaaactacctccatcttggaggagtttcggtactgcactcaaacacaagagacaggaatactccgttgaggggttgattgcgtctcttgatgttgaggagaaagctcgggaaaaagatgtcgcgtctaagggcgatggtgggcagtccagtgccaatgttgtgcacaaggcccagaacaagagcaaggggaaatacaaagctcagcagaccaccaacttcaagaagcagaagaagaacaacaacaatcctaatcaggatgagaggacttgctttgtgtgtggccaagttggtcatctggctaggaagtgtccacagcgcaaggggatgaaggcacctgcagggcagacttctaagtctgctaatgtgaccattggcaacactggagatggaagcgggtatggtaatttacctactgttttttcagttaatcaatctactaattggtgggttgatactggggccaatgtacatgtttgtgctgacatctcattgttttcttcttatcaggtcgcacggggttccaccgtcctaatggagaatgggtcacatgcttatgttcatggtgttggcacggtagatctgaagtttacttcgggaaagatcgtgcagctgaagaacgtgcagcatgtcccttctatcgacaggaatcttgttagtggctcccgtctgactagagacggatttaagttggtttttgagtctaataaagtagtcgtgtctaaacatggatattttattggtaaaggttatgagtgcggaggcctgttccgcttttccctttctgatttctgcaataagtctgtgtaccatatttgtggcagtgtggatgatgaggctaatgtttggcattcacgtttatgtcatattaattttggcttgatgtctcggctttccagcatgtgtttaattcctaagttttccattgtcaaaggttctaagtgccatagttgtgtgcaatcgaagcaacctcgcaagcctcacaaggctgccgaggagagaaacttggcaccactagaactcctacattcagatctttgtgaaatgaatggggtgttgacgaagggtggaaaacgatatttcatgacattgattgatgatgctactagattttgctatgtgtacttgttgaaaacgaaagacgaggctctagactattttaaaatttataaggcagaagttgaaaatcaacttgacagaaagataaaaaggcttaggtctgatcgtggtggagagtttttctcgaacgagtttgacttattctgtgaggaacatggcatcatacatgagaggacgcctccctattctcccgagtctaatgggattgctgaaaggaagaaccgcacactgactgacttggtgaatgccatgttggacactgcgggactgcctaaggcatggtggggggaggcattgttgacctcaaatcatgtgttaaacagagttcctaacagaaataaggacaaaacaccatatgagatatggattggtagaaaaccatcactttcttatttgcgcacatgggggtgcttggcgaaagtcaatgtaccaataacgaagaagcgcaaacttggacctaagactgtggactgtgtttttctgggatatgctcatcatagcattgcctatagatttttaatagttaaatccgaggtaccggacatgcatgttggtacaattatggagtctcgtgatgctaccttctttgagagctttttcccaataaaggatacacatagtggttcgaaccaaccctctgaaataattcccagttcaatcacaccaccagaacaaactgaacatacacatgaacttgtctctgaggaggatgtcagtgaagctcctcgaaggagtaagagacaaaggacggctaagtcttttggtgatgatttcactgtgtacctcgtggatgacactcctaagtcaatttcagaagcatatgcatctcctgatgcagactactggaaggaggctgtccgtagtgaaatggattccattatcgctaacgggacttgggaggtgacagagcgaccctatgggtgtaaacctgtggggtgcaagtgggtgttcaagaagaagcttaggcctgacggtattattgaaaagtacaaggctcggcttgttgctaagggctatactcagaaagaaggcgaagatttctttgacacttactcacctgttgctagattgaccacaattcgtgtgctactttccctagcagcctcacatggtcttctcgttcatcaaatggacgttaagacaacttttcttaatggagagctggatgaggagatctatatggatcaacctgatgggtttgtagttgaaggtcaagaaggcaaagtgtgcaaattgttgaagtctttgtatggtctgaaacaagctcctaagcaatggcatgagaaatttgacaaaacattgacatctgcaggctttgcagtcaatgagacagataaatgtgtgtactatcgccatggtgggggtgagggagttattttgtgcttgtatgttgacgacatactgatatttgggacaaaccttgaggtgataaatgaggttaaatcattcttgtctcaaaattttgatatgaaagatttgggagtagctgatgttatcttaaacattaagctaattagaggtgagaatgggattacactcttgcggtcccattatgtggagaagatcttgaatcgctttggctacattgatagtaagccttctccaacaccttatgatcctagcttgttgcttcgcaagaacaagagaattgctaggaatcaactggaatactcccaaatcattggctcgttgatgtacctggctagtgcaactaggcctgatatctcctttgctgtgagcaagttgagccgatttacctctaatccgggagatgatcactggcgtgcgcttgagcgagtaatgcgctatctgaaaggtactgtggaattggggcttcactatactgggtatcctgcggtactggagggttatagtgattctaactggatctctgatgtggatgagatcaaagccactagtggatatgttttcacactgggtggtggtgctgtttcatggaggtcttgcaaacagaccattttgacgaggtcaaccatggaagcagagctaacggcactggatactgctactgttgaggcagaatggctgcgtgatctattaatggatctgcctgttgttgaaaaaccggtgccggctatccttatgaactgtgacaatcaaacgacatgtgaaaagacgattgaagtctgtcaggaaattaagaaactccggagttataacgttggattacatccaaacagcgagaaacctggcagatcccttcacgaagggactatcacgaaatgtgataaacaatgcatcgaaggagatgggtttgagacccatgtgaattatactatggtggtaacccagtctatgtga

SEQ ID NO: 14953 - DNA, 3651 bp, Oryza sativa
  Clone ID: TFbOSC101997j.C1.o18.fg
atggctggttttgtcgatgcactgaggccggataaattcaccggtgtgcattttaagagatggcagatcagggtcactctgtggctgacagctatgaaatgcttctgggtgagtactggcaaacctgaaggagttcttactgctgaacagcagaagcaattcgaggaagccactactctctttgtgggatgcattcttagcgttcttggcgatcgtctggtcgaggtgtatatgcatatgaccgacgctaaggagttgtgggatgcactgaatactaaattcggtgctactgatgctagcaatgatctgtatatcatggagcagtttcatgactacaaaatggctgacaaccgttctgtagtcgaacaggctcatgagatacaaaccatggctaaggaactcgaactccttaagtgtgtcttacccgacaactttgtggccgggtgcattattgcaaaactacctccatcttggaggagtttcggtactgcactcaaacacaagagacaggaatactccgttgaggggttgattgcgtctcttaatgttgaggagaaagctcgggaaaaagatgccgcgtctaagggcgatggtgggcagtccagtgccaatgttgtgcacaaggcccagaacaagagcaaggggaaatacaaagctcagcagaccaccaacttcaagaagcagaagaagaacaacaacaatcctaatcaggatgagaggacttgctttgtgtgtggccaagttggtcatctggctaggaagtgtccacagcgcaaggggatgaaggcacctgcagggcagacttctaagtctgctaatgtgaccattggcaacactggagatggaagcgggtatggtaatttacctactgttttttcagttaatcaatctactaattggtgggttgatactagggccaatgtacatgtttgtgctgacatctcattgttttcttcttatcaggtcgcacggggttccaccgtcctaatggggaatgggtcacatgcttctgttcatggtgttggcacggtagatctgaagtttacttcgggaaagatcgtgcagctgaagaacgtgcagcatgtcccttctatcgacaggaatcttgttagtggctcccgtctgactagagacggatttaagttggtttttgagtctaataaagtagtcgtgtctaaacatggatattttattggtaaaggttatgagtgcggaggcctgttccgcttttccctttctgatttctgcaataagtctgtgaaccatatttgtggcagtgtggatgatgaggctaatgtttggcattcacgtttatgtcatattaattttggcttgatgtctcggctttccagcatgtgtttaattcctaagttttccattgtcaaaggttctaagtgccatagttgtgtgcaatcaaagcaacctcgcaagcctcacaaggctgccgaggagagaaacttggcaccactagaactcctacattcagatctttgtgaaatgaatggggtgttgacgaagggtggaaaacgatatttcatgacattcattgatgatgctactagattttgctatgtgtacttgttgaaaacgaaagacgaggctctagactattttaaaatttataaggcagaagttgaaaatcaacttgacagaaagataaaaaggcttaggtctgatcatggtggagagtttttctcgaacgagtttgacttattctgtgaggaacatggcatcatacatgagatgacgcctccctattctcccgagtctaatgggattgctgaaaggaagaatcgcacactgactgacttggtgaatgccatgttggacaccgcgggactgcctaaggcatggtggggggaggcattgttgacctcaaatcatgtgttaaacagagttcctaacagaaataaggacaaaacaccatatgagatatggattggtagaaaaccatcactttcttatttgcgcacatgggggtgcttggcgaaagtcaatgtaccaataacgaagaagcgcaaacttggacctaagactgtggactgtgtttttctgggatatgctcatcatagcattgcctatagatttttagtagttaaatccgaggtatcggacatgcatgttggtacaattatggagtctcgtgatgctatcttctttgagagctttttcccaatgaaggatacacatagtggttcgaaccaaccatctgaaataattcccagttcaatcacaccaccagaacaaactgaacatacacatgaacttgtctctgaggaggatgtcagtgaagctcctcgaaggagtaagagacaaaggacggctaagtcttttggtgatgatttcactgtgtacctcgtggatgacactcctaagtcaatttcagaagcatatgcatctcctgatgcagactactggaaggaggctgtccgtagtgaaatggattccattatcgctaacgggacttgggaggtgacagagcgaccctatgggtgtaaacctgtggggtgcaagtgggtgttcaagaagaagcttaggcctgacgcctcacatggtcttctcgttcatcaaatggacgttaagacagcttttcttaatggagagctggatgaggagatctatatggatcaacctgatgggtttgtagttgaaggtcaagaaggcaaagtgataaatgaggttaaatcattcttgtctcaaaattttgatatgaaagatttgggagtagctgatgttatcttaaacattaagctaattagaggtgagaatgggattacgctcttgcagtcccattatgtggagaagatcttgaatcgctttggctacattgatagtaagccttctccaacaccttatgatcctagcttgttgcttcgcaagaacaagagaattgctaggaatcaactggaatactcccaaatcattggctcgttgatgtacctggctagtgcaactaggcctgatatctcctttgctgtgagcaagttgagccgatttacctctaatccgggagatgatcactggcgtgcgcttgagcgagtaatgcgctatctgaaaggtactgtggaattggggcttcactatactgggtatcctgtggtactggagggttatagtgattctaactggatctctgatgtggatgagatcaaagccactagtggatatgttttcacactgggtggtggtgctgtttcatggaggtcttgcaaacagaccattttgacgaggtcaaccatggaagcagagctaacggcactggatactgctactgttgaggcagaatggctgcgtgatctattaatggatctgcctgttgttgaaaaaccggtgccggctatccttatgaactgtgacaatcaaacgacatgtgaaaagacgattgaagtctgtcaggaaattaagaaactccggagttataacgttggattacatccaaacagcgagaaacctggcagatcccttcacgaagggactatcacgaaatgtgatagacaatgcatcgaaggagatgggtttgagacccatatgagttatactatggtgagcattcttgaaagaactcacctttgtgagcttgactgttggtcgcagtctatgaagattttgggtgaatcttctaggaagcttactaaagacctaggagtatga

SEQ ID NO: 14954 - DNA, 3744 bp, Oryza sativa
  Clone ID: TFbOSC102144j.C1.o1.fg
atggctggttttgccgatgcactgaggccggataaattcaccggtgtgcattttaagagatggcagatcagggtcactctgtggctgacagctatgaaatgcttctgggtgagtactggcaaacctgaaggagttcttactgctgaacagcagaagcaattcgaggaagccactactctctttgtgggatgcattcttagcattcttggcgatcgtctggtcgaggtgtatatgcatatgaccgacgctaaggagttgtgggatgcactgaatactaaattcggtgctactgatgctagcaatgatctgtatatcatggagcagtttcatgactacaaaatggctgacaaccgttctgtagttgaacaggctcatgagatacaaaccatggctaaggaactcgaactccttaagtgtgtcttacccgacaaatttgtggccgggtgcattattgcaaaactacctccatcttggaggagtttcggtactgcactcaaacacaagagacaggaatactccgttgaggggttgattgcgtctcttgatgttgaggagaaagctcgggaaaaagatgccgcgtctaagggcgatggtgggcagtccagtgccaatgttgtgcacaaggcccagaacaagagcaaggggaaatacaaagctcagcagaccaccaacttcaagaagcagaagaagaacaacaacaatcctaatcaggatgagaggacttgctttgtgtgtggccaagttggtcatctggctaggaagtgtccacagcgcaaggggatgaaggcacctgcagggcagacttctaagtctgctaatgtgaccattggcaacactggagatggaagcgggtatggtaatttacctactgttttttcagttaatcaatctactaattggtgggttgatactggggccaatgtacatgtttgtgctgacatctcattgttttcttcttatcaggtcgcacggggttccaccgtcctaatggggaatgggtcacatgcttctgttcatggtgttggcacggtagatctgaagtttacttcgggaaagatcgtgcagctgaagaacgtgcagcatgtcccttctatcgacaggaatcttgttagtggctcccgtctgactagagacggatttaagttggtttttgagtctaataaagtagtcgtgtctaaacatggatattttattggtaaaggttatgagtgcggaggcctgttccgcttttccctttctgatttctgcaataagtctgtgaaccatatttgtggcagtgtggatgatgaggctaatgtttggcattcacgtttatgtcatattaattttggcttgatgtctctgctttccagcatgtgtttaattcctaagttttccattgtcaaaggttctaagtgccatagttgtgtgcaatcgaagcaacctcgcaagcctcacaaggctgccgaggagagaaacttggcaccactagaactcctacattcagatctttgtgaaatgaatggggtgttgacgaagggtggaaaacgatatttcatgacattgattgatgatgctactagattttgctatgtgtacttgttgaaaacgaaagacgaggctctagactattttaaaatttataaggcagaagttgaaaatcaacttgacagaaagataaaaaggcttaggtctgatcgtggtggagagtttttctcgaacgagtttgacttattctgtgaggaacatggcatcatacatgagaggacgcctccctattctcccgagtctaatgggattgctgaaaggaagaaccgcacactgactgacttggtgaatgccatgttggacaccgcgggactgcctaaggcatgcattgcctatagatttttaatagttaaatccgaggtaccggacatgcatgttggtacaattatggagtctcgtgatgctaccttctttgagagctttttcccaatgaaggatacacatagtggtttgaaccaaccctctgaaataattcccagttcaatcacaccaccagaacaaactgaacatacacatgaacttgtctctgaggaggatgtcagtgaagctcctcgaaggagtaagagacaaaggacggctaagtcttttggtgatgatttcactgtgtacctcgtggatgacactcctaagtcaatttcagaagcatatgcatctcctgatgcagactactggaaggaggctgtccgtagtgaaatggattccattatcgctaacgggacttgggaggtgacagagcgaccctatgggtgtaaacctgtggggtgcaagtgggtgttcaagaagaagcttaggcctgacggtactattgaaaagtacaaggctcggcttgttgctaagggctatactcagaaagaaggcgaagatttctttgacacttactcacctgttgctagattgaccacaattcgtgtgctactttccctagcagcctcacatggtcttctcattcatcaaatggacgttaagacagcttttcttaatggagagctggatgaggagatctatatggatcaacctgatgggtttgtacttgaaggtcaagaaggcaaagtgtgcaaattgttgaagtctttgtatggtctgaaacaagctcctaagcaatggcatgagaaatttgacaaaacattgacatctgcaggctttgcagtcaatgaggcagataaatgtgtgtactatcgccatggtgggggtgagggagttattttgtgcttgtatgttgacgacatactgatatttgggacaaaccttgaggtgataaatgaggttaaatcattcttgtttcaaaattttgatatgaaagatttgggagtagctgatgttatcttaaacattaagctaattagaggtgagaatgggattacactcttgcagtcccattatgtggagaagatcttgaatcgctttggctacattgatagtaagccttctccaacaccttatgatcctagcttgttgcttcgcaagaacaagagaattgctaggaatcaactggaatactcccaaatcattggctcgttgatgtacctggctagtgcaactaggcctgatatctcctttgctgtgagcaagttgagccgatttacctctaatccgggagatgatcactggcgtgcgcttgagcgagtaatgcgctatctgaaaggtactgtagaattggggcttcactatactaggtatcctgcggtactggagggttatagtgattctaactggatctctgatgtggatgagatcaaagccactagtggatatgttttcacactgggtggtggtgctgtttcatggaggtcttgcaaacagacaattttgacgaggtcaaccatggaagcagagctaacggcactggatactgctactgttgaggcagaatggttgcgtgatctattaatggatctgcctgttgttgaaaaaccggtgccggctatccttatgaactgtgacaatcaaacgacatgtgaaaagacgattgaagtctgtcaggaaattaagaaactccggagttataacgttggattacatccaaacagcgagaaacctggcagatcccttcacgaagggactatcacgaaatgtgatacacaatgcatcgaaggagatgggtttgagacccatagcattcttgaaggaactcacctttgtgagcttgactgttggtcgcagtccatgaagattttgggtgaatcttctaggaagcttactaaagacctaggagtatga

SEQ ID NO: 14955 - DNA, 1234 bp, Oryza sativa
  Clone ID: TFbOSC10364j.C1.o1.gm
gagcgcgggtgagcgggagagagggggaagtgggcgcgggtgcgagggcgacgtggacggcgtggcccgggaggcgcggacgcgaggcgcggcggcggttgcgggcgcggcggcgagcggctggagcgtgcaccggcgatcgggagagcaggtctccggaacctctgccttcgacgtcctgcaccaggagaaggcggcaataaggcactgtgattttactatggctggttttgccgatgcactgaggccggataaattcaccggtgtgcattttaagagatggcagattagggtcactctgtggctgacagctatgaaatgcttctgggtgagtactggcaaacctgaaggagttcttactgctgaacagcagaagcaattcgaggaagccactactctctttgtgggatgcattcttagcgttcttggcgatcgtctggtcgaggtgtatatgcatatgaccgatgctaaggagttgtgggatgcactgaatactaaattcggtgctactgatgctagcaatgatctgtatattatggagcagtttcatgactacaagatggctgacaaccgttctgtagtcgaacaggctcatgagatacaaaccatggctaaggaactcgaactccttaagtgtgtcttacccgacaaatttatggccgggtgcattattgcaaaactacctccatcttggaggagtttcggtactgcactcaaacacaagagacaggaatactccgttgaggggttgattgcgtctcttgatgttgaggagaaagctcgggaaaaagatgccgcgtctaagggcgatggtggacagtccagtgccaatgttgtgcacaaggcccagaacaagagcaaggggaaatacaaagctcagcagaccaccaacttcaagaagcagaagaagaacaacaacaatcctaatcaggatgagaggacttgctttgtgtgtggccaagttggtcatctggctaggaagtgtccacagcgcaaggggatgaaggcacctgcagggcagacttctaagtctgctaatgtgaccattggcaacactggagatggaagcgggtatggtaatttacctactgtcgcacggggttccaccgtcctaatggggaatgggtcacatgcttctgttcatgttgttggcacggtagatctgaagtttacttcgggaaagatcgtgcagctgaagaatgtgcagcatgtcccttctatcgacaggaatctt

SEQ ID NO: 14956 - DNA, 973 bp, Oryza sativa
  Clone ID: TFbOSC12941j.C1.o2.hg
atgcatatgaccgacgctaaggagttgtgggatgcactgaatactaaattcggtgctactgatgctagcaatgatctgtatatcatggagcagtttcatgactacaaaatggctgacaaccgttctgtagtcgaacaggctcatgagatacaaaccatggctaaggaactcgaactccttaagtgtgtcttacccgacaaatttgtggccgggtgcattattgcaaaactacctccatcttggaggagtttcggtactgcactcaaacacaagagacaggaatactccgttgaggggttgattgcgtctcttgatgttgaggagaaagcttgggaaaaagatgccgcgtctaagggcgatggtgggcagtccagtgccaatgttgtgcacaaggcccagaacaagagcaaggggaaatacaaagctcagcagaccaccaacttcaagaagcagaagaagaacaacaacaatcctaatcaggatgagaggacttgctttgtgtgtggccaagttggtcatctggctaggaagtgtccacagcgcaaggggatgaaggcacctgcagggcagacttctaagtctgctaatgtcgcacggggttccaccgttctaatggggaatgggtcacatgcttctgttcatggtgttggcacggtagatctgaagtttacttcgggaaagatcgtgcagctgaagaacgtgcagcatgtcccttctatcgacaggaatcttgttagtggctcccgtctgactagagacggatttaatttaatcacaccaccagaacaaactgaacatacacatgaacttgtctctgaggaggatgtcagtgaagctcctcgaaggagtaagagacaaaggacggctaagtcttttggtgatgatttcactgtgtacctcgtggatgacactcctaagtcaatttcagaagcatatgcatctcctgatgcagactactggaaggaggctgtcc

SEQ ID NO: 14957 - DNA, 2037 bp, Oryza sativa
  Clone ID: TFbOSC14597j.C1.o3.fg
atggctggttttgccgatgcactgaggccggataaattcaccggtgtgcattttaagagatggcagatcagggtcactctgtggctgacagctatgaaatgcttctgggtgagtactggcaaacctgaaggagttcttactgctgaacagcagaagcaattcgaggaagccactactctctttgtgggatgcattcttagcgttcttggcgatcgtctggtcgaggtgtatatgcatatgaccgacgctaaggagttgtgggatgcactgaatactaaattcggtgctactgatgctagcaatgatctgtatatcatggagcagtttcatgactacaaaatggctgacaaccgttctgtagtcgaacaggctcatgagatacaaaccatggctaaggaactcgaactccttaagtgtgtcttacccgacaaatttgtggccgggtgcattattgcaaaactacctccatcttggaggagtttcggtactgcactcaaacacaagagacaggaatactccgttgaggggttgattgcgtctcttgatgttgaggagaaagctcgggaaaaagatgccgcgtctaagggcgatggtgggcagtctagtgccaatattgtgcacaaggcccagaacaagagcaaggggaaatacaaagctcagcagaccaccaacttcaagaagcagaagaagaacaacaacaatcctaatcaggatgagaggacttgctttgtgtgtggccaagttggtcatctggctaggaagtgtccacagcgcaaggggatgaaggcacctgcagggcagacttctaagtctgctaatgtgaccattggcaacactggagatggaagcgggtatggtaatttacctactgttttttcagttaatcaatctactaattggtgggttgatactggggccaatgtacatgtttgtgctgacatctcattgttttcttcttatcaggtcgcacggggttccaccgtcctaatggggaatgggtcacatgcttctgttcatggtgttggcacggtagatctgaagtttacttcgggaaagatcgtgcagctgaagaacgtgcagcatgtcccttctatcaacaggaatcttgttagtggctcccgtctgactagagacggatttaagttggtttttgagtctaataaagtagtcgtgtctaaacatggatattttattggtaaaggttatgagtgcggaggcctgttccgcttttccctttctgatttctgcaataagtctgtgaaccatatttgtggcagtgtggatgatgaggctaatgtttggcattcacgtttatgtcatattaattttggcttgatgtctcggctttccagcatgtgtttaattcctaagttttccattgtcaaaggttctaagtgccatagttgtgtgcaatcgaagcaacctcgcaagcctcacaaggctgccgaggagagaaacttggcaccactagaactcctacattcagatctttgtgaaatgaatggggtgttgacgaagggtggaaaacgatatttcatgacattgattgatgatgctactagattttgctatgtgtacttgttgaaaacgaaagacgaggctctagactattttaaaatttataaggcagaagttgaaaatcaacttgacagaaagataaaaaggcttaggtctgatcgtggtggagagtttttctcgaacgagtttgacttattctgtgaggaacatggcatcatacatgagaggacgcctccctattctcccgagtctaatgggattgctgaaaggaagaaccgcacactgactgacttggtgaatgccatgttggacaccgcgggactgcctaaggcatggtggggggaggcattgttgacctcaaatcatgtgttaaacagagttcctaacagaaataaggacaaaacaccatatgagatatggattggtagaaaaccatcactttcttatttgcgcacatgggggtgcttggcgaaagtcaatgtaccaataacgaagaagcgcaaacttggacctatgtaa

SEQ ID NO: 14958 - DNA, 3846 bp, Oryza sativa
  Clone ID: TFbOSC15392j.C1.o2.fg
atggctggttttgccggtgcactgaggccggataaattcaccggtgtgcattttaagagatggcagatcagggtcactctgtggctgacagctatgaaatgcttctgggtgagtacgggcaaacctgaaggagttcttactgctgaacagcagaagcaattcgaggaagccactactctctttgtgggatgcattcttagcgttcttggcgatcgtctggtcgaggtgtatatgcatatgaccgacgctaaggagttgtgggatgcactgaatactaaattcggtgctactgatgctagcaatgatctgtatatcatggagcagtttcatgactacaaaatggctgacaaccgttctgtagtcgaacaggctcatgagatacaaaccatggctaaggaactcgaactccttaagtgtgtcttacccgacaaatttgtggccgggtgcattattgcaaaactacctccatcttggaggagtttcggtactgcactcaaacacaagagacaggaatactccgttgaggggttgattgcgtctcttgatgttgaggagaaagctcgggaaaaagatgccgcgtctaagggcgatggtgggcagtccagtgccaatgttgtgcacaaggcccagaacaagagcaaggggaaatacaaagctcagcagaccaccaacttcaagaagcagaagaagaacaacaacaatcctaatcaggatgagaggacttgctttgtgtgtggccaagttggtcatctggctaggaagtgtccacagcgcaaggggatgaaggcacctgcagggcagacttctaagtctgctaatgtgaccattggcaacactggagatggaagcgggtatggtaatttacctactgttttttcagttaatcaatctactaattggtgggttgatactggggccaatgtacatgtttgtgctgacatctcattgttttcttcttatcaggtcgcacggggttccaccgtcctaatggggaatgggtcacatgcttctgttcatggtgttggcacggtagatctaaagtttacttcgggaaagatcgtgcagctgaagaacgtgcagcatgtcccttctatcgacaagaatcttgttagtggctcccgtctgactagagacggatttaagttggtttttgagtctaataaagtagtcgtgtctaaacatggatattttattggtaaaggttatgagtgcggaggcctgttccgcttttccttttctgatttctgcaataagtctgtgaaccatatttgtggcagtgtggatgatgaggctaatgtttggcattcacgtttatgtcatattaattttggcttgatgtctcggctttccagcatgtgtttaattcctaagttttccattgtcaaaggttctaagtgccatagttgtgtgcaatcgaagcaacctcgcaagcctcacaaggctgccgaggagagaaacttggcaccactagaactcctacattcagatctttgtgaaatgaatggggtgttgacgaagggtggaaaacgatatttcatgacattgattgatgatgctactagattttgctatgtgtacttgttgaaaacgaaagacgaggctctagactattttaaaatttataaggcagaagttgaaaatcaacttgacagaaagataaaaaggcttaggtctgatcgtggtggagagtttttctcgaacgagtttgacttattctgtgaggaacatggcatcatacatgagaggacgcctccctattctcccgagtctaatgggattgctgaaaggaagaaccgcacactgactgacttggtgaatgccatgttggacaccgcgggactgcctaaggcatggtggggggaggcattgttgacctcaaatcatgtgttaaacagagttcctaacagaaataaggacaaaacaccatatgagatatggattggtagaaaaccatcactttcttatttgcgcacatgggggtgcttggcgaaagtcaatgtaccaataacgaagaagcgcaaacttggacctaagactgtagactgtgtttttctgggatatgctcatcatagcattgcctatagatttttaatagttaaatccgaggtaccggacatgcatgttggtacaattatggagtctcgtgatgctaccttctttgagagctttttcccaatgaaggatacacatagtggttcgaaccaaccctctgaaataattcccagttcaatcacaccaccagaacaaactgaacatacacatgaacttgtctctgaggaggatgtcagtgaagctcctcgaaggagtaagagacaaaggacggctaagtcttttggtgatgatttcactgtgtacctcgtggatgacactcctaagtcaatttcagaagcatatgcatctcctgatgcagactactggaaggaggctgtccgtagtgaaatggattccattatcgctaacgggacttgggaggtgacagagcaaccctatgggtgtaaacctgtggggtgcaagtgggtgttcaagaagaagcttaggcctgacggtactattgaaaagtacaaggctcggcttgttgctaagggctatactcagaaagaaggcgaagatttctttgacacttactcacctgttgctagattgaccacaattcgtgtgctactttccctagcagcctcacatggtcttctcgttcatcaaatggacgttaagacagcttttcttaatggagagctggatgaggagatctatatggatcaacctgatggctttgcagtcaatgaggcagataaatgtatgtactatcgccatggtgggggtgagggagttattttgtgcttgtatgttgacgacatactgatatttgggacaaaccttgaggtgataaatgaggttaaatcattcttgtctcaaaattttgatatgaaagatttgggagtagctgatgttatcttaaacattaagctaattagaggtgagaatgggattacactcttgcagtcccattatgtggagaagatcttgaatcgctttggctacattgatagtaagccttctccaacaccttatgatcctagcttgttgcttcgcaagaacaagagaattgctaggaatcaactggaatactcccaaatcattggctcgttgatgtacctggctagtgcaactaggcctgatatctcctttgctgtgagcaagttgagccgatttacttctaatccgggagatgatcactggcgtgcgcttgagcgagtaatgcgctatctgaaaggtactgtggaattggggcttcactatactgggtatcctgtggtactggagggttatagtgattctaactggatctctgatgtggatgagatcaaagccactagtggatatgttttcacactggttggtggtgctgtttcatggaggtcttgcaaacagacaattttgacgaggtcaaccatggaagcagagctaacggcactggatactgctactgttgaggcagaatggctgcgtgatctattaatggatctgcctgttgttgaaaaaccggtgccggctatccttatgaactgtgacaatcaaacgacatgtgaaaagacgattgaagtctatcaggaaattaagaaactccggagttataacgttggattacatccaaacagcgagaaacctggcagatcccttcacgaagggactatcacgaaatgtgatagacaatgcatcgaaggagatgggtttgagacccatagcattcttgaaggaactcacctttgtgagcttgactgttggtcacagtctatgaagattttgggtgaatcttctaggaagcttactaaagacctaggagtatga

SEQ ID NO: 14959 - DNA, 3777 bp, Oryza sativa
  Clone ID: TFbOSC16532j.C1.o1.fg
atggctggttttgccgatgcactgaggccggataaattcaccggtgtgcattttaagagatggcagatcagggtcactctgtggctgacagctatgaaatgcttctgggtgagtactggcaaacctgaaggagttcttactgctgaacagcagaagcaatttgaggaagccactactctctttgtgggatgcattcttagcattcttggtgatcgtctggtcgaggtgtatatgcatatgaccgacgctaaggagttgtgggatgcactgaatactaaattcggtgctactgatgctagcaatgatctgtatatcatggagcagtttcatgactacaaaatggctgacaaccgttttgtagtcgaacaggctcatgagatacaaaccatggctaaggaactcgaactccttaagtgtgtcttacccgacaaatttgtggccgggtgcattattgcaaaactacctccatcttggagaagtttcggtactgcactcaaacacaagagacaggaatactccgttgaggggttgatagcgtctcttgatgttgaggagaaagctcgggaaaaagatgccgcgtctaagggcgatggtgggcagtccagtgccaatgttgtgcacaaggcccagaacaagagcaaggggaaatacaaagctcagcagaccaccaacttcaagaagcagaagaagaacaacaacaatcctaatcaggatgagaggacttgctttgtgtgtggccaagttggtcatctggctaggaagtgtccacagcgcaaggggatgaaggcacctgcagggcagacttctaagtctgctaatgtgaccattggcaacactggagatggaagcgggtatggtaatttacctactgttttttcagttaatcaatctactaattggtgggttgatactggggccaatgtacatttttgtgctgacatctcattgttttcttcttatcaggtcgcacggggttccaccgttctaatggggaatgggtcacatgcttctgttcatggtgttggcacggtagatctgaagtttacttcgggaaagatcgtgcagctgaagaacgtgcaacatgtcccttctatcgacaggaatcttgttagtggctcccgtctgactagaaacggatttaagttggtttttgagtctaataaagtagtcgtgtctaaacatggatattttattggtaaaggttatgagtgcggaggcctgtttcgcttttccctttctgatttctgcaataagtctgtgaaccatatttgtggcagtgtggatgatgaggctaatgtttggcattcacgtttatgtcatattaattttggcttgatgtctcggctttccagcatgtgtttaattcctaagttttccattgtcaaaggttctaagtgccatagttgtgtgcaatcgaagcaacctcgcaagcctcacaaggctgccgaggagagaaacttggcaccactagaactcctacattcagatctttgtgaaatgaatggggtgttgacgaagggtggaaaacgatatttcatgacattgattgatgatgctactagattttgctatgtgtacttgttgaaaacgaaagacgaggctctagactattttaaaatttataaggcagaagttgaaaatcaacttgacagaaagataaaaaggcttaggtctgatcgtggtggagagtttttctcgaacgagtttgacttattctgtgaggaacatggcatcatacatgagaggacgcctccctattctcccgagtctaataggattgctgaaaggaagaaccgcacactgactgacttggtgaatgccatgttggacaccgcgggactgcctaaggcatggtggggggaggcattgttgacctcaaatcatgtgttaaacagagttcctaacagaaataaggacaaaacaccatatgagatatggattggtagaaaaccatcactttcttatttgcgcacatgggggtgcttggcgaaagtcaatgtaccaataacgaagaagcgcaaacttggacctaagactgtggactgtgtttttctgggatatgcttatcatagcattgcctatagatttttattagttaaatctgaggtaccggacatgcatgttggtacaattatggagtctcgtgatgctaccttctttgagagctttttcccaatgaaggatacacatagtggttcgaaccaaccctctgaaataattcccagttcaatcacaccaccagaacaaactgaacatacacatgaacttgtctctgaggaggatgtcagtgaagctcctcgaaggagtaagagacaaaggacggctaagtcttttggtgatgatttcactgtgtacctcgtggatgacactcctaagtcaatttcagaagcatatgcatctcctgatgcagactactggaaggaggctgtccgtagtgaaatggattccattatcgctaacgggacttgggaggtgatagagcgaccctatgggtgtaaacctgtggggtacaagtgggtgttcaagaagaagcttaggcctgacggtactattgaaaagtacaaggctcggcttgttgctaagggctatactcagaaagaaggcgaagatttctttgacacttactcacctgttgctagattgaccacaattcgtgtgctactttccctagcacctcacatggtcttctcgttcatcaaatggacgttaagacagcttttcttaatggagagctggatgaggagatctatatggatcaacctgatgggctttgcagtcaatgaggcagataaatgtgtgtactatcgccatggtgggggtgagggagttattttgtgcttgtatgttgacgacatactgatatttgggacaaaccttgaggtgataaatgaggttaaatcattcttgtctcaaaattttgatatgaaagatttgggagtagctgatattatcttaaacattaagctaattagaggtgagaatgggattacactcttgcagtcccattatgtggagaagatcttaaatcgctttggctacattgatagtaagccttctccaacaccttatgatcctagcttgttgcttcgcaagaacaagagaattgctaggaatcaactggaatactcccaaatcattggatcgttgatgtacctggctagtgcaactaggcctgatatctcctttgctgtgagcaagttgagccgatttacctctaatccaggagatgatcactggcgtgcgcttgagcgagtaatgcgctatctgaaaggtactgtggaattggggcttcactatactgggtatcctgcggtactggagggttatagtgattctaactggatctctgatgtggatgagatcaaagccactagtggatatgttttcacactgggtggtggtgctgtttcatggaggtcttgcaaacagaccattttgacgaggtcaaccatggaagcagagctaacggcactggatactgctactgttgaggcagaatggctgcgtgatctattaatggatctgcctgttgttgaaaaaccggtgccggctatccttatgaactgtgacaatcaaacgacatgtgaaaagacgattgaagtctgtcaggaaattaagaaactccggagttataacgttggattacatccaaacagcgagaaacctggcagatcccttcacgaagggactatcacgaaatgtgatagacaatgcatcgaaggagatgggcttgagacccatgtgagttatactatggtggtaacccagtctatgtga

SEQ ID NO: 14960 - DNA, 307 bp, Oryza sativa
  Clone ID: TFbOSC21378j.C1.o19.np
tcattagatctacacatgtaaactacacagtataacatgaacagatcaaatatgcgcaatatattgaacacgtaccgaggtgacgaaaagaccggctgcttggtcgaaacttttcgcaggtgtctacgaaggcacgaaacacgcgagcgaagaggaaggcgagccgtcgcgaacgaacagggagcagtcgcgcgaagcgcttcccaaaaaccttattgccgccttctcccggtgcaggacgtcaaagacagaggttctggagacctgctctcccgatcgctggtgcacgccggcgagcgggatggag

SEQ ID NO: 14961 - DNA, 3252 bp, Oryza sativa
  Clone ID: TFbOSC22414j.C1.o2.fg
atggcggagaggctacggcgaatccgaggcggcggcgccatgctcgtgctcatcctcctcgccgtcgtggcgtcggcgcagcaggagtacgaggtcacctcctcctcgtcctcctcgccgtcgcggcgcggcgcgggcgagggccatcggccgccgccttgggcgcagcaggagtacgacgtcacctccgccgccaccacggactactccatcccgctcgccggcgtgcaccagcgatcgggagagcaggtctccggaacctctgcctttgacgtcctgcaccgggagaaggcggcaataagattaaatcgttatatgtctataatctcaacaatccaaaaaccttattataggcactgtgattttactatggctggttttgccgatgcactgaggccggataaattcaccggtgtgcattttaagagatggcagatcagggtcactctgtggctgacaactatgaaatgcttctgggtgagtactggcaaatctgaaggagttcttactgctgaacagcagaagcaattcgaggaagccactactctctttgtgggatgcattcttagcgttcttggcgatcgtctggtcgaggtgtatatgcatatgaccgacgctaaggagttgtgggatgcactgaatactaaattcggtgctactgatgctagcaatgatctgtatatcatgaagcagtttcatgactacaaaatggcagacaaccgttctgtagtcgaacaggctcatgagatacaaaccatggctaaggaactcgaactccttaagtgtgtcttacccgacaaatttgtggccgggtgcattattgtaaaactacctccatcttggaggagtttcggtactgcactcaaacacaagagacaggaatactccgttgaggggttgattgcgtctcttgatgttgaggagaaagctcgggaaaaagatgccgcgtctaagggcgatggtgggcagtccagtgccaatgttgtgcacaaggcccagaacaagagcaaggggaaatacaaagctcagcagaccaccaacttcaagaagcagaagaagaacaacaacaatcctaatcaggatgagaggacttgctttgtgtgtggccaagttggtcatctggctaggaagtgtccacagcgcaaggggatgaaggcacctgcagggcagacttctaagtctgctaatgtgaccattggcaacactggagatggaagcgggtatggtaatttaccaactgttttttcagttaatcaatctactaattggtgggttgatactggggccaatgtcgcacggggttccaccgtcctaatggggaatgggtcacatgcttctgttcatggtgttggcacggtagatctgaagtttacttcgggaaagatcgtgcagctgaagaacgtgcagcatgtcccttctatcgacaggaatcttgttagtggctcccgtctgactagagacggatttaagttggtttttgagtctaataaagtagtcgtgtctaaacatggatattttattggtaaaggttttgagtgcggaggcctgttccgcttttccctttctgatttctgcaataagtctgtgaaccatatttgtggcagtgtggatgatgaggttaatgtttggcattcacgtttatgtcatattaattttggcttgatgtctcggctttccagcatgtgtttaattcctaagttttccattgtcaaaggttctaagtgccatagttgtgtgcaatcgaagcaacctcgcaagcctcacaaggctgccgaggagagaaacttggcaccactagaactcctacattcagatctttgtgaaatgaatggggtgttgacgaagggtggaaaacgatatttcatgacattgattgatgatgctactagattttgctatgtgtacttgttgaaaacgaaagacgaggctctagactattttaaaatttataaggcagaagttgaaaatcaacttgacagaaagataaaaaggcttaggtctgatcgtggtggagagtttttctcgaacgagtttgacttattctgtgaggaacatggcatcatacatgagaggacgcctccctattctcccgagtctaatgggattgctgaaaggaagaaccgcacactgactgacttggtgaatgccatgttggacaccgcgggactgcctaaggcatggtggggggaggcattgttgacctcaaatcatgtgttaaacagagttcctaatagaaataaggacaaaacaccatatgagatatggattggtagaaaaccatcactttcttatttgcgcacatgggggtgcttggcgaaagtcaatgtaccaataacgaagaagcgcaaacttggacctaagactgtggactgtgtttttctgggatatgctcatcatagcattgcctatagatttttaatagttaaatccgaggtaccggacatgcatgttggtacaattatggagtctcgtgatgctaccttctttgagagctttttcccaatgaaggatacacatagtggttcgaaccaaccctctgaaataattcccagttcaatcacaccaccagaacaaactgaacatacacatgaacttgtctctgaggaggatgtcagtgaagctcctcgaaggagtaagagacaaaggacggctaagtcttttggtgatgatttcactgtgtacctcgtggatgacactcctaagtcaatttcagaagcatatgcatctcctgatgcagactactggaaggaggctgtccgtagtgaaatggattccattatcgctaacgggacttgggaggtgacagagcgaccctatgggtgtaaacctgtggggtgcaagtgggtgttcaagaagaagcttaggcctgacggtactattgaaaagtacaaggctcggcttgttgctaagggctatactcagaaagaaggcgaagatttctttgacacttactcacctgttgctagattgaccacaattcgtgtgctactttccctagcagcctcacatggtcttctcgttcatcaaatggacgttaagacagcttttcttaatggagagctggatgaggagatctatatggatcaacctgatgggtttgtagttgaaggtccctgcgacgcctactgtcacgcccagaaattcccgaatagaattccaagcagaatgtgcattaaaatccccgtccaggaccagccggggtacacaaacgacaatgttgacattcagatccacgtcttacaaacatcataa

SEQ ID NO: 14962 - DNA, 3887 bp, Oryza sativa
  Clone ID: TFbOSC23264j.C1.o7.gm
atgtcgacggcggcggcgtccgagactagcagcgcgagcgcgtggtgggcggcccttgacagcgtcccgtgcgcggagcgacgcatcggccaacgccgccacgggcaacagccgccgccaagcacgcgagtgtcctgctgctgggccgaggcggcggcggtggcggagcaggcggggttgagatggtcgagcgcgcatgaggcagggagcgggagcgggagcgcccgtggaggcggggagcgggagcgacaagcggccacgggcaacaagcagatccacgacgagcgagtgagcgacaaggccgacacgcgattgacgacgaggatgacgagatggcgaagagcggcggggaactggcagctgccgaactcgacggtgtacgccctcgcgaagttggcgccgctcgtcgccagcctcttcttgtcgttcagctcctgcacgatcaatcaatcgatagatggatcagctcatcgaagcaactactccatcccgctcgccggcgtgcaccagcgatcgggagagcaggtctccggaacctctgcctttaacgtcctgcaccgggagaaggcggcaataaggcactgtgattttactatggctggttttgccgatgcactgaggccggataaattcaccggtgtgcattttaagagatggcagatcagggtcactctgtggctgacagctatgaaatgcttctgggtgagtactggcaaacctgaaggagttcttactgctgaacagcagaagcaattcgaggaagccactactctctttgtgggatgcattcttagcgttcttggcgatcgtctggtcgaggtgtatatgcatatgaccgacgctaaggagttgtgggatgcactgaatactaaattcggtgctactgatgctagcaatgatctgtatatcatagagcagtttcatgactacaagatggctgacaaccgttctgtaatcgaacaggctcatgagatacaaaccatggctaaggaactcgaactccgtaagtgtgtcttacccgacaaatttgtggctgggtgcattattgcgaaactaccttcatcttggagaagtttcggtactgcactcaaacacaagagacaggaatactccgttgaggggttgatagcgtctcttgatgttgaggagaaagctcgggaaaaagatgccgcgtctaagggcgatggtggacagtccagtgccaatgttgtgcacaaggcccagaacaagagcaaggggaaatacaaagctcagcagaccaccaacttcaagaagcagaagaagaacaacaacaatcctaatcaggatgagaggacttgctttgtgtgtggccaagttggtcatctggctaggaagtgtccacaacgcaaggggatgaaggcacctgcagggcagacttctaagtctgctaatgtgaccattggcaacactggagatggaagcgggtatggtaatttacctactgtcgcacggggttccaccgtcctaatggggaatgggtcacaagcttctgttcatggtgttggcacggtagatctgaagtttacttcgggaaagatcgtgcagctgaagaacgtgcagcatgtcccttctatcgacaggaatcttgttagtggctcccgtctgactagagacggatttaagttggtttttgagtctaataaagtagtcgtgtctaaacatggatattttattggtaaaggttatgagtgcggaggcctgttccgcttttccctttctgatttctgcaataagtctgtgaaccatatttgtggcagtgtggatgatgaggctaatgtttggcattcacactactggaaggaggctgtccgtagtgaaatggattccattatcgctaacgggacttgggaggtgacagagcgaccctatgggtgtaaacctgtggggtgcaagtgggtgttcaagaagaagcttaggcctgatggctttgcggtcaatgaggcagataaatgtgtgtactatcgccatggtgggggtgagggagttattttgtgcttgtatgttgacgacatactgatatttggaacaaaccttgaggtgataaatgagtcccattatgtggagaagatcttgaatcgctttggctacattgatagtaagccttctccaacaccttatgatcctagcttgttgcttcgcaagaacaagagaattgctaggaatcaactggaatactcccaaatcattggctcgttgatgtacctggctagtgcaactaggcctgatatctcctttgctgtgagcaagttgagccgatttacctctaatccgggagatgatcactggcgtgcgcttgagcgagtaatgcgctatctgaaaggtactgtggaattggggcttcactatactgggtatcctgcggtactggagggttatagtgattctaactggatctctgatgtggatgagatcaaagccactagtggatatgttttcacactgggtggtggtgctgtttcatggaggtcttgcaaacagaccattttgacgaggtcaaccatggaagcagagctaacggcactggatactgctactgttgaggcagaatggctgcgtgatctattaatggatctgcctgttgttgaaaaaccggtgccggctatccttatgaactgtgacaatcaaacggaaattaagaaactccggagttataacgttggattacatccaaacagcgagaaacctggcagatcccttcacgaagggactatcacgaaatgtgataaacaatgcatcgaaggagatgggtttgagacccatgtctccggaacctctgcctttgacgtcctgcaccgggagaaggcggcaataaggtactcgtcgaacacgccggccctggcctgcccggccttgcgcagcggcggaggcggcgatcacggcggcgagacccagcagcgcggcgcgcctgccgccgccctgctcagcttgggcggtgccgcgacgtgcacgcgcttcggcagcgccggcgagccggccgactgcggcaccgccgcggcgggcttgaggccgacaaggctgttgttcactccggccatggctcgattgagctgcgtgcaagcggctgtcaccacctgccgcctacctctgacaaatccgtgggatacacaacaaacaaagctatgggaattgtccaaaacaccctcaaccgtcattgggaaggcatcagcaacgtacacgtggagggccaggatgagggatgcagatctttgtgaagacactcactggcaataccataaggttgagtcctctgacacgattgacaatgtcaaggccaagattcaggacaaggagggtattccacctgaccagcagcgcctcatctttgcgggcaagcaacttgaggacggacgcaccctcgcagattacaacattcagaaagagtccaccctccaccttgtccttcgcctcaggggaggaatgcagatctttgtgaagaccttgacaagaaagacccatcactttggagcgtctttatctttgctggcaagcagcttgaggatggacaaggagggcatccccccggaccagcagcgcctcatcttcgccggcaagcagctcaaggacggacgcaccctggctgactacaatatccagaaggagtctacccttcacctagtgctcaggctcaggggtggaatgcaaatctttgtcaagacattgaccggcaaaaccattaccttggaggttgagtcgtcggacacaattgacaacgtgaaagcaaagattcaggacaaggagggcattcccccggatcagcagcgactgatctttgctggcaagcagctcgaggatggccgcaccttagcaggttacaacatccagaaggagtccaccttgcacctggcgctccgtctccgtggtggcct

SEQ ID NO: 14963 - DNA, 4380 bp, Oryza sativa
  Clone ID: TFbOSC26101j.C1.o4.fg
atggacggaagaggtagggggcggcgggaggtggacctagctgcggcgaccggcggagaggaactgggcgtcagcagcggaagcggagtctcgaaggctggcccccaggcgatgcggaatcgacagcgggagctgcgggaagacggcagccgctgtggccgcccgcgcatggaggagaggtgggagccagagagcgcgagctcctcctcttccgcgacgccaccggcctcaatgctcgatctcaccctcctcgcggcgttagagctccgtctaatattcttgtcgagatccggccagagtagcaccaagcccacgaggccaagctggccatcgtcccgccacagctcgatgagacgatggtgctcctcgattggtgagctcgagccggcggccagatgcagagcggaagaggacgcagagcacgtgctacgacaagtccgcccggcggccggctgtgtccggtgttctgtgttcatgtgcgctcctccatgggggaagccgccccgatctaatgatgcgttcatgctagttttcatctgtaatgtcatgatttatttatggaataaattaaatccttatatgcccataatctcaacaatccaaaaaccttattataggcactgtgattttactatggctggttttgccgatgcactgaggccggataaattcaccggtgtgcattttaagagatggcagatcagggtcactctgtggctgacagctatgaaatgcttctgggtgagtactggcaaacctgaaggagttcttactgctgaacagcagaagcaattcgaggaagccactactctctttgtgggatgcattcttagcgttcttggtgatcgtctggtcgaggtgtatatgcatatgaccgacgctaaggagttgtgggatgcactgaatactaaattcggtgctactgatgctagcaatgatctgtatatcatggagcagtttcatgactacaaaatggctgacaaccgttctgtagtcgaacaggctcatgagatacaaaccatggctaaggaactcgaactccttaagtgtgtcttacccaacaaatttgtggccgggtgcattattgcaaaacttcctccatcttggaggagtttcggtactgcactcaaacacaagagacaggaatactccgttgaggggttgattgcgtctcttgatgttgaggagaaagctcgggaaaaagatgccgcgtctaagggcgatggtgggcagtccagtgccaatgttgtgcacaaggcccagaacaagagcaaggggaaatacaaagctcagcagaccaccaacttcaagaagcagaagaagaacaacaacaatcctaatcaggatgagaggacttgctttgtgtgtggccaagttggtcatctggctaggaagtgtccacaacgcaaggggatgaaggcacctgcagggcagacttctaagtctgctaatgtgaccattggcaacactggagatggaagcgggtatggtaatttacctactgttttttcagttaatcaatctactaattggtgggttgatactggggccaatgtcgcacggggttccaccgtcctaatggggaatgggtcacatgcttctgttcatggtgttggcacggtagatctgaagtttacttcgggaaagatcgtgcagctgaagaacgtgcagcatgtcccttctatcgacaggaatcttgttagtggctcccgtctgactagagacggatttaagttggtttttgagtctaataaagtagtcgtgtctaaacatggatattttattggtaaaggttatgagtgcggaggcctgttccgcttttccctttctgatttctgcaataagtctgtgaaccatatttgtggcagtgtggatgatgaggctaatgtttggcattcacgtttatgtcatattaattttggcttgatgtctcggctttccagcatgtgtttaattcctaagttttccattgtcaaaggttctaagtgccatagttgtgtgcaatcgaagcaacctcgcaagcctcacaaggctgccgaggagagaaacttggcaccactagaactcctacattcagatctttgtgaaatgaatggggtgttgacgaagggtggaaaacgatatttcatgacattgattgatgatgctactagattttgctatgtgtacttgttgaaaacgaaagacgaggctctagactattttaaaatttataaggcagaagttgaaaatcaacttgacagaaagataaaaaggcttaggtctgatcgtggtggagagtttttctcgaacgagtttgacttattctgtgaggaacatggcatcatacatgagaggacgcctccctattctcccgagtctaatgggattgctgaaaggaagaaccgcacactgactgacttggtgaatgccatgttggacaccgcgggactgcctaaggcatggtggggggaggcattgttgacctcaaatcatgtgttaaacagagttcctaacagaaataaggacaaaacaccatatgagatatggattggtagaaaaccatcactttcttatttgcgcacatgggggtgcttggcgaaagtcaatgtaccaataacgaagaagcgcaaacttggacctaagactgtggactgtgtttttctgggatatgctcatcatagcattgcctatagatttttaatagttaaatccgaggatgtcagtgaagctcctcgaaggagtaagagacaaaggacggctaagtcttttggtgatgacttcactgtgtacctcgtggatgacactcctaagtcaatttcagaagcatatgcatctcctgatgcagactactggaaggaggctgtccgtagtgaaatggattccattatcgctaacgggacttgggaggtgacagagcgaccctatgggtgtaaacctgtggggtgcaagtgggtgttcaagaagaagcttaggcctgacggtactattgaaaagtacaaggctcggcttgttgctaagggctatactcagaaagaagacgaagatttctttgacacttactcacctgttgctagattgaccacaattcgtgtgctactttccctagcagcctcacatggtcttctcgttcatcaaatggacgttaagacagtttttcttaatggagagctggatgaggagatctatatggatcaacctgatgggtttgtagttgaaggtcaagaaggcaaagtgtgcaaattgttgaagtctttgtatggtctgaaacaagctcctaagcaatggcatgagaaatttgacaaaacattgacatctgcaggctttgcagtcaatgaggcagataaatgtgtgtactatcgccatggtgggggtgagggagttattttgtgcttgtatgttgacgacatactgatatttgggacaaaccttgaggtgataaatgaggttaaatcattcttgtctcaaaattttgatatgaaagatttgggagtagctgatgttatcttaaacattaagctaattagaggtgagaatgggattactctcttgcagtcccattatgtggagaagatcttgaatcgctttggctacattgatagtaagccttctccaacaccttatgatcctagcttgttgcttcgcaagaacaagagaattgctaggaatcaactggaatactcccaaatcattggctcgttgatgtacctggctagtgcaactaggcctgatatctcctttgctgtgagcaagttgagccgatttacttctaatccgggagatgatcactggcgtgcgcttgagcgagtaatgcgctatctgaaaggtactgtggaattgggacttcactatactgggtatcctgcggtactggagggttatagtgattctaactggatctctgatgtggatgagatcaaagccactagtggatatgttttcacactgggtggtggtgctgtttcatggaggtcttgcaaacagacaattttgacgaggtcaaccatggaagcagagctaacggcactggatactgctactgttgaggcagaatggctgcgtgatctattaatggatctgcctgttgttgaaaaaccggtgccggctatccttatgaactgtgacaatcaaacgacatgtgaaaagacgattgaagtctgtcaggaaattaagaaactccggagttataacgttggattacatccaaacagcgagaaacctggcagatcccttcacgaagggactatcacgaaatgtgatagacaatgcatcgaaggagatgggtttgagacccatagcattcttgaaggaactcacctttgtgagcttgactgttggtcgcagtctatgaagattttgggtgaatcttctaggaagcttactaaagacctaggagtatga

SEQ ID NO: 14964 - DNA, 2655 bp, Oryza sativa
  Clone ID: TFbOSC28278j.C1.o3.gm
atgcccgtgcgttgcaacgggcgacgtgtggcggcggaagtgcttggcgcggtcgtcgggcttctgaacgagcttgacgcaggccagcggcaggaactacatcagttgaaggccaacgactactccatcccgctcgccggcgtgcaccagcgatcgggagagcaggtctccggaacctctgtctttgacgtcctgcaccgggagaaggcggcaataaggcactgtgattttactatggctggttttgccgatgcactgaggccggataaattcaccggtgtgcattttaagagatggcagatcagggtcactctgtggctgacagctatgaaatgcttctgggtgagtactggcaaacctgaaggagttcttactgctgaacagcagaagcaattcgaggaagccactactctctttgtgggatgcattcttagcgttcttggcgatcgtctggtcgaggtgtatatgcatatgaccgacgctaaggagttgtgggatgcactgaatagtaaattcggtgctactgatgctagcaatgatctgtatatcatggagcagtttcatgactacaaaatggctgacaaccgttctgtagtcgaacaggctcatgagatacaagccatggctaaggaactcgaactccttaagtgtgtcttacccgacaaatttgtggccgggtgcattattgcaaaactacctccatcttggaggagtttcggtactgcactcaaacacaagagacaggaatactccgttgaggggttgattgcgtctcttgatgttgaggagaaagctcgggaaaaagatgccgcgtctaagggcgatggtgggcagtccagtgccaatgttgtgcacaaggcccagaacaagagcaaggggaaatacaaagctcagcagaccaccaacttcaagaagcagaagaagaacaacaacaatcctaatcaggatgagaggacttgctttgtgtgtggccaagttggtcatctggctaggaagtgtccacagcgcaaggggatgaaggcacctgcagggcagacttctaagtctgctaatgtgaccattggcaacactggagatggaagcgggtatggtaatttacctactgtcgcacggggttccaccgtcctaatggggaatgggtcacatgcttctgttcatggtgttggcacggtagatctgaagtttacttcggaaaagatcgtgcagctgaagaatgtgcagcatgtcccttctatcgacaggaatcttgttagtggctcccagtctcgtgatgctatcttctttgagagctttttcccaatgaaggatacacatagtggttcgaaccaaccatctgaaataattcctagttcaatcacaccaccagaacaaactgaacatacacatgaacttgtctctgaggaggatgtcagtgaagctcctcgaaggagtaagagacaaaggacggctaagtcttttggtgatgatttcactgtgtacctcgtggatgacactcctaagtcaatttcagaagcatatgcatctcctgatgcagattactggaaggaggctgtccgtagtgaaatggattccattatcgctaacgggacttgggaggtgacagagcgaccctatgggtgtaaacctgtggggtgcaagtgggtgttcaagaagaagcttaggcctgacgcctcacatggtcttctcgttcatcaaatggacgttaagacagcttttcttaatggagagctggatgaggagatctatatggatcaacctgatgggtttgtagttgaaggctttgcagtcaatgaggcagataaatgtgtgtactatcgccatggtgggggtgagggagttattttgtgcttgtatgttgacgacatactgatatttgggacaaaccttgaggtgataaatgagtcccattatgtggagaagatcttgaatcgctttggctacattgatagtaagccttctccaacaccttatgatcctagcttgttgcttcgcaagaacaagagaattgctaggaatcaactggaatactcccaaatcattggctcgttgatgtacctggctagtgcaactaggcctgatatctcctttgctgtgagcaagttgagccgatttacctctaatccgggagatgatcactggcgtgcgcttgagcgagtaatgcgctatctgaaaggtactgtggaattggggcttcactatactgggtatcctgcggtactggagggttatagtgattctaactggatctctgatgtggatgagatcaaagccactagtggatatgttttcacactgggtggtggtgctgtttcatggaggtcttgcaaacagaccattttgacgaggtcaaccatggaagcagagctaacggcactggatactgctactgttgaggcagaatggctgcgtgatctattaatggatctgcctgttgttgaaaaaccggtgccggctatccttatgaactgtgacaatcaaacggccgctgccgccgtccccaaagtcctcatcgccgatgactgctacctctccatgccatctcccatcagctcggctacatcgtcggccacggaatctccacggcctccacatcgacttggaccaggatcctcttcccgtcgcactctgtcggcaccaccgcctgccatccgctga

SEQ ID NO: 14965 - DNA, 299 bp, Oryza sativa
  Clone ID: TFbOSC28278j.C1.o3.np
atggagatccaatatgagcttaattcggatagggatccgaataagagtcctacgggccttggagacccgagtgatggatcctatatatttgtgaggggtgtgaccggcggaggcattgcatcaccatgggagtacggcgaggagaacgcacgaggaggagaaggtcgagccagtgcgatcgactacttcctctacatcgacgcgcgctacttcgcgagagttccttcgacttctcagcgtcttcttccgttgcgcagcgcgtcgagtggtaactgtaattttcttctaactgcaaaggg

SEQ ID NO: 14966 - DNA, 4101 bp, Oryza sativa
  Clone ID: TFbOSC2875j.C1.o7.fg
atgcagcctccttttgtaaccgacccgccgtcttcacgcaatatatgcgaaaatcagtctagggtttgcctcctactctgtactgcgccgtcgctcgtagactactccatcccgctcgccagcgtgcaccagcgatcgggagagcaggtctccggaacctctgcctttgacgtcctgcaccgggagaaggcggcaataaggcattgtgattttactatggctggttttgccgatgcactgaggccggataaattcaccggtgtgcattttaagagatggcagatcagggtcactctgtggctgacagctatgaaatgcttctgggtgagtactggcaaacctgaaggagttcttactgctgaacagcagaagcaattcgaggaagccactactctctttgtgggatgcattcttagcgttcttggcgatcgtctggtcgaggtgtatatgcatatgaccgacgctaaggagttgtgggatgcactgaatactaaattcggtgctactgatgctagcaatgatctgtatatcatggagcagtttcatgactacaaaatggctgacaaccgttctgtagtcgaacaggctcatgagatacaaaccatggctaaggaactcgaactccttaagtgtgtcttacccgacaaatttgtggccgggtgcattattgcaaaactacctccatcttggagaaagctcgggaaaaaagatgccgcgtctaagggcgatggtgggcagtccagtgccaatgttgtgcacaaggcccagaacaagagcaaggggaaatacaaagctcagcagaccaccaacttcaagaagcagaagaagaacaacaacaatcctaatcaggatgagaggacttgctttgtgtgtggccaagttggtcatctggctaggaagtgtccacagcgcaaggggatgaaggcacctgcagggcagacttctaagtctgctaatgtgaccattggcaacactggagatggaagcgggtatggtaatttacctactgttttttcagttaatcaatctactaattggtgggttgatactggggccaatctacatgtttgtgctgacatctcattgttttcttcttatcaggtcgcacggggttccaccgtcctaatggggaatgggtcacatgcttctgttcatggtgttggcacggtagatctgaagtttacttcgggaaagatcgtgcagctgaagaacgtgcagcatgtcccttctatcgacaggaatcttgttagtggctcccgtctgactagagacggatttaagttggtttttgagtctaataaagtagtcgtgtctaaacatggatattttattggtaaaggttatgagtgcggaggcctgttccgcttttccctttctgatttctgcaataagtctgtgaaccatatttgtggcagtgtggatgatgaggctaatgtttggcattcacgtttatgtcatattaattttggcttgatgtctcggctttccagcatgtgtttaattcctaagttttccattgtcaaaggttctaagtgccatagttgtgtgcaatcgaagcaacctcgcaagcctcacaaggctgccgaggagagaaacttggcaccactagaactcctacattcagatctttgtgaaatgaatggggtgttgacgaagggtggaaaacgatatttcatgacattgattgatgatgctactagattttgctatgtgtacttgttgaaaacgaaagacgaggctctagactattttaaaatttataaggcagaagttgaaaatcaacttgacagaaagataaaaaggcttaggtctgatcgtggtggagagtttttctcgaacgagtttgacttattctgtgaggaacatggcatcatacatgagaggacgcctccctattctcccgagtctaatgggattgctgaaaggaagaaccgcacactgactgacttggtgaatgccatgttggacaccgcgggactgcctaaggcatggtggggggaggcattgttgacctcaaatcatgtgttaaacagagttcctaacagaaataaggacaaaacaccatatgagatatggattggtagaaaaccatcactttcttatttgcgcacatgggggtgcttggcgaaagtcaatgtaccaataacgaagaagcgcaaacttggacctaagactgtggactgtgtttttctgggatatgctcatcatagcattgcctatagatttttaatagttaaatccgaggtaccggacatgcatgttggtacaattatggagtctcgtgatgctaccttctttgagagctttttcccaatgaaggatacacatagtggttcgaaccaaccctctgaaataattcccagttcaatcacaccaacagaacaaactgaacatacacatgaacttgtctctgaggaggatgtcagtgaagctcctcgaaggagtaagagacaaaggacggctaagtcttttggtgatgatttcactgtgtacctcgtggatgacactcctaagtcaatttcagaagcatatgcatctcctgatgcagactactggaaggaggctgtccgtagtgaaatggattccattatcgctaacgggacttgggaggtgacagagcgaccctatgggtgtaaacctgtggggtgcaagtgggtgttcaagaagaagcttaggcctgacggtactattgaaaagtacaaggctcggcttgttgctaagggctatactcagaaagaaggcgaagatttctttgacacttactcacctgttgctagattgaccacaattcgtgtgctactttccctagcagcctcacatggtcttctcgttcatcaaatggatgttaagacagcttttcttaatggagagctggatgaggagatctatatggatcaacctgatgggtttgtacttgaaggtcaagaaggcaaagtgtgcaaattgttgaagtctttgtatggtctgaaacaagctcctaagcaatggcatgagaaatttgacaaaacattgacatctgcaggctttgcagtcaatgaggcaaataaatgtgtatactatcgccatggtgggggtgagggagttattttgtgcttgtatgttgacgacatactgatatttgggacaaaccttgaggtgataaatgaggttaaatcattcttgtctcaaaattttgatatgaaagatttgggagtagctgatgttatcttaaacattaagctaattagaggtgagaatgggattacactcttgcagtcccattatgtggagaagatcttgaatcgctttggctacattgatagtaagccttctccaacaccttatgatcctagcttgttgcttcgcaagaacaagagaattgctaggaatcaactggaatactcccaaatcattggctcgttgatgtacctggctagtgcaactaggcctgatatctcctttgctgtgagcaagttgagccgatttacctctaatccgggagatgatcactggcgtgcgcttgagcgagtaatgcgctatctgaaaggtactgtggaattggggcttcactatactgggtatcctgcggtactggagggttatagtgattctaactggatctctgatgtggatgagatcaaagccactagtggatatgttttcacactgggtggtggtgctgtttcatggaggtcttgcaaacagacaattttgacgaggtcaaccatggaagcagagctaacggcactggatattgctactgttgaggcagaatggttgcgtgatctattaatggatctgcctgttgttgaaaaaccagtgccggctatccttatgaactgtgacaatcaaacgacatgtgaaaagacgattgaagtctgtcaggaaattaagaaactccggagttataacgttggattacatccaaacagcgagaaacctggcagatcccttcacgaagggactatcacgaaatgtgatagacaatgcatcgaaggagatgggtttgagacccatagcattcttgaaggaactcacctttgtgagcttgactgttggtcgcagtccatgaagattttgggtgaatcttctaggaagcttactaaagacctaggagtatga

SEQ ID NO: 14967 - DNA, 1005 bp, Oryza sativa
  Clone ID: TFbOSC29687j.C1.o1.fg
atggctggttttgccgatgcactgaggccggataaattcaccggtgtgcattttaagagatggcagatcagggtcactctgtggctgacagctatgaaatgcttctgggtgagtactggcaaacctgaaggagttcttactgctgaacagcagaagcaattcgaggaagccactactctctttgtgggatgcattcttagcgttcttggcgatcgtctggtcgaggtgtatatgcatatgaccgacgctaaggagttgtgggatgcactgaatactaaattcggtgctactgatgctagcaatgatctgtatatcatggagcagtttcatgactacaaaatggctgacaaccgttctgtagtcgaacaggctcatgagatacaaaccatggctaaggaactcgaactccttaagtgtgtcttacccgacaaatttgtggccgggtgcattattgcaaaactaccttcatcttggagaagtttcggtactgcactcaaacacaagagacaggaatactccgttgaggggttgatagcgtctcttgatgttgaggagaaagctcgggaaaaagatgccgcgtctaagggcgatggtgggcagtccagtgccaatgttgtgcacaaggcccagaacaagagcaagggaaaatacaaagctcagcagaccaccaacttcaagaagcagaagaagaacaacaacaatcctaatcaggatgagaggacttgctttgtgtgtggccaagttggtcatctggctaggaagtgtccacagcgcaaggggatgaaggcacctgcagggcagacttctaagtctgctaatgtgaccattggcaacactggagatggaagcggatatggtcgcacggggttccaccgtcctaatggggaatgggtcacatgcttctgttcatggtgttggcacggtagatctgaagtttacttcgggaaagatcgtgcagctgaagaacgtgcagcatgtcccttctatcgacaggaatcttgttag

SEQ ID NO: 14968 - DNA, 856 bp, Oryza sativa
  Clone ID: TFbOSC30492j.C1.o1.fg
atggctggttttgccgatgcactgaggccggataaattcaccggtgtgcattttaagagatggcagatcagggtcactctgtggctgacagctatgaaatgcttctgggtgagtactggcaaacctgaaggagttcttactgctgaacagcagaagcaattcgaggaagccactactctctttgtgggatgcattcttagcgttcttggcgatcgtctggtcgaggtgtatatgcatatgaccgacgctaaggagttgtgggatgcactgaatactaaattcggtgctactgatgctagcaatgatctgtatatcatggagcagtttcatgactacaaaatggctgacaaccgttctgtagtcgaacaggctcatgagatacaaaccatggctaaggaactcgaactccttaagtgtgtcttacccgacaaatttgtggccgggtgcattattgcaaaacttcctccatcttggaggagtttcggtactgcactcaaacacaagagacaggaatactccgttgaggggttgattgcgtctcttgatgttgaggagaaagctcgggaaaaagatgccgcgtctaagggcgatggtgggcagtccagtgccaatgttgtgcacaaggcccagaacaagagcaaggggaaatacaaagctcagcagaccaccaacttcaagaagcagaagaagaacaacaacaatcctaatcaggatgagaggacttgctttgtgtgtggccaagttggtcatctggctaggaagtgtccacaacgcaaggggatgaaggcacctgcagggcagacttctaagtctgctaatgtgaccattggcaacactggagatggaagcgggtatg

SEQ ID NO: 14969 - DNA, 1382 bp, Oryza sativa
  Clone ID: TFbOSC3839j.C1.o1.gm
atgttattgaaaaaattattgctgtctccatctccaatgcagcaatgatatctacaaagaagaggattcctcggacgccacccgccagggaaagggcaccgctggctgggggggcgccgaccgccaaggggagggcgccgcccctcgggggaaaggcgccgctggcctggtggaggatgccacgtctgaggcaccgggcgccgtcggccgggaggtcgccctggctgaggggtaggaagagcggtgccgccgactactccatcccgctcgccggcgtgcaccggcgattgggagagcaggtctccggaacctctgccttcgacgttctgcaccgggagaaggcggcaataaggcactgtgattttactatggctggttttgccgatgcactgaggccggataaattcaccggtgtgcattttaagagatggcagatcagggtcactctgtggctgacagctatgaaatgcttctgggtgagtactggcaaacctgaaggagttcttactgctaaacagcagaagcaattcgaggaagccactactctctttgtgggatgcattcttagcgttcttggcgatcgtctggtcgaggtgtatatgcatatgaccgacgctaaggagttgtgggatgcactgaatactaaattcggtgctactgatgctagcaatgatctgtatatcatggagcagtttcatgactacaaaatggctgacaaccgttctgtagtcgaacaggctcatgagatacaaaccatggctaaggaactcgaactccttaagtgtgtcttacccgacaaatttgtggccgggtgcattattgcaaaactacctccatcttggaggagtttcggtactgcactcaaacacaagagacaggaatactccgttgaggggttgattgcgtctcttgatgttgaggagaaagctcgggaaaaagatgccgcgtctaagggcgatggtgggcagtccagtgccaatgttgtgcacaaggcccagaacaagagcaaggggaaatacaaagctcagcaaaccaccaacttcaagaagcagaagaagaacaacaacaatcctaatcaggatgagaggacttgctttgtgtgtggccaagttggtcatctggctaggaagtgtccacagcgcaaggggatgaaggcacctgcagggcagacttctaagtctgctaatgtgaccattggcaacactggagatggaagcgggtatggtaatttacctactgtcgcacggggttccaccgtcctaatggggaatgggtcacatgcttctgttcatggtgttggcacggtagatctgaagtttacttcgggaaagatcgtgcagctgaagaacgtgcagcatgtcccttctatcgacaggaatctt

SEQ ID NO: 14970 - DNA, 3090 bp, Oryza sativa
  Clone ID: TFbOSC400036j.C1.o96.gm
atggctggttttgccgatgcactgaggccggataaattcaccggtgtgcattttaagagatggcagatcagggtcactctgtggctgacagctatgaaatgcttctgggtgagtactggcaaacctgaaggagttcttactgctgaacagcagaagcaattcgaggaagccactactctctttgtgggatgcattcttagcgttcttggcgatcgtctggtcgaggtgtatatgcatatgaccgacgctaaggagttgtgggatgcactgaatactaaattcggtgctactgatgctagcaatgatctgtatatcatggagcagtttcatgactacaaaatggctgacaaccgttctgtagtcgaacaggctcatgagatacaaaccatggctaaggaactcgaactccttaagtgtgtcttacccgacaaatttgtggccgggtgcattattgcaaaacttcctccatcttggaggagtttcggtactgcactcaaacacaagagacaggaatactccgttgaggggttgattgcgtctcttgatgttgaggagaaagctcgggaaaaagatgccgcgtctaagggcgatggtgggcagtccagtgccaatgttgtgcacaaggcccagaacaagagcaaggggaaatacaaagctcagcagaccaccaacttcaagaagcagaagaagaacaacaacaatcctaatcaggatgagaggacttgctttgtgtgtggccaagttggtcatctggctaggaagtgtccacaacgcaaggggatgaaggcacctgcagggcagacttctaagtctgctaatgtgaccattggcaacactggagatggaagcgggtatggtaatttacctactgtcgcacggggttccaccgtcctaatggggaatgggtcacatgcttctgttcatggtgttggcacggtagatctgaagtttacttcgggaaagatcgtgcagctgaagaacgtacagcatgtcccttctatcgacaggaatcttgttagtggctcccgtctgactagagacggatttaagttggtttttgagtctaataaagtagtcgtgtctaaacatggatattttattggtaaaggttatgagtgcggaggcctgttccgtttttccctttctgatttctgcaataacatgtgtttaattcctaagttttccattgtcaaaggttctaagtgccatagttgtgtgcaatcgaagcaacctcgcaagcctcacaaggctgccgaggagagaaacttggcaccactagaactcctacattcagatctttgtgaaatgaatggggtgttgacgaaggaagttgaaaatcaacttgacagaaagataaaaaggcttaggtctgatcgtggtggagagtttttctcgaacgagtttgacttattctgtgaggaacatggcatcatacatgagaggacgcctccctattctcccgagtctaatgggattgctgaaaggaagaaccgcacactgactgacttggtgaatgccatgttggacaccgcgggactgcctaaggcatgtgaagctcctcgaaggagtaagagacaaaggacggctaagtcttttggtgatgatttcactgtgtacctcgtggatgacactcctaagtcaatttcagaagcatatgcatctcctgatgcagactactggaaggaggctgtccgtagtgaaatggattccattatcgctaacgggacttgggaggtgacagagcgaccctatgggtgtaaacctgtggggtgcaagtgggtgttcaagaagaagcttaggcctgacgcctcacatggtcttctcgttcatcaaatggacgttaagacagcttttcttaatggagagctggatgaggagatctatatggatcaacctgatgggtttgtagttgaaggctttgcagtcaatgaggcagataaatgtgtgtactatcgccatggtgggggtgagggagttattttgtgcttgtatgttgacgacatactgatatttgggacaaaccttgaggtgataaatgagtcccattatgtggagaaaatcttgaatcgctttggctacattgatagtaagccttctccaacaccttatgatcctagcttgttgcttcgcaagaacaagagaattgctaggaatcaactggaatactcccaaatcattggctcgttgatgtacctggctagtgcaactaggcctgatatctcctttgctgtgagcaagttgagccgatttacttctaatccgggagatgatcactggcgtgcgcttgagcgagtaatgcgctatctgaaaggtactgtggaattggggcttcactatactgggtatcctgcggtactggagggttatagtgattctaactggatctctgatgtggatgagatcaaagccactagtggatatgttttcacactgggtggtggtgctgtttcatggagcaaagatgttgtcctgcagagcattcttgaaggaactcacctttgtgagcttgactgttggtcgcagtctatgaagattttggactactccatcccgctcgccggcgtgcaccagcgatcgggagagcaggtctccggaacctctgcctttgacgtcctgcaccgggagaaggcggcaataagagtcctgacatggaatgacgggttctacaacggcgagataaagacaaggaagatagagaacaacctagtgacggagctcacagctgagcagctcctcctacagagaagcgagcaactgagggagctgtacaactctctcctctctggtgagtctgcagaccaacagaggaggaggcctgtcactgcactatcgccggaggatctcggcaacgtagaatggtactacgttgtctgcatgacctacgccttccgccctggacaatgtgtgccaggtaaaagctttgcaagcaatggatgtgcctggctgtgcaacgctcagtctgccgatagcaaagccttcccgcgcaagctcttagccaagaacgcttctattcagacaattgtctgcgttccattcatgactggcgttcttgagcttgggaccactgatccgaaaaccgacaccttctag

SEQ ID NO: 14971 - DNA, 3963 bp, Oryza sativa
  Clone ID: TFbOSC400151j.C1.o72.fg
atggctggttttgccgatgcactgaggccggataaattcaccggtgtgcattttaagagatggcagatcagggtcactctgtggctgacagctatgaaatgcttctgggtgagtactggcaaacctgaaggagttcttactgctgaacagcagaagcaattcgaggaagccactactctctttgtgggatgcattcttagcgttcttggcgatcgtctggtcgaggtgtatatgcatatgaccgacgctaaggagttgtgggatgcactgaatactaaattcggtgctactgatgctagcaatgatctgtatatcatggagcagtttcatgactacaaaatggctgacaaccgttctgtagtcgaacaggctcatgagatacaaaccatggctaaggaactcgaactccttaagtgtgtcttacccgacaaatttgtggccgggtgcattattgcaaaactaccttcatcttggagaagtttcggtactgcactcaaacacaagagacaggaatactccgttgaggggttgatagcgtctcttgatgttgaggagaaagctcgggaaaaagatgccgcgtctaagggcgatggtgggcagtccagtgccaatgttgtgcacaaggcccagaacaagagcaagggaaaatacaaagctcagcagaccaccaacttcaagaagcagaagaagaacaacaacaatcctaatcaggatgagaggacttgctttgtgtgtggccaagttggtcatctggctaggaagtgtccacagcgcaaggggatgaaggcacctgcagggcagacttctaagtctgctaatgtgaccattggcaacactggagatggaagcggatatggtaatttacctactgttttttcagttaatcaatctactaattggtgggttgatactggggccaatgtacatgtttgtgctgacatctcattgttttcttcttatcaggtcgcacggggttccaccgtcctaatggggaatgggtcacatgcttctgttcatggtgttggcacggtagatctgaagtttacttcgggaaagatcgtgcagctgaagaacgtgcagcatgtcccttctatcgacaggaatcttgttagtggctcccgtctgactagagacggatttaagttggtttttgagtctaataaagtagtcgtgtctaaacatggatattttattggtaaaggttatgagtgcggaggcctgttccgtttttccctttctgatttctgcaataagtctgtgaaccatatttgtggcagtgtggatgatgaggctaatgtttggcattcacgtttatgtcatattaattttggcttaatgtctcggctttccagcatgtgtttaattcctaagttttccattgtcaaaggttctaagtgccatagttgtgtgcaatcgaagcaacctcgcaagcctcacaaggctgccaaggagagaaacttggcaccactagaactcctacattcagatctttgtgaaatgaatggggtgttgacgaatggtggaaaacgatatttcatgacattgattgatgatgctactagattttgctatgtgtacttgttgaaaacgaaagacgaggctctagactattttaaaatttataaggcagaagttgaaaatcaacttgacagaaagataaaaaggcttaggtctgatcgtggtggagagtttttctcgaacgagtttgacttattctgtgaggaacatggcatcatacatgagaggacgcctccctattctcccgagtctaatgggattgctgaaaggaagaatcgcacactgactgacttggtgaatgccatgttggacaccgcgggactgcctaaggcatggtggggggaggcattgttgacctcaaatcatgtgtcaaacagagttcctaacagaaataaggacaaaacaccatatgagatatggattggtagaaaaccatcactttcttatttgcgcacatgggggtgcttggcaaaagtcaatgtaccaataacgaagaagcgcaaacttggacctaagactgtggactgtgtttttctgggatatgctcatcatagcattgcctatagatttttaatagttaaatccgaggtaccggacatgcatgttggtacaattatggagtctcgtgattctatcttctttgagagctttttcccaatgaaggatacacatagtggttcgaaccaaccctctgaaataattcccagttcaatcacaccaccagaacaaactgaacatacacatgaacttgtctctgaggaggatgtcagtgaagctcctcgaaggagtaagagacaaaggacggctaaatcttttggtgatgatttcactgtgtacctcgtggatgacactcctaagtcaatttcagaagcatatgcatctcctgatgcagactactggaaggaggctgtccgtagtgaaatggattccattatcgctaacggaacttgggaggtgacagagcgaccctatgggtgtaaacctgtggggtgcaagtgggtgttcaagaagaagcttaggcctgacggtactattgaaaagtacaaggctcggcttgttgctaagggctatactcagaaagaaggcgaagatttctgtgacacttactcacctgttgctagattgaccacaattcgtgtgctactttccctagcagcctcacatggtcttctcgttcatcaaatggacgttaagacagcttttcttaatggagagctggatgaggagatctatatggatcaacctgatgggtttgtagttgaaggtcaagaaggcaaagtgtgcaaattgttgaagtctttgtatggtctgaaacaagctcctaagcaatggcatgagaaatttgacaaaacattgacatctgcaggctttgcagtcaatgaggcagataaatgtgtgtactatcgccatggtgggggtgagggagttattttgtgcttgtatgttgacgacatactgatatttgggacaaaccttgaggtgataaatgaggttaaatcattcttgtctcaaaattttgatatgaaggatttgggagtagctgatgttatcttaaacattaagctaattagaggtgagaatgggattacactcttgcagtcccattatgtggagaagatcttgaatcgctttggctacattgatagtaagccttctccaacaccttatgatcctagcttgttgcttcgcaagaacaagagaattgctaggaatcaactggaatactcccaaatcattggctcgttgatgtacctggctagtgcaactaggcctgatatctcctttgctgtgagcaagttgagccgatttacctctaatccgggagatgatcactggcgtgcgcttgagcgagtaatgcgctatctgaaaggtactgtggaattggggcttcactatactgggtatcctgcggtactggagggttatagtgattctaactggatctctgatgtggatgagatcaaagccactagtagatatgttttcacactgggtggtggtgctgtttcatggaggtcttgcaaacagaccattttgacgaggtcaaccatggaagcagagttaacggcactggatactgctactgttgaggcagaatggctgcgtgatctattaatggatctgcctgttgttgaaaaactggtgccggctatccttatgaactgtgacaatcaaacgacatgtgaaaagacgattgaagtctgtcaggaaattaagaaactccggagttataacgttggattacatccaaacagtgagaaacctggcagatcccttcacgaagggactatcacgaaatgtgatagacaatgcatcgaaggagatgtgtttgagacccatagcattcttgaaagaactcacctttgtgagcttgactgttggtcgcagtctatgaagattttgggtgaatcttctaggaagcttactaaagacctaggagtatga

SEQ ID NO: 14972 - DNA, 3645 bp, Oryza sativa
  Clone ID: TFbOSC400226j.C1.o50.fg
atggctggttttgccgatgcactgaggccggataaattcaccggtgtgcattttaagagatggcagatcagggtcactctgtggctgacagctatgaaatgcttctgggtgagtactggcaaacctgaaggagttcttactgctgaacagcagaagcaattcgaggaagccactactctctttgtgggatgcattcttagcgttcttggcgatcgtctggtcgaggtgtatatgcatatgaccgacgctaaggagttgtgggatgcactgaatactaaattcggtgctactgatgctagcaatgatctgtatatcatggagcagtttcatgactacaaaatggctgacaaccgttctgtagtcgaacaggctcatgagatacaaaccatggctaaggaactcgaactccttaagtgtgtcttacccgacaaatttgtggccgggtgcattattgcaaaactacctccatcttggaggagtttcggtactgcactcaaacacaagagacaggaatactccgttgaggggttgattgcgtctcttgatgttgaggagaaagctcgggaaaaagatgccgcgtctaagggcgatggtgggcagtccagcgccaatgttgtgcacaaggcccagaacaagagcaaggggaaatacaaagctcagcagaccaccaacttcaagaagcagaagaagaacaacaacaatcctaatcaggatgagaggacttgctttgtgtgtggccaagttggtcatctggctaggaagtgtccacagcgcaaggggatgaaggcacctgcagggcagacttctaagtctgctaatgtgaccattggcaacactggagatggaagcgggtatggtaatttacctactgttttttcagttaatcaatctactaattggtgggttgatactggggccaatgtcgcacggggttccaccgtcctaatggggaatgggtcacatgcttctgttcatggtgttggcacggtagatctgaagtttacttcgggaaagatcgtgcagctgaagaacgtgcagcatgtcccttctatcgacaggaatcttgttagtggctcccgtctgactagagacggatttaagttggtttttgagtctaataaagtagtcgtgtctaaacatggatattttattggtaaaggttatgagtgcggaggcctgttccgcttttccctttctgatttctgcaataagtctgtgaaccatatttgtggcagtgtggatgatgaggctaatgtttggcattcacgtttatgtcatattaattttggcttgatgtctcggctttccagtatgtgtttaattcctaagttttccattgtcaaaggttctaagtgccatagttgtgtgcaatcgaagcaacctcgcaagcctcacaaggctgccgaggagagaaacttggcaccactagaactcctacattcagatctttgtgaaatgaatggggtgttgacgaagggtggaaaacgatatttcatgacattgattgatgatgctactagattttgctatgtgtacttgttgaaaacgaaagacgaggctctagactattttaaaatttataaggcagaagttgaaaatcaacttgacagaaagataaaaaggcttaggtctgatcgtggtggagagtttttctcgaacgagtttaacttattctgtgaggaacatggcatcatacatgagaggacgcctccctattctcccgagtctaatgggattgctgaaaggaagaaccgcacactgactgacttggtgaatgccatgttggacaccgcgggactgcctaaggcatggtggggggaggcattgttgacctcaaatcatgtaccagacatgcatgttggtacaattatggagtctcgtgatgctaccttctttgagagctttttcccaatgaaggatacacatagtggttcgaaccaaccctctgaaataattcccagttcaatcacaccaccagaacaaactgaacatacacatgaacttgtctctgaggaggatgtcagtgaagctcctcgaaggagtaagagacaaaggacggctaagtcttttggtgatgatttcactgtgtacctcgtggatgacactcctaagtcaatttcagaagcatatgcatctcctgatgcagactactggaaggaggctgtccgtagtgaaatggattccattatcgctaacgggacttgggaggtgacagagcgaccctatgggtgtaaacctgtggggtgcaagtgggtgttcaagaagaagcttaggcctgacggtactattgaaaagtacaaggctcggcttgttgctaagggctatactcagaaagaaggcgaagatttctttgacacttactcacctgttgctagattgaccacaattcgtgtgctactttccctagcagcctcacatggtcttctcgttcatcaaatggacgttaagacagcttttcttaatggagagctggatgaggagatctatatggatcaacctgatgggtttgtagttgaaggtcaagaaggcaaagtgtgcaaattgttgaagtctttgtatggtctgaaacaagctcctaagcaatggcatgagaaatttgacaaaacattgacatctgcaggctttgcagtcaatgaggcagataaatgtgtgtactatcgccatggtgggggtgagggagttattttgtgcttgtatgttgacgacatactgatatttgggacaaaccttgaggtgataaatgaggttaaatcattcttgtctcagaattttgatatgaaagatttgggagtagctgatgttatcttaaacattaagctaattagaggtgagaatgggattacactcttgcaatcccattatgtggagaagatcttgaatcgctttggctacattgatagtaagccttctccaacaccttatgatcctagcttgttgcttcgcaagaacaagagaattgctaggaatcaactggaatactcccaaatcattggctcgttgatgtacctggctagtgcaactaggcctgatatctcctttgctgtgagcaagttgagccgatttacctctaatccgggagatgatcactggcgtgcgcttgagcgagtaatgcgctatctgaaaggtactgtggaattggggcttcactatactgggtatcctgcggtactggagggttatagtgattctaactggatctctgatgtggatgagatcaaagccactagtggatatgttttcacactgggtggtggtgctgtttcatggaggtcttgcaaacagacaattttgacgaggtcaaccatggaagcagagctaacggcactggatactgctactgttgaggcagaatggctgcgtgatctattaatggatctgcctgttgttgaaaaaccggtgccggctatccttatgaactgtgacaatcaaacagtaattgtcaaagtgaatagttctaaggataatatgaaatcgtctagacatgtgaaaagacgattgaagtctgtcaggaaattaagaaactccggagttataacgttggattacatccaaacagcgagaaacctggcagatcccttcatgaagggactatcacgaaatgtgatagacaatgcatcgaaggagatgggtttgagacccatgtga

SEQ ID NO: 14973 - DNA, 3303 bp, Oryza sativa
  Clone ID: TFbOSC400282j.C1.o49.gm
atggggggatccggccgattcggccggatgcagccgcccgagcgctcgggcgagcaggggcgaacgacatgtgggtcgcgtcacccctctcaccacgaggcgagctcggcggccaggcaaggcgacgccatggaggcgagctcgacggcggcggctagggtgacgcgagctcggcggctagggcaagccggcgacgagagaggagacgagctcggcgacgggagaggagacgagctcggcgacgagaaaggagatgagccggcgacgaccggatctgggagggcaccggcgagagcgagcgacggcggccggggagagaggatacgaggtggcgagggcggcccggaggggaatattccccctagatgccggatggggggatccggccgattcggccggatgcagccgcccgagcgctcgggcgagcaggggcgaacgacatgtgggtcgcgtcacccctctcaccacgaggcgagctcggcggccaggcaaggcgacgccatggaggcgagctcgacggcggcggctagggtgacgcgagctcggcggctagggcaagccggcgacgagagaggagacgagctcggcgacgggagaggagacgagctcggcgacgagaaaggagatgagccggcgacgaccggatctgggagggcaccggcgagagcgagcgacggcggccggggagagaggatacgaggtggcgagtctacctcgtacgcggtacgtcgggtcgccggcagccactactccatcccgctcgccggcgtgcaccggcgatcgggagagcaggtctccggaacctctgccttcgacgtcctgcaccgggagaaggcggcaataagggtcactctgtggctgacagctatgaaatgcttctgggtgagtactggcaaacctgaaggagttcttactgctgaacagcagaagcaattcgaggaagccactactctctttgtgggatgcattcttagcgttcttggcgatcgtctggtcgaggtgtatatgcatatgaccgacgctaaggagttgtgggatgcactgaatactaaattcggtgctactgatgctagcaatgatctgtatatcatggagcagtttcatgactacaaaatggctgacaaccgttctgtagtcgaacaggctcatgagatacaaaccatggctaaggaactcgaactccttaagtgtgtcttacccgacaaatttgtggccgggtgcattattgcaaaactacctccatcttggagaagtttcggtactgcactcaaacacaagagacaggaatactccgttgaggggttgatagcgtctcttgatgttgaggagaaagctcgggaaaaagatgccgcgtctaagggcgatggtgggcagtccagtgccaatgttgtgcacaaggcccagaacaagagcaaggggaaatacaaagctcagcagaccaccaacttcaagaagcagaagaagaacaacaacaatcctaatcaggatgagaggacttgctttgtgtgtggccaagttggtcatctggctaggaagtgtccacagcgcaaggggatgaaggcacctgcagggcagacttctaagtctgctaatgtgaccattggcaacactggagatggaagcgggtatggtaatttacctactgttttctcagttaatcaatctactaattggtgggttgatactggggccaatgtacatgtttgtgctgacatctcattgttttcttcttatcaggtcgcacggggttccaccgtcctaatggggaatgggtcacatgcttctgttcatggtgttggcatggtagatctgaagtttacttcgggaaagatcgtgcagctgaagaacgtgcagcatgtcccttctatcgacaggaatcttgttagtggctcccgtctgactagagacggatttaagttggtttttgagtctaataaagtagtcgtgtctaaacatggatattttattggtaaaggttatgagtgcggaggcctgttccgcttttccctttctgatttctgcaataagtctgtgaaccatatttgtggcaaagttgaaaatcaacttgacagaaagataaaaaggcttaggtctgatcgtggtggagagtttttctcgaacgagtttgacttattctgtgaggaacatggcatcatacatgagaggacgcctccctattctcccgagtctaatgggattgctgaaaggaagaatcgcacactgactgacttggtgaatgccatgttggacaccgcgggactgcctaaggcatgtgaagctcctcgaaggagtaagagacaaaggacggctaagtcttttggtgatgatttcactgtgtacctcgtggatgacactcctaagtcaatttcagaagcatatgcatctcctgatgcaaactactggaaggaggctgtccgtagtgaaatggattccattatcgctaacgggacttgggaggtgacagagcgaccctatgggtgtaaacctgtggggtgcaagtgggtgttcaagaagaagcttaggcctgacgcctcacatggtcttctcgttcatcaaatggacgttaagacagcttttcttaatggagagctggatgaggagatctatatggatcaacctgatgggtttgtagttgaaggctttgcagtcaatgaggcagataaatgtgtgtactatcgccatggtgggggtgagggagttattttgtgcttgtatgttgacgacatactgatatttgggacaaatcttgaggtgataaatgagtcccattatgtggagaagatcttgaatcgctttggctacattgatagtaagccttctccaacaccttatgatcctagcttgttgcttcgcaagaacaagagaattgctaggaatcaactggaatactcccaaatcattggctcgttgatgtacctggctagtgcaactaggcctgatatctcctttgctgtaagcaagttgagccgatttacctctaatccgggagatgatcactggcgtgcgcttgagcgagtaatgcgctatctgaaaggtactgtggaattggggcttcactatactgggtatcctgcggtactggagggttatagtgattctaactggatctctgatgtggatgagatcaaagccactagtggatatgttttcacactgggtggtggtgctgtttcatggagcgaagatgttgtcctgcagagcattcttgaaagaactcacctttgtgagcttgactgttggtcgcagtctataaagattttgggtgaatcttctaggaagcttactaaagacctaggagtatga

SEQ ID NO: 14974 - DNA, 5736 bp, Oryza sativa
  Clone ID: TFbOSC400302j.C1.o22.fg
atggctggttttgccgatgcactgaggccggataaattcaccggtgtgcattttaagagatggcagatcagggtcactctgtggctgacagctatgaaatgcttctgggtgagtactggcaaacctgaaggagttcttactgctgaacagcagaagcaattcgaggaagccactactctctttgtgggatgcattcttagcgttcttggcgatcgtctggtcgaggtgtatatgcatatgaccgacgctaaggagttgtgggatgcactgaatactaaattcggtgctactgatgctagcaatgatctgtatatcatggagcagtttcatgactacaaaatggctgacaaccgttctgtagtcgaacaggctcatgagatacaaaccatggctaaggaactcgaactccttaagtgtgtcttacccgacaaatttgtggccgggtgcattattgcaaaactacctccatcttggaggagtttcggtactgcactcaaacacaagagacaggaatactccgttgaggggttgattgcgtctcttgatgttgaggagaaagctcgggaaaaagatgccgcgtctaagggcgatggtgggcagtccagtgccaatgttgtgcacaaggcccagaacaagagcaaggggaaatacaaagctcagcagaccaccaacttcaagaagcagaagaagaacaacaacaatcctaatcaggatgagaggacttgctttgtgtgtggccaagttggtcatctggctaggaagtgtccacaacgcaaggggatgaaggcacctgcagggcagacttctaagtctgctaatgtgaccattggcaacactggagatggaagcgggtatggtaatttacctactgttttttcagttaatcaatctactaattggtgggttgatactggggccaatgtacatgtttgtgctgacatctcattgttttcttcttatcaggtcgcacggggttccaccgtcctaatggggaatgggtcacatgcttctgttcatggtgttggcacggtagatctgaagtttacttcgggaaagatcgtgcagctgaagaacgtgcagcatgtcccttctatcgacaggaatcttgttagtggctcccgtctgactagagacggatttaagttggtttttgagtctaataaagtagtcgtgtctaaacatggatattttattggtaaaggttatgagtgcggaggcctgttccgcttttccctttctgatttctgcaataagtctgtgaaccatatttgtggcagtgtggatgatgaggctaatgtttggcattcacgtttatgtcatattaattttggcttgatgtctcggctttccagcatgtgtttaattcctaagttttccattgtcaaaggttctaagtgccatagttgtgtgcaatcgaagcaacctcgcaagcctcacaaggctgccgaggagagaaacttggcaccactagaactcctacattcagatctttgtgaaatgaatggggtgttgacgaagggtggaaaacgatatttcatgacattgattgatgatgctactagattttgctatgtgtacttgttgaaaacgaaagacgaggctctagactattttaaaatttataaggcagaggttgaaaatcaacttgacagaaagataaaaaggcttaggtctgatcgtggtggagagtttttctcgaacgagtttgacttattctgtgaggaacatggcatcatacatgagaggacgcctccctattctcccgagtctaatgggattgctgaaaggaagaaccgcacactgactgacttggtgaatgccatgttggacaccgcgggactgcctaaggcatggtggggggaggcattgttgacctcaaatcatgtgttaaacagagttcctaacagaaataaggacaaaacaccatatgagatatggattggtagaaaaccatcactttcttatttgcgcacatgggggtgcttggcgaaagtcaatgtaccaataacgaagaagcgcaaacttggacctaagactgtggactgtgtttttctgggatatgctcatcatagcattgcctatagatttttaatagttaaatccgaggtaccggacatgcatgttggtacaattatggagtctcgtgatgctaccttctttgagagctttttcccaatgaaggatacacatagtggttcgaaccaaccctctgaaataattcccagttcaatcacaccaccagaacaaactgaacatacacatgaacttgtctctgaggaggatgtcagtgaagctcctcgaaggagtaagagacaaaggacggctaagtcttttggtgatgatttcactgtgtacctcgtggatgacactcctaagtcaatttcagaagcatatgcatctcctgatgcagactactggaaggaggctgtccgtagtgaaatggattccattatcgctaacgggacttgggaggtgacagagcgaccctatgggtgtaaacctgtggggtgcaagtgggtgttcaagaagaagcttaggcctgacggtactattgaaaagtacaaggctcggcttgttgctaagggctatactcagaaagaaggcgaagatttctttgacacttactcacctgttgctagattgaccacaattcgtgtgctactttccctagcagcctcacatggtcttctcgttcatcaaatggacgttaagacagcttttcttaatggagagctggatgaggagatctatatggatcaacctgatgggtttgtacttgaaggtcaagaaggcaaagtgtgcaaattgttgaagtctttgtatggtctgaaacaagctcctaagcaatggcatgagaaatttgacaaaacattgacgtttgcaggctttgcagtcaatgaggcagataaatgtgtgtactatcgccatggtgggggtgagggagttattttgtgcttgtatgttgacgacatactgatatttgggacaaacattgaggtgataaatgaggttaaatcattcttgtctcaaaattttgatatgaaagatttgggagtagctgatgttattttaaacattaagctaattagaggtgagaatgggattacactcttgcagtctcattatgtggagaagatcttgaatcgctttggctacattgatagtaagccttctccaacaccttatgatcctagcttgtcgcttcgcaagaacaagagaattgctaggaatcaactggaatactcccaaatcattggctcgttgatgtacctggctagtgcaactaggcctgatatctcctttgctgtgagcaagttgagccgatttacctctaatccgggagatgatcactggcgtgcgcttgagcgagtaatgcgctatctgaaaggtactgtggaattggggcttcactatactgggtatcctgcggtactggagggttatagtgattctaactggatctctgatgtggatgagatcaaagccactagtggatatgttttcacactgggtggtggtgctgtttcatggaggtcttgcaaacagacaattttgacgaggtcaaccatggaagcagagctaacggcactggatactgctactgttgaggcagaatggttgcgtgatctattaatggatctgcctgttgttgaaaaaccggtgccggctatccttatgaactgtgacaatcaaacggtaattgtcaaagtgaataattctaaggataatatgaaatcgtctagacatgtgaaaagacgattgaagtctgtcaggaaattaagaaactccggagttataacgttggattacatccaaacagcgagaaacctggcagatcccttcacgaagggactatcacgaaatgtgatagacaatgcatcgaaggagatgggtttgagacccatatctaatgatgcgttcatgctagttttcatctgtaatgtcatgacttatttatggaataaattaaatcattatatgcccataatctcaacagttctttcacatgacaaaacttgtggttatcaaagctctggacatctacagaagaacaaggaatctggcgatactgaaacagatccattgatgcctatccctgctgatatcgatttgccaatcttggaaaatatgccgaaaactaagaggggtggtgatgatctcgctagaagcttgcataagaacagaaaaacttgcaatggtggaagaactgactcattggcctcaggttgcttgcatggggaccctaatgaggatgtctggactgagctcaatgatgtggttaaatctaatttgtctaaaagtgtcgcgtcgcttagtttgcgcaatggtgtagctgtagaccgccaggggcgtcttacaaagttcctcacttctgcaagtttggtagagcttttggttagagctctcaatgatacaaacaaaaaccatggtgacttagagctcgaagtgtaccatgaaggcaatgaagtatgccagggttatttgactgattttgatttggatcacaatctggccatcgtcgaaatctggactgactttgatgttcatgttggacttctccaacatgcggtggaatttctgccccattgtaaggtaatagctatagggcgtgaaatcactggcaaactgatggccaggagggtgcagttaatggatgatttaagtgtatctgaagatagtgaagatcttgactgtaaaatcaaagaggcttgggaaggtgcaccacttttttcttttgatgggaactttgttggcatgaacctttttttggctatgggaagagcctttttcctgccatggggcactattcagaagcattgggcatccctgcaaaacaagacgggacttccagagtcaaacagtttgaaggtttataggtttggaacaagttccacagctgagaaatctaacagccatccagaagtaaacaacgatattctcgacccggagcagattcatatagactctatgggctatccaaagtttccaacacacatgtttgctgctttctgcaccactaacaactacgctataatgtatctatcaccagatgggatgattttggttaatactttcgaagagactttcggcgatctacgtggtgaaggtgtatggagtaaactcagtaaaaaatcttgttctaacatagaccgcagtgttgtcgcactagcttcattcagtggagagagaaggttttttgcatgcacaggcttttttgttgaatggaatggttctacagttattttgacatcagcaagcttggttagaagttctggcgatgagaacaagattgttgacaacttgaggattgaagtgttgcttccaaacaaacaacgcgtagaagggatgttacagcattgtaatcttcattacaatgttgctctagtcagtgtgggttaccgtgctcttcgcccagcacatggtcagcttgattggtggggcaagagtagtaaggtagtggctgtagggcgttgcttcaagtcaggtgcattgatggctgcaagtggaacggtaaccccctggacaggcacactcgattgcgacttcctcgaacgttcgtcatgtaaaatcacaaaggctgggattggaggccctgttgttactcttgatggggattgtattggtatgaacttctatgatacgagaataggaacccctttcctgtcgtgggaggtgattgttgatattgtagcatcctttgaggaaaaaaggtggccagtgcctatgccatattga

SEQ ID NO: 14975 - DNA, 3894 bp, Oryza sativa
  Clone ID: TFbOSC400397j.C1.o61.fg
atggctagttttgccgatgcactgaggccggataaattcaccggtgtgcattttaagagatggcagatcagggtcactctgtggctgacagctatgaaatgcttctgggtgagtactggcaaacctgaaggagttcttactgctgaacagcagaagcaattcgaggaagccactactctctttgtgggatgcattcttagcgttcttggcaatcgtctggtcgaggtgtatatgcatatgaccgacgctaaggagttgtgggatgcactgaatactaaattcggtgctactgatggtagcaatgatctgtatatcatggagcagtttcatgactacaaaatggctgacaaccgttctgtagtcgaacaggctcatgagatacaaaccatggctaaggaactcgaactccttaagtgtgtcttacccgacaaatttgtggccgggtgcattattgcaaaactacctccatcttggaggagtttcggtactgcactcaaacacaagagacaggaatactccgttgaggggttgattgcgtctcttgatgttgaggagaaagctcgggaaaaagatgccgcgtctaagggcgatggtgggcagtccagtgccaatgttgtgcacaaggcccagaacaagagcaaggggaaatacaaagctcagcagaccaccaacttcaagaagcagaagaagaacaacaacaatcctaatcaggatgagaggacttgctttgtgtgtggccaagttggtcatctggctaggaagtgtccacagcgcaaggggatgaaggcacctgcagggcaaacttctaagtctgctaatgtgaccattggcaacactggagatggaagcgggtatggtaatttacctactgttttttcagttaatcaatctactaattggtgggttgatactggggccaatgtacatgtttgtgctgacatctcattgttttcttcttatcaggtcgcacggggttccaccgtcctaatggggaatgggtcacatgcttctgttcatggtgttggcacggtagatctgaagtttacttcgggaaagatcgtgcagctgaagaacgtgcagcatgtcccttctatcgacaggaatcttgttagtggctcccgtctgactagagacggatttaagttggtttttgagtctaataaagtagtcgtgtctaaacatggatattttattggtaaaggttatgagtgcggaggactgttccgcttttccctttctgatttctgcaataagtctgtgaaccatatttgtggcagtgtggatgatgaggctaatgtttggcattcacgtttatgtcatattaattttggcttgatgtctcggctttccagcatgtgtttaattcctaagttttccattgtcaaaggttctaagtgccatagttgtgtgcaatcaaagcaacctcgcaagcctcacaaggctgccgaggagagaaacttggcaccactagaactcctacattcagatctttgtgaaatgaatggggtgttgacgaagggtggaaaacgatatttcatgacattcattgatgatgctactagattttgctatgtgtacttgttgaaaacgaaagacgaggctctagactattttaaaatttataaggcagaagttgaaaatcaacttgacagaaagataaaaaggcttaggtctgatcgtggtggagagtttttctcgaacgagtttgacttattctgtgaggaacatggcatcatatatgagatgacgcctccctattctcccgagtctaatgggattgctgaaaggaagaatcgcacactgactgacttggtgaatgccatgttggacaccgcgggactgcctaaggcatggtggggggaggcattgttgacctcaaatcatgtgttaaacagagttcctaacagaaataaggacaaaacaccatatgagatatggattggtagaaaaccatcactttcttatttgcgcacatgggggtgcttggcgaaagtcaatgtaccaataacgaagaagcgcaaacttggacctaagactgtggactgtgtttttctgggatatgctcatcatagcattgcctatagatttttaatagttaaatccgaggtaccggacatgcatgttggtacaattatggagtctcgtgatgctatcttctttgagagctttttcccaatgaaggatacacatagtggttcgaaccaaccatttgaaataattcccagttcaatcacaccaccagaacaaactgaacatacacatgaacttgtctctgaggaggatgtcagtgaagctcctcgaaggagtaagagacaaaggacggctaagtcttttggtgatgatttcactgtgtacctcgtggatgacactcctaagtcaatttcagaagcatatgcatctcctgatgcagactactggaaggaggctgtccgtagtgaaatggattccattatcgctaacgggacttgggaggtgatagagcgaccctatgggtgtaaacctgtggggtgcaagtgggtgttcaagaagaagcttaggcctgacggtactattgaaaagtacaaggctcggcttgttgctaagggctatactcagaaagaaggcgaagatttctttgacacttactcacctgttgctagattgaccacaattcgtgtgctactttccctagcagcctcacatggtcttctcgttcatcaaatggacgttaagacagcttttcttaatggagagctggatgaggagatctatatggatcaacctgatgggtttgtagttgaaggtcaagaacgcaaagtgtgcaaattgttgaagtctttgtatggtctaaaacaagctcctaagcaatggcatgagaaatttgacaaaacattgacatctgcaggctttgcagtcaatgaggcagataaatgtgtgtactatcgccatggtgggggtgagggagttattttgtgcttgtatgttgacgacatactgatatttgggacaaaccttgaggtgataaatgaggttaaatcattcttgtctcaaaattttgatatgaaggatttgggagtagctgatgttatcttaaacattaagctaattagaggtgagaatgggattacactcttgcagtcccattatgtggagaagatcttgaatcgctttggctacattgatagtaagccttctccaacaccttatgatcctagcttgttgcttcgcaagaacaagagaattgctaggaatcaactggaatactcccaaatcattggctcgttgatgtacctggctagtgcaactaggcctgatatctcctttgctgtgagcaagttgagccgatttacctctaatccgggagatgatcactggcgtgcgcttgagcgagtaatgcgctatctgaaaggtactgtggaattggggcttcactatactgggtatcctgcggtactggagggttatagtgattctaactggatctctgatgtggatgagatcaaagccactagtggatatgttttcacactgggtggtggtgctgtttcatggaggtcttgcaaacagaccattttgacgaggtcaaccatggaagcagagctaacggcactggatactgctactgttgaggcagaatggctgcgtgatctattaatggatctgcctgttgttgaaaaaccggtgccggctatccttatgaactgtgacaatcaaacgacatgtgaaaagacgattgaagtctgtcaggaaattaagaaactccggagttataacgttggattacatccaaacagcgagaaacctggcagatcccttcacgaagggactatcacgaaatgtgatagacaatgcatcgaaggagatgggtttgagacccatatgagttatactatggtggtaacccagtctatgtga

SEQ ID NO: 14976 - DNA, 3963 bp, Oryza sativa
  Clone ID: TFbOSC400429j.C1.o5.fg
atggctggttttgccgatgcactgaggccggataaattcaccggtgtgcattttaagagatggcagatcagggtcactctgtggctgacagctatgaaatgcttctgggtgagtactggcaaacctgaaggagttcttactgctgaacagcagaagcaattcgaggaagccactactctctttgtgggatgcattcttagcgttcttggcgatcgtctggtcgaggtgtatatgcatatgaccgacgctaaggagttgtgggatgcactgaatactaaattcggtgctactgatgctagcaatgatctgtatatcatggagcagtttcatgactacaaaatggctgacaaccgttctgtagtcgaacaggctcatgagatacaaaccatggctaaggaactcgaactccttaagtgtgtcttacccgacaaatttgtggccgggtgcattattgcaaaactacctccatcttggaggagtttcggtactgcactcaaacacaagagacaggaatactccgttgaggggttgattgcgtctcttgatgttgaggagaaagctcgggaaaaagatgccgcgtctaagggcgatggtgggcagtccagtgccaatgttgtgcacaaggcccagaacaagagcaaggggaaatacaaagctcagcagaccaccaacttcaagaagcagaagaagaacaacaacaatcctaatcaggatgagaggacttgctttgtgtgtggccaagttggtcatctggctaggaagtgtccacaacgcaaggggatgaaggcacctgcagggcagacttctaagtctgctaatgtgaccattggcaacactggagatggaagcgggtatggtaatttacctactgttttttcagttaatcaatctactaattggtgggttgatactggggccaatgtacatgtttgtgctgacatctcattgttttcttcttatcaggtcgcacggggttccaccgtcctaatggggaatgggtcacatgcttctgttcatggtgttggcacggtagatctgaagtttacttcgggaaagatcgtgcagctgaagaacgtgcagcatgtcccttctatcgacaggaatcttgttagtggctcccgtctgactagagacggatttaagttggtttttgagtctaataaagtagtcgtgtctaaacatggatattttattggtaaaggttatgagtgcggaggcctgttccgtttttccctttctgatttctgcaataagtctgtgaaccatatttgtggcagtgtggatgatgaggctaatgtttggcattcacgtttatgtcatattaattttggcttgatgtctcggctttccagcatgtgtttaattcctaagttttccattgtcaaaggttctaagtgccatagttgtgtgcaatcgaagcaacctcgcaagcctcacaaggctgccgaggagagaaacttggcaccactagaactcctacattcagatctttgtgaaatgaatggggtgttgacgaagggtggaaaacgatatttcatgacattgattgatgatgctactagattttgctatgtgtacttgttgaaaacgaaagacgaggctctagactattttaaaatttataaggcagaggttgaaaatcaacttgacagaaagataaaaaggcttaggtctgatcgtggtggagagtttttctcgaacgagtttgacttattctgtgaggaacatggcatcatacatgagaggacgcctccctattctcccgagtctaatgggattgctgaaaggaagaaccgcacactgactgacttggtgaatgccatgttggacaccgcgggactgcctaaggcatggtggggggaggcattgttgacctcaaatcatgtgttaaacagagttcctaacagaaataaggacaaaacaccatatgagatatggattggtagaaaaccatcactttcttatttgcgcacatgggggtgcttggcgaaagtcaatgtaccaataacgaagaagcgcaaacttggacctaagactgtggactgtgtttttctgggatatgctcatcatagcattgcctatagatttttaatagttaaatccgaggtaccggacatgcatgttggtacaattatggagtctcgtgatgctaccttctttgagagctttttcccaatgaaggatacacatagtggttcgaaccaaccctctgaaataattcccagttcaatcacaccaccagaacaaactgaacatacacatgaacttgtctctgaggaggatgtcagtgaagctcctcgaaggagtaagagacaaaggacggctaagtcttttggtgatgatttcactgtgtacctcgtggatgacactcctaagtcaatttcagaagcatatgcatctcctgatgcagactactggaaggaggctgtccgtagtgaaatggattccattatcgctaacgggacttgggaggtgacagagcgaccctatgggtgtaaacctgtggggtgcaagtgggtgttcaagaagaagcttaggcctgacggtactattgaaaagtacaaggctcggcttgttgctaagggctatactcagaaagaaggcgaagatttctttgacacttactcacctgttgctagattgaccacaattcgtgtgctactttccctagcagcctcacatggtcttctcgttcatcaaatggacgttaagacagcttttcttaatggagagctggatgaggagatctatatggatcaacctgatgggtttgtacttgaaggtcaagaaggcaaagtgtgcaaattgttgaagtctttgtatggtctgaaacaagctcctaagcaatggcatgagaaatttgacaaaacattgacatctgcaggctttgcagtcaatgaggcagataaatgtgtgtactatcgccatggtgggggtgagggagttattttgtgcttgtatgttgacgacatactgatatttgggacaaacattgaggtgataaatgaggttaaatcattcttgtctcaaaattttgatatgaaagatttgggagtagctgatgttattttaaacattaagctaattagaggtgagaatgggattacactcttgcagtctcattatgtggagaagatcttgaatcgctttggctacattgatagtaagccttctccaacaccttatgatcctagcttgtcgcttcgcaagaacaagagaattgctaggaatcaactggaatactcccaaatcattggctcgttgatgtacctggctagtgcaactaggcctgatatctcctttgctgtgagcaagttgagccgatttacctctaatccgggagatgatcactggcgtgcgcttgagcgagtaatgcgctatctgaaaggtactgtggaattggggcttcactatactgggtatcctgcggtactggagggttatagtgattctaactggatctctgatgtggatgagatcaaagccactagtggatatgttttcacactgggtggtggtgctgtttcatggaggtcttgcaaacagacaattttgacgaggtcaaccatggaagcagagctatcggcactggatactgctactgttgaggcagaatggttgcgtgatctattaatggatctgcctgttgttgaaaaaccggtgccggctatccttatgaactgtgacaatcaaacgacatgtgaaaagacgattgaagtctgtcaggaaattaagaaactccggagttataacgttggattacatccaaacagcgagaaacctggcagatcccttcacgaagggactatcacgaaatgtgatagacaatgcatcgaaggagatgggtttgagacccatagcattcttgaaggaactcacctttgtgagcttgactgttggtcgcagtccatgaagattttgggtgaatcttctaggaagcttactaaagacctaggagtatga

SEQ ID NO: 14977 - DNA, 3963 bp, Oryza sativa
  Clone ID: TFbOSC400522j.C1.o21.fg
atggctggttttgccgatgcactgaggccggataaattcaccggtgtgcattttaagagatggcagattagggtcactctgtggctgacagctatgaaatgcttctgggtgagtactggcaaacctgaaggagttcttactgctgaacagcagaagcaattcgaggaagccactactctctttgtgggatgcattcttagcgttcttggcgatcgtctggtcgaggtgtatatgcatatgaccgacgctaaggagttgtgggatgcactgaatactaaattcggtgctactgatgctagcaatgatctgtatatcatggagcagtttcatgactacaaaatggctgacaaccgttctgtagtcgaacaggctcatgagatacaaaccatggctaaggaactcgaactccttaagtgtgtcttacccgacaaatttgtggccgggtgcattattgcaaaactacctccatcttggaggagtttcggtactgcactcaaacacaagagacaggaatactccgttgaggggttgattgcgtctcttgatgttgaggagaaagctcgggaaaaagatgccgcgtctaagggcgatggtgggcagtccagtgccaatgttgtgcacaaggcccagaacaagagcaaggggaaatacaaagctcagcagaccaccaacttcaagaagcagaagaagaacaacaacaatcctaatcaggatgagaggacttgctttgtgtgtggccaagttggtcatctggctaggaagtgtccacaacgcaaggggatgaaggcacctgcagggcagacttctaagtctgctaatgtgaccattggcaacactggagatggaagcgggtatggtaatttacctactgttttttcagttaatcaatctactaattggagggttgatattggggccaatgtacatgtttgtgctgacatctcattgttttcttcttatcaggtcgcacggggttccaccgtcctaatggggaatgggtcacatgcttctgttcatggtgttggcacggtagatctgaagtttacttcgggaaagatcgtgcagctgaagaacgtgcagcatgtcccttctatcgacaggaatcttgttagtggctcccgtctgactagagacggatttaagttggtttttgagtctaataaagtagtcgtgtctaaacatggatattttattggtaaaggttatgagtgcggaggcctgttccgcttttccctttctgatttctgcaataagtctgtgaaccatatttgtggcagtgtggatgatgaggctaatgtttggcattcacgtttatgtcatattaattttggcttgatgtctcggctttccagcatgtgtttaatttctaagttttacattgtcaaaggttctaagtgccatagttgtgtgcaatcgaagcaacctcgcaagcctcacaaggctgccgaggagagaaacttggcaccactagaactcctacattcagatctttgtgaaatgaatggggtgttgacgaagggtggaaaacgatatttcatgacattgattgatgatgctactagattttgctatgtgtacttgttgaaaacgaaagacgaggctctagactattttaaaatttataaggcagaagttgaaaatcaacttgacagaaagataaaaaggcttaggtctgatcgtggtggagagtttttctcgaacgagtttgacttattctgtgaggaacatggcatcatacatgagaggacgcctccctattctcccgagtctaatgggattgctgaaaggaagaaccgcacactgactgacttggtgaatgccatgttggacaccgcgggactgcctaaggcatggtggggggaggcattgttgacctcaaatcatgtgttaaacagagttcctaacagaaataaggacaaaacaccatatgagatatggattggtagaaaaccatcactttcttatttgcgcacatgggggtgcttggcgaaagtcaatgtaccaataacgaagaagcgcaaacttggacctaagactgtggactgtgtttttctaggatatgctcatcatagcattgcctatagatttttaatagttaaatccgaggtaccggacatgcatgttggtacaattatggagtctcgtgatgctaccttctttgagagctttttcccaatgaaggatacacatagtggttcgaaccaaccctctgaaataattcccagttcaatcacaccaccagaacaaactgaacatacacatgaacttgtctctgaggaggatgtcagtgaagctcctcgaaggagtaagagacaaaggacggctaagtcttttggtgatgatttcaccgtgtacctcgtggatgacactcctaagtcaatttcagaagcatatgcatctcctgatgcagactactggaaggaggctgtccgtagtgaaatggattccattatcgctaacgggacttgggaggtgacagagcgaccctatgggtgtaaacctgtggggtgcaagtgggtgttcaagaagaagcttaggcctgacggtactattgaaaagtacaaggctcggcttgttgctaagggctatactcagaaagaaggcgaagatttctttgacacttactcacctgttgctagattgaccacaattcgtgtgctactttccctagcagcctcacatggtcttctcgttcatcaaatggacgttaagacagcttttcttaatggagagctggatgaggagatctatatggatcaacctgatgggtttgtagttgaaggtcaagaaggcaaagtgtgcaaattgttgaagtctttgtatggtctgaaacaagctcctaagcaatggcatgagaaatttgacaaaacattgacatctgcaggctttgcagtcaatgaggcagataaatgtgtgtactatcgccatggtgggggtgagggagttattttgtgcttgtatgttgacgacatactgatatttgggacaaaccttgaggtgataaatgaggttaaatcattcttgtctcaaaattttgatatgaaagatttgggagtagctgatgttatcttaaacattaagctaattagaggtgagaatgggattactctcttgcagtcccattatgtggagaagatcttgaatcgctttggctacattgatagtaagccttctccaacaccttatgatcctagcttgttgcttcgcaagaacaagagaattgctaggaatcaactggaatactcccaaatcattggctcgttgatgtacctggctagtgcaactaggcctgatatctcctttgctgtgagcaagttgagccgatttacttctaatccgggagatgatcactggcgtgcgcttgagcgagtaatgcgctatctgaaaggtactgtggaattggggcttcactatactgggtatcctgcggtactggagggttatagtgattctaactggatctctgatgtggatgagatcaaagccactagtggatatgtattcacactgggtggtggtgctgtttcatggaggtcttgcaaacagacaattttgacgaggtcaaccatggaagcagagctaacggcactggatactgctactgttgaggcagaatggctgcgtgatctattaatggatctgcctgttgttgaaaaaccggtgccggctatccttatgaactgtgacaatcaaacgacatgtgaaaagacgattgaagtctgtcaggaaattaagaaactccggagttataacgttggattacatccaaacagcgagaaacctggcagatcccttcacgaagggactatcacgaaatgtgatagacaatgcatcgaaggagatgggtttgagacccatagcattcttgaaggaactcacctttgtgagcttgactgttggtcgcagtctatgaagattttgggtgaatcttctaggaagcttactaaagacctaggagtatga

SEQ ID NO: 14978 - DNA, 3963 bp, Oryza sativa
  Clone ID: TFbOSC400522j.C1.o35.fg
atggctggttttgccgatgcactgaggccggataaattcaccggtgtgcattttaagagatggcagatcagggtcactctgtggctgacagctatgaaatgcttctgggtgagtactggtaaacctgaaggagttcttactgctgaacagcagaagcaattcgaggaagccactactctctttgtgggatgcattcttagcggtcttggcgatcgtctggtcgaggtgtatatgcatatgaccgacgctaaggagttgtgggatgcactgaatactaaattcggtgctactgatgctagcaatgatctgtatatcatggagcagtttcatgactacaaaatggctgacaaccgttctgtagtcgaacaggctcatgagatacaaaccatggctaaggaactcgaactccttaagtgtgtcttacccgacaaatttgtggccgggtgcattattgcaaaactacctccatcttggaggagtttcggtactgcactcaaacacaagagacaggaatactccgttgaggggttgattgcgtctcttgatgttgaggagaaagctcgggaaaaagatgccgcgtctaagggcgatggtgggcagtccagtgccaatgttgtgcacaaggcccagaacaagagcaaggggaaatacaaagctcagcagaccaccaacttcaagaagcagaagaagaataacaacaatcctaatcaggatgagaggacttgctttgtgtgtggccaagttggtcatctggctaggaagtgtccacaacgcaaggggatgaaggcacctgcagggcagacttctaagtctgctaatgtgaccattggcaacactggagatggaagcgggtatggtaatttacctactgttttttcagttaatcaatctactaattggtgggttgatactggggccaatgtacatgtttgtgctgacatctcattgttttcttcttatcaggtcgcacggggttccaccgtcctaatggggaatgggtcacatgcttctgttcatggtgttggcacggtagatctgaagtttacttcggaaaagatcgtgcagctgaagaacgtgcagcatgtcccttctatcgacaggaatcttgttagtggctcccgtctgactagagacggatttaagttggtttttgagtctaataaagtagtcgtgtctaaacatggatattttattggtaaaggttatgagtgcggaggcctgttccgcttttccctttctgatttctgcaataagtctgtgaaccatatttgtggcagtgtggatgatgaggctaatgtttggcattcacgtttatgtcatattaattttggcttgatgtctcggctttccagcatgtgtttaattcctaagttttccattgtcaaaggttctaagtgccatagttgtgtgcaatcgaagcaacctcgcaagcctcacaaggctgccgaggagagaaacttggcaccactagaactcctacattcagatctttgtgaaatgaatggggtgttgacgaagggtggaaaacgatatttcatgacattgattgatgatgctactagattttgctatgtgtacttgttgaaaacgaaagacgaggctctagactattttaaaatttataaggcagaagttgaaaatcaacttgacagaaagataaaaaggcttaggtctgatcgtggtggagagtttttctcgaacgagtttgacttattctgtgaggaacatggcatcatacatgagaggacgcctccctattctcccgagtctaatgggattgctgaaaggaagaaccgcacactgactgacttggtgaatgccatgttggacaccgcgggactgcctaaggcatggtggggggaggcattgttgacctcaaatcatgtgttaaacagagttcctaacagaaataaggacaaaacaccatatgagatatggattggtagaaaaccatcactttcttatttgcgcacatgggggtgcttggcgaaagtcaatgtaccaataacgaagaagcgcaaacttggacctaagactgtggactgtgtttttctgggatatgctcatcatagcattgcctatagatttttaatagttaaatccgaggtaccggacatgcatgttggtacaattatggagtctcgtgatgctaccttctttgagagctttttcccaatgaaggatacacatagtggttcgaaccaaccctctgaaataattcccagttcaatcacaccaccagaacaaactgaacatacacatgaacttgtctctgaggaggatgtcagtgaagctcctcgaaggagtaagagacaaaggacggctaagtcttttggtgatgatttcactgtgtacctcgtggatgacactcctaagtcaatttcagaagcatatgcatctcctgatgcagactactggaaggaggctgtccgtagtgaaatggattccattatcgctaacgggacttgggaggtgacagagcgaccctatgggtgtaaacctgtggggtgcaagtgggtgttcaagaagaagcttaggcctgacggtactattgaaaagtacaaggctcggcttgttgctaagggctatactcagaaagaaggcgaagatttctttgacacttactcacctgttgctagattgaccacaattcgtgtgctactttccctagcagcctcacatggtcttctcgttcatcaaatggacgttaagacagcttttcttaatggagagctggatgaggagatctatatggatcaacctgatgggtttgtagttgaaggtcaagaaggcaaagtgtgcaaattgttgaagtctttgtatggtctgaaacaagctcctaagcaatggcatgagaaatttgacaaaacattgacatctgcaggctttgcagtcaatgaggtagataaatgtgtgtactatcgccatggtgggggtgagggagttattttgtgcttgtatgttgacgacatactgatatttgggacaaaccttgaggtgataaatgaggttaaatcattcttgtctcaaaattttgatatgaaagatttgggagtagctgatgttatcttaaacattaagctaattagaggtgagaatgggattactctcttgcagtcccattatgtggagaagatcttgaatcgctttggctacattgatagtaagccttctccaacaccttatgatcctagcttgttgcttcgcaagaacaagagaattgctaggaatcaactggaatactcccaaatcattggctcgttgatgtacctggctagtgcaactaggcctgatatctcctttgctgtgagcaagttgagccgatttacttctaatccgggagatgatcactggcgtgcgcttgagcgagtaatgcgctatctgaaaggtactgtggaattggggcttcactatactgggtatcctgcggtactggagggttatagtgattctaactggatctctgatgtggatgagatcaaagccactagtggatatgttttcacactgggtggtggtgctgtttcatggaggtcttgcaaacagacaattttgacgaggtcaaccatggaagcagagctaacggcactggatactgctactgttgaggcagaatggctgcgtgatctattaatggatctgcctgttgttgaaaaaccggtgccggctatccttatgaactgtgacaatcaaacgacatgtgaaaagacgattgaagtctgtcaggaaattaagaaactccggagttataacgttggattacatccaaacagcgagaaacctggcagatcccttcacgaagggactatcacgaaatgtgatagacaatgcatcgaaggagatgggtttgagacccatagcattcttgaaggaactcacctttgtgagcttgactgttggtcgcagtctatgaagattttgggtgaatcttctaggaagcttactaaagacctaggagtatga

SEQ ID NO: 14979 - DNA, 4824 bp, Oryza sativa
  Clone ID: TFbOSC400525j.C1.o60.fg
atggcgctgcgcctcgctgccgtaccagagagcgccgccgccgacctgagcgccgccgccaataccctgccgtgcatctcctaccgcgactcgatccggagcgtcgccgccgtcgtctccggcggccgagggcctctcttccagtccgaagattccgcctccacctggtcgtcttcctcctacgcgtccgactgctccggccactcctccggcgtctccgccgccgcggccgctggcttcagggcactcacggcgcacgagctcagggaggtcgcgcgtcgcatggtcgccgacggctacgcccagcgcatggtccaagcgttcgacgacgcggcgacggtcgaggtcctcgagggggagatgttagccgattgtaggttagatgacgatattgccaaagattatgaggcgcgagcggctgtgcgggaagcgcgcgcggcgcgtgaggaagcagaggcgcggctgcaggtagccacgagggcggcacgtctcgtggcagcagaagctgaagcagcacgcaccgcggaggccgccaggcaggctgcagctgctgctgctactttgcgagctgaggaggaggaggagcgacgtgacctggagctgacagacgcggcccgcgtgcgacgcgacgcggaccgggatcgacacataggccgacgtgatcgcgacttcagcccccatcgcagaggatcagatctccaccgcggtgaggaggagcggcgcgatccatggcgcgatcctcgaatcaaccgcgctctggagacccagcgactccgggagcaggcagcggcgattgaggcacaactggacttcgaccgggagcagggtggacgagacgttggcgcacggagccctcgcaggcagcgcgcctccccttccccggaccggcgccgtggtcgccgtggacgctccggctctcctcccgttgtgcagatcgtcgtcaaggatgttggcggcgcatggcccatgctcaccaagactaactacgccgagtgggcgatggtgatgaaggtgaagttgcaggcgcgccacatgtgggacgcggttcgatacggcgacgtcgactacggggaagatcggcgggcgttggagcggttggcgcagctcggcgacaccaccatcgatgaggagagagccgtggagaagctcctttgcgtcgtccccgagaagtacacgcagctggctctgtcgatcgagacgctgctggacttcaccgagctcacgaacgaagaggtgacaggtcgcctcaaggccgtcgacaaccgcaagcagctacctccctcagagccgatcaccattggtggcaagcttttcttcaccaaggagaagtggctcgcccgccaacaagagcggaagaagggggaggccacaagctcttcggcttcgggatcgtcgagcagccgcaagcgtcgaccacgcaagtgggagaaggcgcgtagtggcgctcttggcggcgccgatggcgagcgcaagggcagccgcaacgacacctgccacaactgcgggaagaccggccactgggccaaggactgccggcaggcgaagcacggcggtcaagcacacgtcgctcaagcgcaggagggtgatgaggtggctctgtttttcgtacacggaagcatcgagccacacttcactcccacaccggacgctaccgcgcccctccacctcgacgagctgtgggcccacgtcttcctcagcaacggatcctgcgacgacaagatcgacgggtggtgcctcgacactggtgccactcaccacatgaccgggcgacgggaattcttctccaagcttgactccagtgttcaaggctccgtcaagtttgaggacgcctcagccgtggagatcaagggcgtcggctccatcctcttcaccaccaagaccggcgagcaccggctgctcaccggtgtctactacatccccgcgctgaggaactccatcatcagtttgggacaactggatgagaacggcttgctcgtggagatagaggacggggtcttgcgggtttgggatcgccatcgtcgccttctcgtcaaggtgaacaggggtgccaaccgcctctatgttctccatgtacaggtggcgcagcccgtgtgccttgcagcccgccgcgacgatgatgcatggcggtggcacgagcgctttgggcacctcaacttcgaggccttgaagcagctcagcaacaaggagatggtgcagggcatgccacgagtcgagcacgtggagcagttttgcgacacctgcgtcctcaccaagcagcggcgactcccctttccccgccaagcaagtttctgcgccaaggagaagttggagctcgtgcacggcgacctctgcggtcccgtgactccggccacacctggaggccggcgcttcttcctgctgctcgtcgacgacgtgtcctgctacatgtgggtggtcctgctcgactccaaggcagtggctgcagacgccatcaagcaccatcaagttgctgcggagaaggagtgcggccgcaagcttcgggtgctacacaccgacaacggtggcgagttcacgacggctgagttcgcagcgtactgcgccgacgagaggatccagcgccacttctccgcgccatacaccccgcagcagaacggcgttgtggagcgccgcaaccagacagtggtggccactgcccgcgccctcctcaagcaaagagggatgccggcaatctactggggggaggcggtgatgactgccgtccatctcctcaaccgctcgcccaccaaggcccttgatggcaagacgtcgtacgaggcctggcacgggcgcaagccggtggtgagccacctccgcgtctttggctgtctcgccttcgccaaggagctcaaccacgtcggcaagctcaacgaccggagctcgccgggagtcttcatcggctatgcggagggtgtcaaggcctaccgcatcctcgacccttcgacgcagcacgtccgcatttctcgggacgtcgtgttcgacgaagggcgaggttgggcttcgtacaaggcggtggacgacggctcgacttcgactctcagagacttcgtcgtcgactacgtccactttagggcagccgggggagctagcagctcatcttcaccgagctcgtccacctcggcacccggctcgccatcagctccggcgagtcctctaccacctacaccaccagcaactcctccatcaccagctacgccccgctctcctacaccggcgcccacaccaccggtggagttcgccactccgttgtccaacgacgaggatcgtgttgatgcgtaccacgacgacgagcctctgcgctaccgcaccatggacaacatcttcggtgatcagcccgtccctggactggagacgcgcgacttcgaggccgagttgcacctggcgcatgaggacggcgagccctgctccttcgcagaggcgaatggagatgtggcatggcgcactgcgatgcagcacgagatggacgcggtcgagcggaactggacgtgggtgttggcagatcttcctgccagccaccgcgccatcacccttaagtgggtctacaagctcaagaaggatgaggccggggcggtgatcaagcacaaggcacgtctagtggcgcgcggcttcgttcagcaggagggagtcgactttgacgacgccttcgcgcccgttgcgcgaatggagtctgttcgtctgctcctcgcgctggcagcccaggaaggatggcgtgtgcaccacatggatgtcaagtccgccttcctcaacggagacctgaaggaggaggtctacgtccaccagccgccgggattcgtcatccccggcaaggagaacaaggttctccgcctgcgcaaggccctctacggcttgcggcaggccctctacgccaagctggactccactctcaagcaaatggggttccagcagaactctcacgaagctgctgtctaccagcggggcaaggacggcaatgccctgttggtaggcgtctacgtcgacgacttggtgatcaccggcaccaaggaggctgaggtggaggcgtttaaggaggagatgaaggcgactttccagatgagcgatttgggccttctctctttctacctggggatcgaggtccaccaggacagctctggcatctcccttcgccaaaccgcctacgccaagtgcatcgtcgagttgggcgggctcaccggctgcaacccagcctacactcccatggaggaaaggttgaagctgagccgcgacagcacggctgaggaggtcgacgccacgcagtaccggcatattgtgggcagccttcgctacctcgtccacacgcggccagacttggcatttgctgttggctatgtcagccggttcatgcagcgaccgacgacagagcaccagcaggctgtcacgtcgagggcaccaccgactacggctttcactacccgaggtgtcccgtgcctgatcagctggcagtcggtcaagcaacaagtggtggccctgtctagttgcgaggcagagtacatcgctaccacaaccgcctcaactcaagctctctggttggctcggctgctgggtgatctcttgggcagaaacactgaagcagtggagctcaggatggacagcaagtccgctttggccttggcaaagaatcccgtcttccatgagcgcagcaagcacatccgcatcaagtatcatttcattcggagctgcttggaggaggggagcatcaaggccagctacattaacacccaggatcagctcgccgatcttctcaccaagtcccttgggcgggtcaagttccaggagtttcgcgccaggattggaatggttcaaattccccaaaaggcgccacacatgacttag

SEQ ID NO: 14980 - DNA, 1932 bp, Oryza sativa
  Clone ID: TFbOSC400758j.C1.o21.gm
atgtcggacaaaaccgaggctggtattggaggagctgtcatttgtgctttcttcttgacgagcagtccagtgtggagcaatagcagaggccctcacatcgcgtgcatgttgggagggctcggcgccagccagcgtccgaatggactagagaaatgcctgtgtgtttattgcatcaaactgctcgatagtgcttcatttgcttgctacaacacaggaaaaccgatccaggtggtgcggtgctatagcagaaaaccaaatatcattgccaaattggaagaggactactccatcccgctcgccggcgtgcaccagcgatcgggagagcaggtctccggaacctctgcctttgacgtcctgcactgggagaaggcggcaataaggcactgtgattttactatggctggttttgccgatgcactgaggccggataaattcaccggtgtgcattttaagagatggcagatcagggtcactctgtggctgacagctatgaaatgcttctgggtgagtactggcaaacctgaaggagttcttactgctgaacagcagaagcaattcgaggaagccactactctctttgtgggatgcattcttagcgttcttggcgatcgtctggtcgaggtgtatatgcatatgaccgacgctaaggagttgtgggatgcactgaatactaaattcggtgctactgatgctagcaatgatctgtatatcatggagcagtttcatgactacaagatggctgacaaccgttctgtagtcgaacaggctcatgagatacaaaccatggctaaggaactcgaactccttaagtgtgtcttacccgacaaatttgtggctgggtgcattattgcgaaactacctccatcttggagaagtttcggtactgcactcaaacacaagagacaggaatactccgttgaggggttgatagcgtctcttgatgttgaggagaaagctcgggaaaaagatgccgcgtctaagggcgatggtgggcagtccagcgccaatgttgtgcacaaggcccagaacaagagcaaggggaaatacaaagctcagcagaccaccaacttcaagaagcagaagaagaacaacaacaatcctaatcaggatgagaggacttgctttgtgtgtggccaagttggtcatctggctaggaagtgtccacagcgcaaggggatgaaggcacctgcagggcagacttctaagtctgctaatgtgaccattggcaacactggagatggaagcgggtatggtaatttacctactgtcgcacggggttccaccgtcctaatggggaatgggtcacatgcttctgttcatggtgttggcacggtagatctgaagtttacttcgggaaagatcgtgcagctgaagaacgtgcagcatgtcccttctatcgacaggaatcttgatacacatagtggttcgaaccaaccctctgaaataattcccagttcaatcacaccaccagaacaaattgaacatacacatgaacttgtctctgaggaggatgtcagtgaagctcctcgaaggagtaagagacaaaggacggctaagtcttttggtgatgattttactgtgtacctcgtggatgacactcctaagtcaatttcagaagcatatgcatctcctgatgcagactactggaaggaggctgtccgtagtgaaatggattccattatcgctaacgggacttgggaggtgacagagcaaccctatgggtgtaaacctgtggggtgcaagtgggtgttcaagaagaagcttaggcctgacgactactccatcccgctcgccggcgtgcaccagcgatcgggagagcaggtctccggaacctctgcctttgacgtcctgcactgggagaaggcggcaataaggcaacattcaatgaccggatttggttcctgtgcagtccttactatgactgcaacttag

SEQ ID NO: 14981 - DNA, 5112 bp, Oryza sativa
  Clone ID: TFbOSC400763j.C1.o16.fg
atgcgcctcctcgttctcatgtgtctggtcatcgcggccgccatgcagatgcaggctgcatcaggagcgcctcccacggccgccaagcttgctcactgcctcaaatcctgcgggggcgccaacatctcctatccttacggcgttggggccggctgtttccgccccggcttcgagctcacttgcgaccattccaccaaacccccaaagctcctcttattgggtgttgccaccaacactaacaccaccaccaccaagatcgtggatcaatatagagatgggtatgttcaagcctatgtttctttcaacatagccaccacaccgggtgtgctcggcacctacaacaggacatgggagtccccagggagaatccttagcatcgggccggattattatgctttggtggctgtcggttgcggaattgaggtctacttggtcgaccctgatacggaagatatgctgggctattgcttcagcatgtgtactgacatggcgatgatgcacaaggaagcagaggggaaagcttgcagtggcatgggctgctgcgtcgtcaccttccggagacctgtccgggctttcagagtttccatcactcagagagaagcaacgcagcctttccaagttgctaatgctagtactatcaaggttttcttatcagaagagagtacgacctaccattacaattttacaataggagatctcctctccgatgagataaatgaaaccactgttgcatctacttcggcgtacctatcaacctttatcgcagaccaaccaaactgtacaatagcgcagaaggatcctgagcggtatgcttgtggtgataacaaatgtttggatgcggatgacgaaaatggaggctaccgttgtgcatgcatcaaatatactaatagcaatccctacctcgacggtgactgcgaccaagactactccatcccgctcgccggcgtgcaccagcgatcgggagagcaggtctccggaacctctgcctttgacgtcctgcaccgggagaaggcggcaataagatctaatgatgcgttcatgctagttttcatctgtaatgtcatgacttatttatggaataaattaaatcattatatgcccataatctcaacaatccaaaaaccttattataggcactgtgattttactatggctggttttgccgatgcactgaggccggataaattcaccggtgtgcattttaagagatggcagatcagggtcactctgtggctgacagctatgaaatgcttctgggtgagtactggcaaacctgaaggagttcttactgctgaacagcagaagcaattcgaggaagccactactctctttgtgggatgcattcttagcgttcttggcgatcgtctggtcgaggtgtatatgcatatgaccgacgctaaggagttgtgggatgcactgaatactaaattcggtgctactgatgctagcaatgatctgtatatcatggagcagtttcatgactacaaaatggctgacaaccgttctgtagtcgaacaggctcatgagatacaaaccatggctaaggaactcgaactccttaagtgtgtcttacccgacaaatttgtggccgggtgcattattgcaaaactacctccatcttggaggagtttcggtactgcactcaaacacaagagacaggaatactccgttgaggggttgattgcgtctcttgatgttgaggagaaagctcgggaaaaagatgccgcgtctaagggcgatggtgggcagtccagtgccaatgttgtgcacaaggcccagaacaagagcaaggggaaatacaaagctcagcagaccaccaacttcaagaagcagaagaagaacaacaacaatcctaatcaggatgagaggacttgctttgtgtgtggccaagttggtcatctggctaggaagtgtccacaacgcaaggggatgaaggcacctgcagggcagacttctaagtctgctaatgtgaccattggcaacactggagatggaagcgggtatggtaatttacctactgttttttcagttaatcaatctactaattggtgggttgatactggggccaatgtacatgtttgtgctgacatcttattgttttcttcttatcaggtcgcacggggttccaccgtcctaatggggaatgggtcacatgcttctgttcatggtgttggcacggtagatctgaagtttacttcgggaaagatcgtgcagctgaagaacgtgcagcatgtcccttctatcgacaggaatcttgttagtggctcccgtctgactagagacggatttaagttggtttttgagtctaataaagtagtcgtgtctaaacatggatattttattggtaaaggttatgagtgcggaggcctgttccgcttttccctttctgatttctgcaataagtctgtgaaccatatttgtggcagtgtggatgatgaggctaatgtttggcattcacgtttatgtcatattaattttggcttgatgtctcggctttccagcatgtgtttaattcctaagttttccattgtcaaaggttctaagtgccatagttgtgtgcaatcgaagcaacctcgcaagcctcacaaggctgccgaggagagaaacttggcaccactagaactcctacattcagatctttgtgaaatgaatggggtgttgacgaagggtggaaaacgatatttcatgacattgattgatgatgctactagattttgctatgtgtacttgttgaaaacgaaagacgaggctctagactattttaaaatttataaggcagaggttgaaaatcaacttgacagaaagataaaaaggcttaggtctgatcgtggtggagagtttttctcgaacgagtttgacttattctgtgaggaacatggcatcatacatgagaggacgcctccctattctcccgagtctaatgggattgctgaaaggaagaaccgcacactgactgacttggtgaatgccatgttggacaccgcgggactgcctaaggcatggtggggggaggcattgttgacctcaaatcatgtgttaaacagagttcctaacagaaataaggacaaaacaccatatgagatatggattggtagaaaaccatcactttcttatttgcgcacatgggggtgcttggcgaaagtcaatgtaccaataacgaagaagcgcaaacttggacctaagactgtggactgtgtttttctgggatatgctcatcatagcattgcctatagatttttaatagttaaatccgaggtaccggacatgcatgttggtacaattatggagtctcgtgatgctaccttctttgagagctttttcccaatgaaggatacacatagtggttcgaaccaaccctctgaaataattcccagttcaatcacaccaccagaacaaactgaacatacacatgaacttgtctctgaggaggatgtcagtgaagctcctcgaaggagtaagagacaaaggacggctaagtcttttggtgatgatttcactgtgtacctcgtggatgacactcctaagtcaatttcagaagcatatgcatctcctgatgcagactactggaaggaggctgtccgtagtgaaatggattccattatcgctaacgggacttgggaggtgacagagcgaccctatgggtgtaaacctgtggggtgcaagtgggtgttcaagaagaagcttaggcctgacggtactattgaaaagtacaaggctcggcttgttgctaagggctatactcagaaagaaggcgaagatttctttgacacttactcacctgttgctagattgaccacaattcgtgtgctactttccctagcagcctcacatggtcttctcgttcatcaaatggacgttaagacagcttttcttaatggagagctggatgaggagatctatatggatcaacctgatgggtttgtacttgaaggtcaagaaggcaaagtgtgcaaattgttgaagtctttgtatggtctgaaacaagctcctaagcaatggcatgagaaatttgacaaaacattgacatctgcaggctttgcagtcaatgaggcagataaatgtgtgtactatcgcaatggtgggggtgagggagttattttgtgcttgtatgttgacgacatactgatatttgggacaaacattgaggtgataaatgaggttaaatcattcttgtctcaaaattttgatatgaaagatttgggagtagctgatgttattttaaacattaagctaattagaggtgagaatgggattacactcttgcagtctcattatgtggagaagatcttgaatcgctttggctacattgatagtaagccttctccaacaccttatgattctagcttgtcgcttcgcaagaacaagagaattgctaggaatcaactggaatactcccaaatcattggctcgttgatgtacctggctagtgcaactaggcctgatatctcctttgctgtgagcaagttgagccgatttacctctaatccgggagatgatcactggcgtgcgcttgagcgagtaatgcgctatctgaaaggtactgtggaattggggcttcactatactgggtatcctgcggtactggagggttatagtgattctaactggatctctgatgtggatgagatcaaagccactagtggatatgttttcacactgggtggtggtgctgtttcatggaggtcttgcaaacagacaattttgacgaggtcaaccatggaagcagagctaacggcactggatactgctactgttgaggcagaatggttgcgtgatctattaatggatctgcctgttgttgaaaaaccggtgccggctatccttatgaactgtgacaatcaaacgacatgtgaaaagacgattgaagtctgtcaggaaattaagaaactccggagttataacgttggattacatccaaacagcgagaaacctggcagatcccttcacgaagggactatcacgaaatgtgatagacaatgcatcgaaggagatgggtttgagacccatagcattcttgaaggaactcacctttgtgagcttgactgttggtcgcagtccatgaagattttgggtgaatcttctaggaagcttactaaagacctaggagtatga

SEQ ID NO: 14982 - DNA, 4968 bp, Oryza sativa
  Clone ID: TFbOSC400772j.C1.o45.fg
atggcacctcgcaagccgaaccccgcttccgcgacaggccctgatcccggccggatcgacgacgactccaccgcctttctaggggcttcacttgtggacgacgatgagctggcgaagcttgtcagcgccggccctctggtggaggggcaggccttcctcccgggaaaggccgtggtgccgaaacccggcgacaactggacggtggtttttgccgtattttttggggcgggccttcggttttcatgcaacgttttgttgctggagatccttcgcctcttccagacacttgcgaaaagtttcgaccaagcagccggtctttccgtcacctcggtgagtactggcaaacctgaaggagttcttactgctgaacagcagaagcaattcgaggaagccactactctctttgtgggatgcattcttagcgttcttggcgatcgtctggtcgaggtgtatatgcatatgaccgacgctaaggagttgtgggatgcactgaatactaaattcggtgctactgatgctagcaatgatctgtatatcatggagcagtttcatgactacaaaatggctgacaaccgttctgtagtcgaacaggctcatgagatacaaaccatggctaaggaactcgaactccttaagtgtgtcttacccgacaaatttgtggccgggtgcattattgcaaaactaccttcatcttggagaagtttcggtactgcactcaaacacaagagacaggaatacttcgttgaggggttgatagcgtctcttgatgttgaggagaaagctcgggaaaaagatgccgcgtctaagggcgatggtgggcagtccagtgccaatgttgtgcacaaggcccagaacaagagcaaggggaaatacaaagctcagcagaccaccaacttcaagaagcagaagaacaacaacaacaatcctaatcaggatgagaggacttgctttgtgtgtggccaagttggtcatctggctaggaagtgtccacagcgcaaggggatgaaggcacctgcagggcagacttctaagtctgctaatgtgaccattggcaacactggagatggaagcgggtatggtaatttacctactgtttttttagttaatcaatctactaattggtgggttgatactggggccaatgtacatgtttgtgctgacatctcattgttttcttcttatcaggtcgcacggggttccaccgacctaatggggaatgggtcacatgcttctgttcatggtgttggcacggtagatctgaagtttacttcgggaaagatcgtgcagctgaagaacgtgcagcatgtcccttctatcgacaggaatcttgttagtggctcccgtctgactagagacggatttaagttggtttttgagtctaataaagtagtcgtgtctaaacatggatattttattggtaaaggttatgagtgcggaggcctgttctgtttttccctttctgatttctgcaataagtctgtgaaccatatttgtggcagtgtggatgatgaggctaatgtttggcattcacgtttatgtcatattaattttggcttgatgtctcggctttccagcatgtgtttaattcctaagttttccattgtcaaaggttctaagtgccatagttgtgtgcaatcgaagcaacctcgcaagcctcacaaggctgccaaggagagaaacttggcaccactagaactcctacattcagatctttgtgaaatgaatggggtgttgacaaatggtggaaaacgatatttcatgacattgattgatgatgctactagattttgctatgtgtacttgttgaaaacgaaagacgaggctctagactattttaaaatttataaggcagaagttgaaaatcaacttgacagaaagataaaaaggcttaggtctgatcgtggtggagagtttttctcgaacgaatttgacttattctgtgaggaacatggcatcatacatgagaggacgcctccctattctcccgagtctaatgggattgctgaaaggaagaatcgcacgctgactgacttggtgaatgccatgttggacaccgcgggactgcctaaggcatggtggggggaggcattgttgacctcaaatcatgtgttaaacagagttcctaacagaaataaggacaaaacaccatatgagatatggattggtagaaaaccatcactttcttatttgcgcacatgggggtgcttggcgaaagtcaatgtaccaataacgaagaagcgcaaacttggacctaagactgtggactgtgtttttctgggatatgctcatcatagcattgcctatagatttttaatagttaaatccgaggtaccagacatgcatgttggtacaattatggagtctcgtgattctatcttctttgagagctttttcccaatgaaggatacacatagtggttcgaaccaaccctttgaaataattcccagttcaatcacaccaccaaaacaaactgaacatacacatgaacttgtctctgaggaggatgtcagtgaagctcctcgaaggagtaagagacaaaggacggctaagtcttttggtgatgatttcactgtgttcctcgtggatgacactcctaagtcaatttcagaagcatatgcatctcctgatgcagactactggaaggaggctgtccgtagtgaaatggattccattatcgctaacggaacttgggaggtgatagagctaccctatgggtgtaaacctatggggtgcaagtgggtgttcaagaagaagcttaggcctgacggtactattgaaaagtacaaggctcggcttgttgctaagggctatactcagaaagaaggcgaagatttctttgacacttactcacctgttgctagattgaccacaattcgtgtgctactttccctagcagcctcacatggtcttctcgttcatcaaatggacgttaagacagcttttcttaatggagagctggatgaggagatctatatggatcaacctgatgggtttgtagttgaaggtcaagaaggcaaagtgtgcaaattgttgaagtctttgtatggtctgaaacaagctcctaagcaatggcatgagaaatttgacaaaacattgacatctgcaggctttgcagtcaatgaggcagataaatgtgtgtactatcgccatggtgggggtgagggagttattttgtgcttgtatgttgacgacatactgatatttgggacaaaccttgaggtgataaatgaggttaaatcattcttgtctcaaaattttgatatgaaggatttgggagtagctgatgttatcttaaacattaagctaattagaggtgagaatgggattacactcttgcagtcccattatgtggagaagatcttgaatcgctttggctacattgatagtaagccttctccaacaccttatgatcctagcttgttgcttcgcaagaacaagagaattgctaggaatcaactggaatactcccaaatcattggctcgttgatgtacctggctagtgcaactaggcctgatatctcctttgctgtgagcaagttgagccgatttacctctaatccgggagatgatcactggcgtgcgcttgagcgagtaatgcgctatctgaaaggtactgtggaattggggcttcactatactgggtatcctgcggtactggagggttatagtgattctaactggatctctgatgtggatgagatcaaagccactagtggatatgttttcacactgggtggtggtgctgtttcatggaggtcttgcaaacagaccattttgacgaggtcaaccatggaagcagagctaacggcactggatactgctactgttgaggcagaatggctgcgtgatctattaatggatctgcctgttgttgaaaaaccggtgccggctatccttatgaactgtgacaatcaaacgacatgtgaaaagacgattgaagtctgtcaggaaattaagaaactccggagttataacgttggattacatccaaacagcgagaaacctggcagatcccttcacgaagggactatcacgaaatgtgatagacaatgtatcgaaggagatgggtttgagacccataaagaggaagcaaacaagagattgcaaggggttcaaataactaccacagctccaattataagccaccttttgtttgctgatgatagcttgttactattcaaagctactagtgtttgtgcagatgcagtgagtagagttttaactaactattgtgcagcttccggacaactggtcaacttttctaagtcctgcattttcttcagcaagaagtgtgatatggccatccgtgaggacatcaaacgaaaggttggaatgactaatgaatctataacagatcgctatttgggtttgccaacggatgtgggtagagccaaggaaggaaaatttaaatacttgaaggacagagtgtggaaaagagtgcagggatggatggagaaaacactttcagttggaggtaaagaagtccttattaaatcaatagttcaagccatcccaacttattcaatgagttgtttccgtttacccatgggcctttgcaaccatataaattctttaatccggaaattttggtgggcaagtaaacaaggttcaaggaaaaccaattgggtagcatgggacaagatgactgtgcctaagtttcttggtggaatgggatttagggacataaatattttcaatctagtattgcttgccaagcaagggtggagaatcttgcagtatcctaattcactagcagcaagagttttgaaagctgtctatttttcaaatggtgacttcctgaatgctggtttgggaagtaggccatcacatacttggcgtgctattattgaaggtcgtgaaattcttaaactaggaattattcgaaggattggaagtggaaaagatacttttatctgggatgataattggattccaagagattggatgcttcgaccaatcagggcctaa

SEQ ID NO: 14983 - DNA, 3921 bp, Oryza sativa
  Clone ID: TFbOSC400773j.C1.o24.fg
atggctggttttgccgatgcactgaggccggataaattcaccggtgtgcattttaagagatggcagatcagggtcactctgtggctgacagctatgaaatgcttctggcagaagcaattcgaggaagccactactctctttgtgggatgcattcttagcgttcttggcgatcgtctggtcgaggtgtatatgcatatgaccgacgctaaggagttgtgggatgcactgaatactaaattcggtgctactgatgctagcaatgatctgtatatcatggagcagtttcatgactacaaaatggctgacaaccgttctgtagtcgaacaggctcatgagatacaaaccatggctaaggaactcgaactccttaagtgtgtcttacccgacaaatttgtggccgggtgcattattgcaaaacttcctccatcttggaggagtttcggtactgcactcaaacacaagagacaggaatactccgttgaggggttgattgcgtctcttgatgttgaggagaaagctcgggaaaaagatgccgcgtctaagggcgatggtgggcagtccagtgccaatgttgtgcacaaggcccagaacaagagcaaggggaaatacaaagctcagcagaccaccaacttcaagaagcagaagaagaacaacaacaatcctaatcaggatgagaggacttgctttgtgtgtggccaagttggtcatctggctaggaagtgtccacaacgcaaggggatgaaggcacctgcagggcagacttctaagtctgctaatgtgaccattggcaacactggagatggaagcgggtatggtaatttacctactgttttttcagttaatcaatctactaattggtggattgatactggggccaatgtacatgtttgtgctgacatctcattgttttcttcttatcaggtcgcacggggttccaccgtcctaatggggaatgggtcacatgcttctgttcatggtgttggcacggtagatctgaagtttacttcgggaaagatcgtgcagctgaagaacgtgcagcatgtcccttctatcgacaggaatcttgttagtggctcccgtctgactagagacggatttaagttggtttttgagtctaataaagtagtcgtgtctaaacatggatattttattggtaaaggttatgagtgcggaggcctgttccgcttttccctttctgatttctgcaataagtctgtgaaccatatttgtggcagtgtggatgatgaggctaatgtttggcattcacgtttatgtcatattaattttggcttgatgtctcggctttccagcatgtgtttaattcctaagttttccattgtcaaaggttctaagtgccatagttgtgtgcaatcgaagcaacctcgcaagcctcacaaggctgccgaggagagaaacttggcaccactagaactcttacattcagatctttgtgaaatgaatggggtgttgacgaagggtggaaaacgatatttcatgacattgattgatgatgctactagattttgctatgtgtacttgttgaaaacgaaagacgaggctctagactattttaaaatttataaggcagaagttgaaaatcaacttgacagaaagataaaaaggcttaggtctgatcgtggtggagagtttttctcgaacgagtttgacttattctgtgaggaacatggcatcatacatgagaggacgcctccctattctcccgagtctaatgggattgctgaaaggaagaaccgcacactgactgacttggtgaatgccatgttggacaccgcgggactgcctaaggcatggtggggggaggcattgttgacctcaaatcatgtgttaaacagagttcctaacagaaataaggacaaaacaccatatgagatatggattggtagaaaaccatcactttcttatttgcgcacatgggggtgcttggcgaaagtcaatgtaccaataacgaagaagcgcaaacttggacctaagactgtggactgtgtttttctgggatatgctcatcatagcattgcctatagatttttaatagttaaatccgaggtaccggacatgcatgttggtacaattatggagtctcgtgatgctaccttctttgagagcttttttccaatgaaggatacacatagtggttcgaaccaaccctctgaaataattcccagttcaatcacaccaccagaacaaactgaacatacacatgaacttgtctctgaggaggatgtcagtgaagctcctcgaaggagtaagagacaaaggacggctaagtcttttggtgatgatttcactgtgtacctcgtggatgacactcctaagtcaatttcagaagcatatgcatctcctgatgcagactactggaaggaggctgtccgtagtgaaatggattccattatcgctaacgggacttgggaggtgacagagcgaccctatgggtgtaaacctgtggggtgcaagtgggtgtttaagaagaagcttaggcctgacggtactattgaaaagtacaaggctcggcttgttgctaagggctatactcagaaagaaggcgaagatttttttgacacttactcacctgttgctagattgaccacaattcgtgtgctactttccctagcagcctcacatggtcttctcgttcatcaaatggacgttaagacagcttttcttaatggagagctggatgaggagatctatatggatcaacctgatgggtttgtagttgaaggtcaagaaggcaaagtgtgcaaattgttgaagtctttgtatggtctgaaacaagctcctaagcaatggcatgagaaatttgacaaaacattgacatctgcaggctttgcagtcaatgaggcagataaatgtgtgtactatcgccatggtgggggtgagggagttattttgtgcttgtatgttgacgacatactgatatttgggacaaaccttgaggtgataaatgaggttaaatcattcttgtctcaaaattttgatatgaaagatttgggagtagctgatgttatcttaaacattaagctaattagaggtgagaatgggattactctcttgcagtcccattatgtggagaagatcttgaatcgctttggctacattgatagtaagccttctccaacaccttatgatcctagcttgttgcttcgcaagaacaagagaattgctaggaatcaactggaatactcccaaatcattggctcgttgatgtacctggctagtgcaactaggcctgatatctcctttgctgtgagcaagttgagccgatttacttctaatccgggagatgatcactggcgtgcgcttgagcgagtaatgcgctatctgaaaggtactgtggaattgggacttcactatactgggtatcctgcggtactggagggttatagtgattctaactggatctctgatgtgaatgagatcaaagccactagtggatatgttttcacactgggtggtggtgctgtttcatggaggtcttgcaaacagacaattttgacgaggtcaaccatggaagcagaactaacggtactggatactgctactgttgaggcagaatggctgcgtgatctattaatggatctgcctgttgttgaaaaaccggtgccggctatccttatgaactgtgacaatcaaacgacatgtgaaaagacgattgaagtctgtcaggaaattaagaaactccggagttataacgttggattacatccaaacagcgagaaacctggcagatcccttcacgaagggactatcacgaaatgtgatagacaatgcatcgaaggagatgggtttgagacccatagcattcttgaaggaactcacctttgtgagcttgactgttggtcgcagtctatgaagattttgggtgaatcttctaggaagcttactaaagacctaggagtatga

SEQ ID NO: 14984 - DNA, 3870 bp, Oryza sativa
  Clone ID: TFbOSC400800j.C1.o51.fg
atggctggttttgccgatgcactgaggccggataaattcaccggtgtgcattttaagagatggcagatcagggtcactatgtggctgacagctatgaaatgcttctgggtgagtactggcaaacctgaaggagttcttactgctgaacagcagaagcaattcgaggaagccactactctctttgtgggatgcattcttagcgttcttgtgcgatcgtcatggtcgacggtgtttcatgactacaaaatggctgacaaccgttctgtagtcgaacaggctcatgagatacaaaccatggctaaggaactcgaactccttaagtgtgtcttacccgacaaatttgtggccgggtgcattattgcaaaacttcctccatcttggaggagtttcggtactgcactcaaacacaagagacaggaatactccgttgaggggttgattgcgtctcttgatgttgaggagaaagctcgggaaaaagatgccgcgtctaagggcgatggtgggcagtccagtgccaatgttgtgcacaaggcccagaacaagagcaaggggaaatacaaagctcagcagaccaccaacttcaagaagcagaagaagaacaaccacaatcctaatcaggatgagaggacttgctttgtgtgtggccaagttggtcatctggctaggaagtgtccacaacgcaaggggatgaaggcacctgcagggcagacttctaagtctgctaatgtgaccattggcaacactggagatggaagcgggtatggtaatttacctagtgttttttcagttaatcaatctactaattggtgggttgatactggggccaatgtacatgtttgtgctgacatctcattgttttcttcttatcaggtcgcacggggttccaccgtcctaatggggaatgggtcacatgcttctgttcatggtgttggcacggtagatctgaagtttacttcgggaaagatcgtgcagctgaagaacgtgcagcatgtcccttctattgacaggaatcttgttagtggctcccgtctgactagagacggatttaagttggtttttgagtctaataaagtagtcgtgtctaaacatggatattttattggtaaaggttatgagtgcggaggcctgttccgcttttccctttctgatttctgcaataagtctgtgaaccatatttgtggcagtgtggatgatgaggctaatgtttggcattcacgtttatgtcatattaattttggcttgatgtctcggctttccagcatgtgtttaattcctaagttttccattgtcaaaggttctaagtgccatagttgtgtgcaatcgaagcaacctcgcaagcctcacaaggctgccgaggagagaaacttggcaccactagaactcctacattcagatctttgtgaaatgaatggggtgttgacgaagggtggaaaacgatatttcatgacattgattgatgatgctactagattttgctatgtgtacttgttgaaaacgaaagacgaggctctagactattttaaaatttataaggcagaagttgaaaatcaacttgacagaaggataaataggcttaggtctgatcgtggtggagagtttttctcgaacgagtttgacttattctgtgaggaacatggcatcatacatgagaggacgcctccctattctcccgagtctaatgggattgctgaaaggaagaaccgcacactgactgacttggtgaatgccatgttggacaccgccggactgcctaaggcatggtggggggaggcattgttgacctcaaattatgtgttaaacagagttcctaacagaaataaggacaaaacaccatatgagatatggattggtagaaaaccatcactttcttatttgcgcacatgggggtgcttggcgaaagtcaatgtaccaataacgaagaagcgcaaacttggacctaagactgtggactgtgtttttctgggatatgctcatcatagcattgcctatagatttttaatagttaaatccgaggtaccggacatgcatgttggtacaattatggagtctcgtgatgctaccttctttgagagcttttttccaatgaaggatacacatagtggttcgaaccaaccctctgaaataattcccagttcaatcacaccaccagaacaaactgaacatacacatgaacttgtctctgaggaggatgtcagtgaagctcctcgaaggagtaagagacaaaggacggctaagtcttttggtgatgatttcactgtgtacctcgtggatgacactcctaagtcaatttcagaagcatatgcatctcctgatgcagactactggaaggaggctgtccgtagtgaaatggattccattatcgctaacgggacttgggaggtgacagagcgaccctatgggtgtaaacctgtggggtgcaagtgggtgttcaagaagaagcttaggcctgacggtactattgaaaagtacaaggctcggcttgttgctaagggctatactcagaaagaaggcgaagatttctttgacacttactcacctgttgctagattgaccacaattcgtgtgctactttccctagcagcctcacatggtcttctcgttcatcaaatggacgttaagacagcttttcttaatggagagctggatgaggagatctatatggatcaacctgatgggtttgtagttgaaggtcaagaaggcaaagtgtgcaaattgttgaagtctttgtatggtctgaaacaagctcctaagcaatggcatgagaaatttgacaaaacattgacatctgcaggctttgcagtcaatgaggcagataaatgtgtgtactatcgccatggtgggggtgagggagttattttgtgcttgtatgttgacgacatactgatatttgggacaaaccttgaggtgataaatgaggttaaatcattcttgtctcaaaattttgatatgaaagatttgggagtagctgatgttatcttaaacattaagctaattagaggtgagaatgggattactctcttgcagtcccattatgtggagaagatcttgaatcgctttggctacattgatagtaagccttctccaacaccttatgatcctagcttgttgcttcgcaagaacaagagaattgctaggaatcaactggaatactcccaaatcattggctcgttgatgtacctggctagtgcaactaggcctgatatctcctttgctgtgagcaagttgagccgatttacttctaatccgggagatgatcactggcgtgtgcttgagcgagtaatgcgctatctgaaaggtactgtggaattgggacttcactatactgggtatcctgcggtactggagggttatagtgattctaactggatctctgatgtggatgagatcaaagccactagtggatatgttttcacactgggtggtggtgctgtttcatggaggtcttgcaaacagacaattttgacgaggtcaaccatggaagcagaactaacggcactggatactgctactgttgaggcagaatggctgcgtgatctattaatggatctgcctgttgttgaaaaaccggtgccggctatccttatgaactgtgacaatcaaacgacatgtgaaaagacgattgaagtctgtcaggaaattaagaaactccggagttataacgttggattacatccaaacagcgagaaacctggcagatcccttcacgaagggactatcacgaaatgtgatagacaatgcatcgaaggagatgggtttgagacccatagcattcttgaaggaactcacctttgtgagcttgactgttggtcgcagtctatgaagattttgggtgaatcttctaggaagcttactaaagacctaggagtatga

SEQ ID NO: 14985 - DNA, 3909 bp, Oryza sativa
  Clone ID: TFbOSC400978j.C1.o6.fg
atggctggttttgccgatgcactgaggccggataaattcaccggtgtgcattttaagagatggcagatcagggtcactctgtggctgacagctatgaaatgcttctgggtgagtactggcaaacctgaaggagttcttactgctgaacagcagaagcaattcgaggaagccactactctctttgtgggatgcattcttagcgttcttggcgatcgtctggtcgaggtgtatatgcatatgaccgacgctaaggagttgtgggatgcactgaatactaaattcggtgctactgatgctagcaatgatctgtatatcatggagcagtttcatgactacaaaatggctgacaaccgttctgtagtcgaacagtctcatgagatacaaaccatggctaaggaactcgaactccttaagtgtgtcttacccgacaaatttgtggccgggtgcattattgcaaaactacctccatcttggaggagtttcggtactgcactcaaacacaagagacaggaatactccgttgaggggttgattgcgtctcttgatgttgaggagaaagctcgggaaaaagatgccgcgtctaagggcgatggtgggcagtccagtgccaatgttgtgcacaaggcccagaacaagagcaaggggaaatacaaagctcagcagaccaccaacttcaagaagcagaagaagaacaacaacaatcctaatcaggatgagaggacttgctttgtgtgtggccaagttggtcatctggctaggaagtgtccacagcgcaaggggatgaaggcacctgcagggcagacttctaagtctgctaatgtgaccattggcaacactggagatggaagcgggtatggtaatttacctactgttttttcagttaatcaatctactaattggtgggttgatactggggccaatgtacatgtttgtgctgacatctcattgttttcttcttatcaggtcgcacggggttccaccgttctaatgtggaatgggtcacatgcttctgttcatggtgttggcacggtagatctgaagtttacttcgggaaagatcgtgcagctgaagaacgtgcagcatgtcccttctatcgacaggaatcttgttagtggctcccgtctgactagagacggatttaagttggtttttgagtctaataaagtagtcgtgtctaaacatggatattttattggtaaaggttatgagtgcggaggcctgttccgcttttccctttctgatttctgcaataagtctgtgaaccatatttgtggcagtgtggatgatgaggctattgtttggcattcacgtttatgtcatattaattttggcttgatgtctcggctttccagcatgtgtttaattcctaagttttccattgtcaaaggttctaagtgccatagttgtgtgcaatcgaagcaacctcgcaagcctcacaaggctgccgaggagagaaacttggcaccactagaactcctacattcagatctttgtgaaatgaatggggtgttgacgaagggtggaaaacgatatttcatgacattgattgatgatgctactagattttgctacgtgtacttgttgaaaacgaaagacgaggctctagactattttaaaatttataaggcagaagttgaaaatcaacttgacagaaagataaaaaggcttaggtctgatcgtggtggagagtttttctcgaacgagtttgacttattctgtgaggaacatggcatcatacatgagaggacgcctccctattctcccgagtctaatgggattgctgaaaggaagaaccgcacactgactgacttggtgaatgccatgttggacaccgcgggactgcctaaggcatggtggggggaggcattgttgacctcaaatcatgtgttaaacagagttcctaacagaaataaggacaaaacaccatatgagatatggattggtagaaaaccatcactttcttatttgcgcacatgggggtgcttggcgaaagtcaatgtaccaataacgaagaagcgcaaacttggacctaagactgtggactgtgtttttctgggatatgctcatcatagcattgcctatagatttttaatagttaaatccgagataccggacatgcatgttggtacaattatggagtctcgtgatgctaccttctttgagagctttttcccaatgaaggatacacatagtggttcgaaccaaccctctgaaataattcccagtttaattacaccaccagaacaaactgaacatacacatgaacttgtctctgaggaggatgtcagtgaagctcctcgaaggagtaagagacaaaggacggctaagtcttttggtgatgatttcactgtgtacctcgtggatgacactcctaagtcaatttcagaagcatatgcatctcctgatgcagactactggaaggaggctgtccgtagtgaaatggattccattatcgctaacgggacttgggaggtgacagagcgaccctatgggtgtaaacctgtggggtgcaagtgggtgttcaagaagaagcttaggcctgacggtactattgaaaagtacaaggctcggcttgttgctaagggctatactcagaaagaaggcgaagatttctttgacacttactcacctgttgctagattgaccacaattcatgtgctactttccctagcagcctcacatggtcttctcgttcatcaaatggacgttaagacagcttttcttaatggagagctggatgaggagatctatatggatcaacctgatgggtttgtagttgaaggtcaagaaggcaaagtgtgcaaattgttgaagtctttgtatggtctgaaacaagctcctaagcaatggcatgagaaatttgacaaaacattgacatctgcaggctttgcagtcaatgaggcagataaatgtgtgtactatcgccatggtgggggtgagggagttattttgtgcttgtatgttgacgacatactgatatttgggacaaaccttgaggtgataaatgaggttaaatcattcttgtctcaaaattttgatatgaaagatttgggagtagctgatgttatcttaaacattaagctaattagaggtgagaatgggattacactcttgcagtcccattatgtagagaagatcttgaatcgctttggctacattgatagtaagccttctccaacaccttatgatcctagcttgttgcttcgcaagaacaagagaattgctaggaatcaactggaatactcccaaatcattggctcgttgatgtacctggctagtgcaactaggcctgatatctcctttgctgtgagcaagttgagccgatttacctctaatccgggagatgatcactggcgtgcgcttgagcgagtaatgcgctatctgaaaggtactgtggaattggggcttcactatactgggtatcctgcggtactggagggttatagtgattctaactggatctctgatgtggatgagatcaaagccactagtggatatgttttcacactgggtggtggtgctgtttcatggaggtcttgcaaacagacaattttgacgaggtcaaccatggaagcagagctaacggcactggatactgctactgttgaggcagaatggctgcgtgatctattaatggatctgcctgttgttgaaaaaccggtgccggctatccttatgaactgtgacaatcaaacggtaattgtcaaagtgaatagttctaaggataatatgaaatcgtctagacatgtgaaaagacgattgaagtctgttaggaaattaagaaactccggagttataacgttggattacatccaaacagcgagaaacctggcagatcccttcacgaagggactatcacgaaatgtgatagacaatgcatcgaaggagatgggtttgagacccatgtga

SEQ ID NO: 14986 - DNA, 5433 bp, Oryza sativa
  Clone ID: TFbOSC401035j.C1.o18.fg
atgtctaaacgaaggggcaattgctcgagctcaaatgaagagaagaaaacttgcacaaatagtagaaagaaaggagatcagacgcatttttcaggcacaggcatagttgtcagaaacaaagatgaagtaactacaagtattctaacttcagcaaatgtgattagatgttttgatgatgacagcaagatcaatccgtttttggatgttgtgttgcttgcattatcactgcagattcgagttctgcttccaaataagcaacgtgtcatcgggtggatgggacactttgacttaaactacaatattgctgttgtggtgatcaaatatttacctggtttgcgagctgcgtcttttgatcacgaagtgcgatttgggtcccaaagtaaggatatggctggaggaccactcattgatttggatgggaactttgttggcatgaactttttttcggaggagaggactccattcctaccaaggaacaaaatttaccgaagcttggtgcgatcttgcacactctgggttgaaatcgacgatgaatgcacaagcataattgaaagatgcagatctaagatgatacacaacaattttgttggtacctcaagaggagtggcaaaaaaaaggaaccaggagcaaaccgtatccatcacaagcttttcagaaggtacttcagatgaagagaatgaaagtgagactcagaagcttcctgaatattctacaagtgattcagaagatttctgggaggaggaattgtttcctgaacttattaagcccttgccagatgatgaattcacgcagcttttgaaaaaggatctaaagtctcgtaattatcccatgccaatcaggttttgggggggtatgcgcttgaaaaatacttttgaagaggaatttgctgaagatacatggtgcaaactgagtaaaaaggttgctttaaatacatcccaaagtgttgtctcacttgcttcgttcaaagactactccatcccgctcgccggcgtgcaccagcgatcgggagagcaggtctccggaacctctgcctttgacgtcctgcaccgggagaaggcggcaataagatctaatgatgcgttcatgctagttttcatctgtaatgtcatgatttatttatggaataaattaaatccttatatgcccataatctcaacaatccaaaaaccttattataggcactgtgattttactatggctggttttgccgatgcactgaggccggataaattcaccggtgtgcattttaagagatggcagatcagggtcactctgtggctgacagctatgaaatgcttctgggtgagtactggcaaacctgaaggagttcttactgctgaacagcagaagcaattcgaggaagccactactctctttgtgggatgcattcttagcgttcttggcgatcgtctggtcgaggtgtatatgcatatgaccgacgctaaggagttgtgggatgcactgaatactaaattcggtgctactgatgctagcaatgatctgtatatcatggagcagtttcatgactacaaaatggctgacaaccgttctgtagtcgaacaggctcatgagatacaaaccatggctaaggaactcgaactccttaagtgtgtcttacccgacaaatttgtggccgggtgcattattgcaaaacttcctccatcttggaggagtttcggtactgcactcaaacacaagagacaggaatactccgttgaggggttgattgcgtctcttgatgttgaggagaaagctcgggaaaaagatgccgcgtctaagggcgatggtgggcagtccagtgccaatgttgtgcacaaggcccagaacaagagcaaggggaaatacaaagctcagcagaccaccaacttcaagaagcagaagaagaacaacaacaatcctaatcaggatgagaggacttgctttgtgtgtggccaagttggtcatctggctaggaagtgtccacaacgcaaggggatgaaggcacctgcagggcagacttctaagtctgctaatgtgaccattggcaacactggagatggaagcgggtatggtaatttacctactgttttttcagttaatcaatctactaattggtgggttgatactggggccaatgtcgcacggggttccaccgtcctaatggggaatgggtcacatgcttctgttcatggtgttggcacggtagatctgaagtttacttcgggaaagatcgtgcagctgaagaacgtgcagcatgtcccttctatcgacaggaatcttgttagtggctcccgtctgactagagacggatttaagttggtttttgagtctaataaagtagtcgtgtctaaacatggatattttattggtaaaggttatgagtgcggaggcctgttccgcttttccctttctgatttctgcaataagtctgtgaaccatatttgtggcagtgtggatgatgaggctaatgtttggcattcacgtttatgtcatattaattttggcttgatgtctcggctttccagcatgtgtttaattcctaagttttccattgtcaaaggttctaagtgccatagttgtgtgcaatcgaagcaacctcgcaagcctcacaaggctgccgaggagagaaacttggcaccactagaactcctacattcagatctttgtgaaatgaatggggtgttgacgaagggtggaaaacgatatttcatgacattgattgatgatgctactagattttgctatgtgtacttgttgaaaacgaaagacgaggctctagactattttaaaatttataaggcagaagttgaaaatcaacttgacagaaagataaaaaggcttaggtctgatcgtggtggagagtttttctcgaacgagtttgacttattctgtgaggaacatggcatcatacatgagaggacgcctccctattctcccgagtctaatgggattgctgaaaggaagaaccgcacactgactgacttggtgaatgccatgttggacaccgcgggactgcctaaggcatggtggggggaggcattgttgacctcaaatcatgtgttaaacagagttcctaacagaaataaggacaaaacaccatatgagatatggattggtagaaaaccatcactttcttatttgcgcacatgggggtgcttggcgaaagtcaatgtaccaataacgaagaagcgcaaacttggacctaagactgtggactgtgtttttctgggatatgctcatcatagcattgcctatagatttttaatagttaaatccgaggtaccggacatgcatgttggtacaattatggagtctcgtgatgctaccttctttgagagcttttttccaatgaaggatacacatagtggttcgaaccaaccctctgaaataattcccagttcaatcacaccaccagaacaaactgaacatacacatgaacttgtctctgaggaggatgtcagtgaagctcctcgaaggaagcgaccctatgggtgtaaacctgtggggtgcaagtgggtgttcaagaagaagcttaggcctgacggtactattgaaaagtacaaggctcggcttgttgctaagggctatactcagaaagaaggcgaagatttctttgacacttactcacctgttgctagattgaccacaattcgtgtgctactttccctagcagcctcacatggtcttctcgttcatcaaatggacgttaagacagcttttcttaatggagagctggatgaggagatctatatggatcaacctgatgggtttgtagttgaaggtcaagaaggcaaagtgtgcaaattgttgaagtctttgtatggtctgaaacaagctcctaagcaatggcatgagaaatttgacaaaacattgacatctgcaggctttgcagtcaatgaggcagataaatgtgtgtactatcgccatggtgggggtgagggagttattttgtgcttgtatgttgacgacatactgatatttgggacaaaccttgaggtgataaatgtggttaaatcattcttgtctcaaaattttgatatgaaagatttgggagtagctgatgttatcttaaacattaagctaattagaggtgagaatgggattactctcttgcagtcccattatgtggagaagatcttgaatcgctttggctacattgatagtaagccttctccaacaccttatgatcctagcttgttgcttcgcaagaacaagagaattgctaggaatcaactggaatactcccaaatcattggctcgttgatgtacctggctagtgcaactaggcctgatatctcctttgctgtgagcaagttgagccgatttacttctaatccgggagatgatcactggcgtgcgcttgagcgagtaatgcgctatctgaaaggtactatggaattgggacttcactatactgggtatcctgcggtactggagggttatagtgattctaactggatctctgatgtggatgagatcaaagccactagtggatatgttttcacactgggtggtggtgctgtttcatggaggtcttgcaaacagacaattttgacgaggtcaaccatggaagcagaactaacggcactggatactgctactgttgaggcagaatggctgcgtgatctattaatggatctgcctgttgttgaaaaaccggtgccggctatccttatgaactgtgacaatcaaacgacatgtgaaaagacgattgaagtctgtcaggaaattaagaaactccggagttataacgttggattacatccaaacagcgagaaacctggcagatcccttcacgaagggactatcacgaaatgtgatagacaatgcatcgaaggagatgggtttgagacccatagcattcttgaaggaactcacctttgtgagcttgactgttggtcgcagtctatgaagattttgggagaagaaaggttttttgcttgcacaggtgtatttatagacttcaatggatccacatcaagagttgtgacttcagcaagtttggttagaatatctgctgatgaaaacaagattgctgataacctgaagattaaagtgtaccttccaaataaacgaatcgccgtaggcgaattgcagcattgcaatttgagctacaatattgctgtggtcagtgtcaagggtttctgttgtcttcggacagcagaactcgacaaacagatgcaaatcgaacctcatagggaggtagtagctataggacgtatctttgaatcaggcaaattaatggctacaagtgggatattgtctgacgaggaaagcaagcttgactgcagagagcttatgatctccacttgtaaaatcactaaggccggtattggaggaccactgattgattttgatgggaatttcgttggcataaacttctatggaacaaaagaaacacattatctaccacgattaatgatacagagactattgaaggattttgacgggtaa

SEQ ID NO: 14987 - DNA, 3963 bp, Oryza sativa
  Clone ID: TFbOSC401137j.C1.o48.fg
atggctggttttgccgatgcactgaggccggataaattcaccggtgtgcattttaagagatggcagatcagggtcactctgtggctgacagctatgaaatgcttctgggtgagtactggcaaacctgaaggagttcttactgctgaacagcagaagcaattcaaggaagccactactctctttgtgggatgcattcttagcgttcttggcgatcgtctggtcgaggtgtatatgcatatgaccgacgctaaggagttgtgggatgtactgaatactaaattcggtgctactgatgctagcaatgatctgtatatcatggagcagtttcatgactacaagatggctgacaaccgttctgtagtcgaacaggctcatgagatacaaaccatggctaaggaactcgaactcattaagtgtgtcttacccgacaaatttgtggctgggtgcattattgcgaaactacctccatcttggagaagtttcggtactgcactcaaacacaagagacaggaatactccgttgaggggttgatagcgtctcttgatgttgaggagaaagctcgggaaaaagatgccgcgtctaagggcgatggtgggcagtccagcgccaatgttgtgcacaaggcccagaaaaagagcaaggggaaatacaaagctcagcagaccaccaacttcaagaagcagaagaagaacaacaacaatcctaatcaggatgagaggacttgctttgtgtgtggccaagttggtcatctggctaggaagtgtccacaacgcaaggggatgaaggcacctgcagggcagacttctaagtctgctaatgtgaccattggcaacactggagatggaagcgggtatggtaatttacctactgttttttcagttaatcaatctactaattggtgggttgatactggggccaatgtacatgtttgtgctgacatctcattgttttcttcttatcaggtcgcacggggttccaccgtcctaatggggaatgggtcacatgcttctgttcatggtgttggcacggtagatctgaagtttacttcgggaaagatcgtgcagctgaagaacgtgcagcatgtcccttctatcgacatgaatcttgttagtggctcccgtctgactagagacggatttaagttggtttttgagtctaataaagtagtcgtgtctaaacatggatattttattggtaaaggttatgagtgcggaggcctgttccgcttttctctttctgatttctgcaataagtctgtgaaccatatttgtggcagtgtggatgatgaggctaatgtttggcattcacgtttatgtcatattaattttggcttgatgtctcggctttccagcatgtgtttaattcctaagttttccattgtcaaaggttctaagtgccatagttgtgtgcaatcaaagcaacctcgcaagcctcacaaggctgccgaggagagaaacttggcaccactagaactcctacattcagatctttgtgaaatgaatggggtgttgacgaagggtggaaaacgatatttcatgacattcattgatgatgctactagattttgctatgtgtacttgttgaaaacgaaagacgaggctctagactattttaaaatttataaggcagaagttgaaaatcaacttgacagaaagataaaaaggcttaggtctgatcgtggtggagagtttttctcgcacgagtttgacttattttgtggggaacatggcatcatacatgagaggacgcctccctattctcccgagtctaatgggattgctgaaaggaagaaccgcacactgactgacttggtgaatgccatgttagacaccgcgggactgcctaaggcatggtggggggaggcattgttgacctcaaatcatgtgttaaacagagttcctaacagaaataaggacaaaacaccatatgagatatggattggtagaaaaccatcactttcttatttgcgcacatgggggtgcttggcgaaagtcaatgtaccaataacgaagaagcgcaaacttggacctaagactgtggactgtgtctttctgggatatgctcatcatagcattgcctatagatttttaatagttaaatccgaggtactggacatgcatgttggtacaattatggagtctcgtgatgctaccttctttgagagctttttcccaatgaaggatacacatagtggttcgaaccaaccctctgaaataattcccagttcaatcacaccaccagaacaaactgaacatacacatgaacttgtctctgaggaggatgtcagtgaagctcctcgaaggagtaagagacaaaggacggctaagtcttttggtgatgattttactgtgtacctcgtggatgacactcctaagtcaatttcagaagcatatgcatctcctgatgcagactactggaaggaggctgtccatagtgaaatggattccattatcgctaacgggacttgggaggtgacagagcaaccctatgggtgtaaacctgtggggtgcaagtgggtgttcaagaagaagcttaggcctgacggtactattgaaaagtacaaggctcggcttgttgctaagggctatactcagaaagaaggcgaagatttctttgacacttactcacctgttgctagattgaccacaattcgtgtgctactttccctagcagcctcacatggtcttctcgttcatcaaatggacgttaagacagcttttcttaatggagagctggatgaggagatctatatggatcaacctgatgggtttgtagttgaaggtcaagaaggcaaagtgtgcaaattgttgaagtctttgtatggtctgaaacaagctcctaagcaatggcatgagaaatttgacaaaacattgacatctgcaggctttggagtcaatgaggcagataaatgtgtgtactatcgccatggtgggggtgagggagttattttgtgcttgtatgttgacgacatactgatatttgggacaaaccttgaggtgataaatgaggttaaatcattcttgtctcaaaattttgatatgaaagatttgggagtagctgatgttatcttaaacattaagctaattagaggtgagaatgggattacactcttgcagtcccattatgtggagaagatcttgaatcgctttggctacattgatagtaagccttctccaacaccttatgatcctagcttgttgcttcgcaagaacaagagaattgctaggaatcaactggaatactcccaaatcattggctcgttgatgtacctggctagtgcaactaggcctgatatctcctttgctgtgagcaagttgagccgatttacctctaatccgggagatgatcactggcgtgcgcttgagcgagtaatacgctatctgaaaggtactgtggaattggggcttcactatactgggtatcctgcggtactggagggttatagtgattctaactggatctctgatgtggatgagatcaaagccactagtggatatgttttcacactgggtggtggtgctgtttcatggaggtcttgcaaacagacaattttgacgaggtcaaccatggaagcagagctaacggcactggatactgctactgttgaggcagaatggctgcgtgatctattaatggatctgcctgttgttgaaaaaccggtgccggctaatcttatgaactgtgacaatcaaacgacatgtgaaaagacgattgaagtctgtcaggaaattaagaaactccggagttataacgttggattacatccaaatagcgagaaacctggcagatcccttcacgaagggactatcacgaaatgtgatagacaatgcatcgaaggagatgggtttgagacccatagcattcttgaaagaactcacctttgtgagcttgactgttggtcgcagtctatgaagattttgggtgaatcttctaggaagcttactaaagacctaggagtatga

SEQ ID NO: 14988 - DNA, 3909 bp, Oryza sativa
  Clone ID: TFbOSC401186j.C1.o1.fg
atggctggttttgccgatgcactgaggccggataaattcaccggtgtgcattttaagagatggcagatcagggtcactctgtggctgacagctatgaaatgcttctgggtgagtactggcaaacctgaaggagttcttactgctgaacagcagaagcaattcgaggaagccactactctctttgtgggatgcattcttagcgttcttggcgatcgtctggtcgaggtgtatatgcatatgaccgacgctaaggagttgtgggatgcactgaatactaaattcggtgctactgatgctagcaatgatttgtatatcatggagcagtttcatgactacaagatggctgacaaccgttctgtagtcgaacaggctcatgagataaaaaccatggctaaggaactcgaactccttaagtgtgtcttacccgacaaatttgtggccgggtgcattattgcaaaactacctccatcttggagaagtttcggtgctgcactcaaacacaagagacaggaatactccgttgaggggttgattgcgtctcttgatgttgaggagaaagctcgggaaaaagatgccgcgtctaagggcgatggtgggcagtccagtgccaatgttgtgcacaaggcccagaacaagagcaaggggaaatacaaagctcagcagaccaccaacttcaagaagcagaagaagaacaacaacaatcctaatcaggatgagaggacttgctttgtgtgtggccaagttggtcatctggctagaaagtgtccacagcgcaaggggatgaaggcacctgcagggcagacttctaagtctgctaatgtgaccattggcaacactggagatggaagcgggtatggtaatttacctactgttttttcagttaatcaatctactaattggtgggttgatactggggccaatgtacatgtttgtgctgacatctcattgttttcttcttatcaggtcgcacggggttccaccgtcctaatggggaatgggtcacatgcttctgttcatggtgttggcacggtagatctgaagtttacttcgggaaagatcgtgcagctgaagaacgtgcagcatgtcccttctatcgacaggaatcttgttagtggctcccgtctgactagagacggatttaagttggtttttgagtctaataaagtagtcgtgtctaaacatggatattttattggtaaaggttatgagtgcggaggcctgttccgcttttccctttctgatttctgcaataagtctgtgaaccatatttgtggcagtgtggatgatgaggctaatgtttggcattcacgtttatgtcatattaattttgtcttgatgtctcggctttccagcatgtgtttaattcctaagttttctattgtcaaaggttctaagtgccatagttgtgtgcaatcgaagcaacctcgcaagcctcacaaggctgccgaggagagaaatttggcaccactagaactcttacattcagatctttgtgaaatgaatggggtgttgacgaagggtggaaaacgatatttcatgacattgattgatgatgctactagattttgctatgtgtacttgttgaaaacgaaagacgaggctctagactattttaaaatttataaggcagaagttgaaaatcaacttgacagaaagataaaaaggcttaggtctgatcgtggtggagagtttttctcgaacgagtttgacttattctgtgaggaacatggcatcatacatgagaggacgcctccctattctcccgagtctaatgggattgctgaaaggaagaaccgcacactgactgacttggtgaatgccatgttggacaccgcgggactgcctaaggcatggtggggggaggcattgttgacctcaaatcatgtgttaaacagagttcctaacagaaataaggacaaaacaccatatgagatatggattggtagaaaaccaacactttcttatttgcgcacatgggggtgcttggcgaaagtcaatgtaccaataacgaagaagcgaaaacttggacctaagactgtggactgtgtttttctgggatatgctcatcatagcattgcctatagattttcaatagttaaatctgaggtaccggacatgcatgttggtacaattatggagtctcgtgatgctaccttctttgagagctttttcccaatgaaggatacacatagtggttcgaaccaaccctctgaaataattcccagttcaatcacaccaccagaacaaactgaacatacacatgaacttgtctctgaggaggatgtcagtgaagctcctcgaaggagtaagagacaaaggacggctaagtcttttggtgatgatttcactgtgtacctcgtggatgacactcctaagtcaatttcagaagcatatgcatctcctgatgcagactactggaaggaggctgtccgtagtgaaatggattccattatcgctaacgggacttgggaggtgacagagcgaccctatgggtgtaaacctgtggggtgcaagtgggtgttcaagaagaagcttaggcctgacggtactattgaaaagtacaaggctcggcttgttgctaagggctatactcagaaagaaggcgaagatttctttgacacttactcacatgttgctagattgaccacaattcgtgtgctactttccctagcagcctcacatggtcttctcgttcatcaaatggacgttaagacaacttttcttaatggagagctggatgaggagatctatatgtatcaacctgatggttttgtagttgaaggtcaagaaggcaaagtgtgcaaattgttgaagtctttgtatggtctgaaacaagctcctaagcaatggcatgagaaatttgacaaaacattgacatctgcaggctttgcagtcaatgaggcagataaatgtgtgtactatcgccatggtaggggtgagggagttattttgtgcttgtatgttgacgacatactgatatttaagacaaatcttgaggtgataaatgaggttaaatcattcttgtctcaaaattttgatatgaaggatttgggagtagctgatgttatcttaaacattaagctaattagaggtgagaatgggattacactcttgcagtcccattatgtggagaagatcttgaatcgttttggctatattgatagtaagccttctccaacaccttatgatcctagcttgttgcttcgcaagaacaagagaattgctaggaatcaactggaatactcccaaatcattggctcgttgatgtacctggctagtgcaactaggcctgatatctcctttgctgtgagcaagttgagccgatttacctctaatccgggagatgatcactggcgtgcgcttgagcgagtaatgcgctatctgaaaggtactgtggaattggggcttcactatactgggtatcctgcggtactggagggttatagtgattctaactggatctctgatgtggatgagatcaaagccactagtggatatgttttcacactgggtggtggtgctgtttcatggaggtcttgcaaacagaccattttgacgaggtcaaccatggaagcagagctaacggcactggatactgctactgttgaggcagaatggctgcgtgatctattaatggatctgcctgttgttgaaaaaccggtgtcggctatccttatgaactgtgacaatcaaacggtaattgtcaaagtgaatagttctaaggataatatgaaatcgtctagacatgtgaaaagacgattgaagtctgtcaggaaattaagaaactccggagttataacgttggattacatccaaacagcgagaaacctggcagatcctttcacgaagggactatcacgaaatgtgatagacaatgcatcgaaggagatgggtttgagacccatgtga

SEQ ID NO: 14989 - DNA, 3963 bp, Oryza sativa
  Clone ID: TFbOSC401254j.C1.o2.fg
atggctggttttgccgatgcactgaggccggataaattcaccggtgtgcattttaagagatggcagatcagggtcactctgtggctgacagctatgaaatgcttctgggtgagtactggcaaacctgaaggagttcttactgctgaacagcagaagcaattcgaggaagccactactctctttgtgggatgcattcttagcgttcttggcgatcgtctggtcgaggtgtatatgcatatgaccgacgctaaggagttgtgggatgcactgaatactaaattcggtgctactgatgctagcaatgatctgtatatcatggagcagtttcatgactacaaaatggctgacaaccgttctgtagtcgaacaggctcatgagatacaaaccatggctaaggaactcgaactccttaagtgtgtcttacccgacaaatttgtggccgggtgcattattgcaaaacttcctccatcttggaggagtttcggtactgcactcaaacacaagagacaggaatactccgttgaggggttgattgcgtctcttgatgttgaggagaaagctcgggaaaaagatgccgcgtctaagggcgatggtgggcagtccagtgccaatgttgtgcacaaggcccagaacaagagcaaggggaaatacaaagctcagcagaccaccaacttcaagaagcagaagaagaacaacaacaatcctaatcaggatgagaggacttgctttgtgtgtggccaagttggtcatctggctaggaagtgtccacaacgcaaggggatgaaggcacctgcagggcagacttctaagtctgctaatgtgaccattggcaacactggagatggaagcgggtatggtaatttacctactgttttttcagttaatcaatctactaattggtgggttgatactggggccaatgtacatgtttgtgctgacatctcattgttttcttcttatcaggtcgcacggggttccaccgtcctaatggggaatgggtcacatgcttctgttcatggtgttggcacggtagatctgaagtttacttcgggaaagatcgtgcagctgaagaacgtgcagcatgtcccttctatcgacaggaatcttgttagtggctcccgtctgactagagacggatttaagttggtttttgagtctaataaagtagtcgtgtctaaacatggatattttattggtaaaggttatgagtgcggaggcctgttccgcttttccctttctgatttctgcaataagtctgtgaaccatatttgtggcagtgtggatgatgaggctaatgtttggcattcacgtttatgtcatattaattttggcttgatgtctcggctttccagcatgtgtttaattcctaagttttccattgtcaaaggttctaagtgccatagttgtgtgcaatcgaagcaacctcgcaagcctcacaaggctgccgaggagagaaacttggcaccactagaactcctacattcagatctttgtgaaatgaatggggtgttgacgaagggtggaaaacgatatttcatgacattgattgatgatgctactagattttgctatgtgtacttgttgaaaacgaaagacgaggctctagactattttaaaatttataaggcagaagttgaaaatcaacttgacagaaagataaaaaggcttaggtctgatcgtggtggagagtttttctcgaacgagtttgacttattctgtgaggaacatggcatcatacatgagaggacgcctccctattctcccgagtctaatgggattgctgaaaggaagaaccgcacactgactgacttggtgaatgccatgttggacaccgcgggactgcctaaggcatggtggagggaggcattgttgacctcaaatcatgtgttaaacagagttcctaacagaaataaggacaaaacaccatatgagatatggattggtagaaaaccatcactttcttatttgcgcacatgggggtgcttggcgaaagtcaatgtaccaataacgaagaagcgcaaacttggacctaagactgtggactgtgtttttctgggatatgctcatcatagcattgcctatagatttttaatagttaaatccgaggtaccggacatgcatgttggtacaattatggagtctcgtgatgctaccttctttgagagcttttttccaatgaaggatacacatagtggttcgaaccaaccctctgaaataattcccagttcaatcacaccaccagaacaaactgaacatacacatgaacttgtctctgaggaggatgtcagtgaagctcctcgaaggagtaagagacaaaggacggctaagtcttttggtgatgatttcactgtgtacctcgtggatgacactcctaagtcaatttcagaagcatatgcatctcctgatgcagactactggaaggaggctgtccgtagtgaaatggattccattatcgctaacgggacttgggaggtgacagagcgaccctatgggtgtaaacctgtggggtgcaagtgggtgttcaagaagaagcttaggcctgacggtactattgaaaagtacaaggctcggcttgttgctaagggctatactcagaaagaaggcgaagatttctttgacacttactcacctgttgctagattgaccacaattcgtgtgctactttccctagcagcctcacatggtcttctcgttcatcaaatggacgttaagacagcttttcttaatggagagctggatgaggagatctatatggatcaacctgatgggtttgtagttgaaggtcaagaaggcaaagtgtgcaaattgttgaagtctttgtatggtctgaaacaagctcctaagcaatggcatgagaaatttgacaaaacattgacatctgcaggctttgcagtcaatgaggcagataaatgtgtgtactatcgctatggtgggggtgagggagttattttgtgcttgtatgttgacgacatactgatatttgggacaaaccttgaggtgataaatgaggttaaatcattcttgtctcaaaattttgatatgaaagatttgggagtagctgatgttatcttaaacattaagctaattagaggtgagaatgggattactctcttgcagtcccattatgtggagaagatcttgaatcgctttggctacattgatagtaagccttctccaacaccttatgatcctagcttgttgcttcgcaagaacaagagaattgctaggaatcaactggaatactcccaaatcattggctcgttgatgtacctggctagtgcaactaggcctgatatctcctttgctgtgagcaagttgagccgatttacttctaatccgggagatgatcactggcgtgcgcttgagcgagtaatgcgctatctgaaaggtactgtggaattgggacttcactatactgggtatcctgcggtactggagggttatagtgattctaactggatctctgatgtggatgagatcaaagccactagtggatatgttttcacactgggtggtggtgctgtttcatggaggtcttgcaaacagacaattttgacgaggtcaaccatggaagcagaactaacggcactggatactgctactgttgaggcagaatggctgcgtgatctattaatggatctgcctgttgttgaaaaaccggtgccggctatccttatgaactgtgacaatcaaacgacatgtgaaaagacgattgaagtctgtcaggaaattaagaaactccggagttataacgttggattacatccaaacagcgagaaacctggcagatcccttcacgaagggactatcacgaaatgtgatagacaatgcatcgaaggagatgggtttgagacccatagcattcttgaaggaactcacctttgtgagcttgactgttggtcgcagtctatgaagattttgggtgaatcttctaggaagcttactaaagacctaggagtatga

SEQ ID NO: 14990 - DNA, 3891 bp, Oryza sativa
  Clone ID: TFbOSC401274j.C1.o11.fg
atggctggttttgccgatgcactgaggccggataaattcaccggtgtgcattttaagagatggcagatcagggtcactctgtggctgacagctatgaaatgcttctgggtgagtactggcaaacctgaaggagttcttactgctgaacagcagaagcaattcgaggaagccactactctctttgtgggatgcattcttagcattcttggcgatcgtctggtcgaggtgtatatgcatatgaccgacgctaaggagttgtgggatgcactgaatactaaattcggtgctactgatgctagcaatgatctgtatatcatggagcagtttcatgactacaaaatggctgataaccgttctgtagtcgaacaggctcatgagatacaaaccatggctaaggaactcgaactccttaagtgtgtcttacccgacaaatttgtggccgggtgcattattgcaaaactacctccatcttggaggagtttcggtactgcactcaaacacaagagacaggaatactccgttgaggggttgattgcgtctcttgatgttgaggagaaagctcgggaaaaagatgccgcgtctaagggcgatggtgggcagtccagtgccaatgttgtgcacaaggcccagaacaagagcaaggggaaatacaaagctcagcagaccaccaacttcaagaagcagaagaagaacaacaacaatcctaatcaggatgagaggacttgctttgtgtgtggccaagttggtcatctggctaggaagtgtccacagcgcaaggggatgaaggcacctgcagggcagacttctaagtctgctaatgtgaccattggcaacactggagatggaagcgggtatggtaatttacctactgttttttcagttaatcaatctactaattggtgggttgatactggggccaatgtacatgtttgtgctgacatctcattgttttcttcttatcaggtcgcacggggttccaccgtcctaatggggaatgggtcacatgcttctgttcatggtgttggcacggtagatctgaagtttacttcgggaaagatcgtgcagctgaagaacgtgcagcatgtcccttctatcgacaggaatcttgttagtggctcccgtctgactagagacggatttaagttggtttttgagtctaataaagtagtcgtgtctaaacatggatattttattggtaaaggttatgagtgcggaggcctgttccgcttttccctttctgatttctgcagtaagtctgtgaaccatatttgtggcagtgtggatgatgaggctaatgtttggcattcacgtttatgtcatattaattttggcttgatgtctcggctttccagcatgtgtttaattcctcagttttccattgtcaaaggttctaagtgccatagttgtgtgcaatcaaagcaacctcgcaagcctcacaaggctgccgaggagagaaacttggcaccactagaactcctacattcagatctttgtgaaatgaatagggtgttgacgaagggtggaaaacgatatttcatgacattcattgatgatgctactagattttgctatgtgtacttgttgaaaacgaaagacgaggctctagactattttaaaatttataaggcagaagttgaaaatcaacttgacagaaagataaaaaggcttaggtctgatcgtggtgaagagtttttctcgaacgagtttgacttattctgtgaggaacatggcatcatacatgagatgacgcctccctattctcccgagtctaatgggattgctgaaaggaagaatcgcacactgactgacttggtgaatgccatgttggacaccgcgggactgcctaaggcatggtggggggaggcattgttgacctcaaatcatgtgttaaacagagttcctaacagaaataaggacaaaacaccatatgagatatggattggtagaaaaccatcactttcttatttgcgcacatgggggtgcttggcgaaagtcaatgtaccaataacgaagaagcgcaaacttggacctaagactgtggactgtgtttttctgggatatgctcatcatagcattgcctatagatttttaatagttaaatccgaggtaccggacatgcatgttggtacaattatggagtctcgtgatgctatcttctttgagagctttttcccaatgaaggatacacatagtggttcgaaccaaccatctaaaataattcccagttcaatcacaccaccagaacaaactgaacatacacatgaacttgtctctgaggaggatgtcagtgaagctcctcgaaggagtaagagacaaaggacggctaagtcttttgatgatgatttcactgtgtacctcgtggatgacactcctaagtcaatttcagaagcatatgcatctcctgatgcagactactggaaggaggctgtccgtagtgaaatggattccattatcgctaacgggacttgggaggtgacagagcgaccctatgggtgtaaacctgtggggtgcaagtgggtgttcaagaagaagcttaggcctgacggtactattgaaaactacaaggctcggcttgttgctaagggctatactcagaaagaaggcgaagatttctttgacacttactcacctgttgctagattgaccacaattcgtgtgctactttccctagcagcctcacatggtcttctcgttcatcaaatggacgttaagacagcttttcttaatggagagctggatgaggagatctatatggatcaacctgatgggtttgtagttgaaggtcaagaaggcaaagtgtgcaaattgttgaagtctttgtatggtctaaaacaagctcctaagcaatggcatgagaaatttgacaaaacattgacatctgcaggctttgcagtcaatgaggcagataaatgtgtgtactatcgccatggtgggggtgagggagttattttgtgcttgtatgttgacgacatactgatatttgggacaaaccttgaggtgataaatgaggttaaatcattcttgtctcaaaattttgatatgaaggatttgggagtagctgatgttatcttaaacattaagctaattagaggtgagaatgggattacactcttgcagtcccattatgtggagaagatcttgaatcgctttggctacattgatagtaagccttctccaacaccttatgatcctagcttgttgcttcgcaagaacaagagaattgctaggaatcaactggaatactcccaaatcattggctcgttgatgtgcctggctagtgcaactaggcctgatatctcctttgctgtgagcaagttgagccgatttacctctaatccgggagatgatcactggcgtgcgcttgagcgagtaatgcgctatctgaaaggtactgtggaattggggcttcactatactgggtatcctgcggtactggagggttatagtgattctaactggatctctgatgtggatgagatcaaagccactagtggatatgttttcacactgggtggtggtgctgtttcatggaggtcttgcaaacagaccattttgacgaggtcaaccatggaagcagagctaacggcactggatactgctactgttgaggcagaatggctgcgtgatctattaatggatctgcctgttgttgaaaaaccggtgccggctatccttatgaactgtgacaatcaaacgagcattcttgaaagaactcacctttgtgagcttgactgttggtcgcagtctatgaagattttgggtgaatcttctaggaagcttactaaagacctagaaatgaagggaacatgtgtttgtgctgctgagcagagaacacagaacacagagacacacacgcgaggcatgctcaggcacaggcacagccttaagtga

SEQ ID NO: 14991 - DNA, 3099 bp, Oryza sativa
  Clone ID: TFbOSC401369j.C1.o2.fg
atggctggttttgccgatgcactgaggccggataaattcaccggtgtgcattttaagagatggcagatcagggtcactctgtggctgacagctataaaatgcttctgggtgtatatgcatatgaccgacgctaaggagttgtgggatgcactaaatactaaattcggtgctactgatggtagcaatgatctgtatatcatggagcagtttcatgactacaaaatggctgacaaccgttctgtagtcgaacaggctcatgagatacaaaccatggctaaggaactcgaactccttaagtgtgtcttacccgataaatttgtggccgggtgcattattgcaaaactacctccatcttggaggagtttcggtactgcactcaaacacaagagacaggaatactccgttgaggggttgattgcgtctcttgatgttgaggagaaagctcgggaaaaagatgccgcgtctaagggcgatggtgggcagtccagtgctaatgttgtgcacaaggcccagaacaagagcaaggggaaatacaaagctcagcagaccaccaacttcaagaagcagaagaagaacaacaacaatcctaatcaggatgagaggacttgctttgtgtgtggccaagttggtcatctggctaggaagtgtccacagcgcaaggggatgaaggcacctgcagggcagacttctaagtctgctaatgtgaccattggcaacactggagatggaagcgggtatggtaatttacctactgttttttcagttaatcaatctactaattggtgggttgatactggggccaatgtcgcacggggttccaccgtcctaatggggaatgggtcacatgcttctgttcatggtgttggcacggtagatctgaagtttacttcgggaaagatcgtgcaactgaagaacgtgcagcatgtcccttctatcgacaggaatcttgttagtggctcccgtctgactagagacggatttaagttggtttttgagtctaataaagtagtcgtgtctaaacatggatattttattggtaaaggttatgagtgtggaggcctgttccgcttttccctttctgatttctgcaataagtctgtgaaccatatttgtggcagtgtggatgatgaggctaatgtttggcattcacgtttatgtcatattaattttggcttgatgtctcggctttccagcatgtgtttaattcctaagttttccattgtcaaaggttctaagtgccatagttgtgtgcaatcgaagcaacctcgcaagcctcacaaggctgccgaggagagaaacttggcaccactagaactcctacattcagatctttgtgaaatgaatggggtgttgacgaagggtggaaaacgatatttcatgacattgattgatgatgctactagattttgctatgtgtacttgttgaaaacgaaagacgaggctctagactattttaaaatttataaggcagaagttgaaaatcaacttgacagaaagataaaaaggcttaggtctgatcgtggtggagagtttttctcgaacgagtttgacttattctgtgaggaacatggcatcatacatgagaggacgcctccctattctcccgagtctaatgggattgctgaaaggaagaaccgcacactgactgacttgtgggtgttcaagaagaagcttaggcctgacggtactattgaaaagtacaaggctcggcttgttgctaagggctatactcagaaagaaggcgaagatttctttgacacttactcacctgttgctagattgaccacaattcgtgtgctactttccctagcagcctcacatggtcttctcgttcatcaaatggacgttaagacagcttttcttaatggagagctggatgaggagatctatatggatcaacctgatgggtttgtagttgaaggtcaagaaggcaaagtgtgcaaattgttgaagtctttgtatggtctgaaacaagctcctaagcaatggcatgagaaatttgacaaaacattgacatctgcaggctttgcagtcaatgaggcagataaatgtgtgtactatcgccatggtgggggtgagggagttattttgtgcttgtatgttgacgacatactgatatttgggacaaaccttgaggtgataaatgaggttaaatcattcttgtctcaaaattttgatatgaaagatttgggagtagctgatgttatcttaaacattaagctaattagaggtgagaatgagattacactcttgcagtcccattatgtggagaagatcttgaatcgctttggctacattgatagtaagccttctccaacaccttatgatcctagcttgttgcttcgcaagaacaagagaattgctaggaatcatctggaatactcccaaatcattggctcgttgatgtacctggctagtgcaactaggcctgatatctcctttgctgtgagcaagttgagccgatttacctctaatccgggagatgatcactggcgtgcgcttgagcgagtaatgcgctatctgaaaggtactgtggaattggggcttcactatactgggtatcttgcggtactggagggttatagtgattctaactggatctctgatgtggatgagatcaaagccactagtggatatgttttcacactgggtggtggtgctgtttcatggaggttttgcaaacagacaattttgacgaggtcaaccatggaagcagagctaacggcactggatactgctactgttgaggcagaaaggctgcgtgatctattaatggatctgcctgttgttgaaaaaccggtgccggctatccttatgaactgtgacaatcaaacggtaattgtcaaagtgaatagttctaaggataatatgaaatcgtctagacatgtgaaaagacgattgaagtctgttaggaaattaagaaactccggagttataacgttggattacatccaaacagcgagaaacctggcagatcccttcacgaagggactatcacgaaatgtgatagacaatgcatcgaaggagatgggtttgagacccatagcattcttgaaagaactcacctttgtgagcttgactgttggtcgcagtctatga

SEQ ID NO: 14992 - DNA, 4137 bp, Oryza sativa
  Clone ID: TFbOSC401437j.C1.o27.gm
atgcggaaagcaaacagtcaccggcgaagtttcagccgtgtcacgccactgccgattgtcttcactcttcaggcgccgcccgcgggacgagtggacgacaccgcggaggcggccgggagggagcagtggggcacaccgtcgatgcggcggcggaggaggaggaggacgccggccaccgcgccgcggggggatccggcggggaaagcatttcttggaggtggtggtgggggagggaaggcggcggggaaggggcggcgtgcggacggcagaggacagtgcgctggcgacggggggaggagctgcgcgtgggcggcgggggatggcggcgcgcgggtggcggggggaggagcagcgcgcgggctcccccgtcagtcgccgcggtgggcgttgcggtggcacagtggcgctgggatcgggattgggatcgacctccgcgccgcgctgcagtctaggagcaacctcctcgcgtggtcgacggccgctgaggtcgacagccgccgagactactccatcccgctcgccggcgtgcaccggcgatcgggagagcaggtctccggaacctctgccttcgacgtcctgcaccgggagaaggcggcaataagggtcactctgtggctgacagctatgaaatgcttctgggtgagtactggcaaacctgaaggagttcttactgctgaacagcagaagcaattcgaggaagccactactctctttgtgggatgcattcttagcgttcttggcgatcgtctggtcgaggtgtatatgcatatgaccgacgctaaggagttgtgggatgcactgaatactaaattcggtactactgatgctagtaatgatttgtatatcatggagcagtttcatgactacaagatggctgacaaccgttctgtagtcgaacaggctcatgagatacaaaccatggctaaggaactcgaactccttaagtgtgtcttacccgacaaatttgtggctgggtgcattattgcaaaactacctccatcttggagaagttttggtactgcactcaaacacaagagacaggaatactccgttgaggggttgattgcgtctcttgatgttgaggagaaagctcgggaaaaagatgccgcgtctaagggcgatggtgggcagtccagtgccaatgttgtgcacaaggcccagaacaagagcaaggggaaatacaaagctcagcagaccaccaacttcaagaagcagaagaagaacaacaacaatcctaatcaggatgagaggacttgctttgtgtgtggccaagttggtcatctggctaggaagtgtccacagcgcaaggggatgaaggcacctgcagggcagacttctaagtctgctaatgtgaccattggcaacactggagatggaagcgggtatggtaatttacctactgtcgcacggggttccaccgtcctaatggggaatgggtcacatgcttctgttcatggtgttggcacggtagatctgaagtttacttcggaaaagatcgtgcagctgaagaacatgcagcatgtcccttctatcgacaggaatcttgttagtggctcccgtctgactagagacggatttaagttggtttttgagtctaataaagtagtcgtgtctaaacatggatattttattggtaaaggttatgagtgcggaggcctgttccgcttttccctttctgatttctgcaataagtctgtgaaccatatttgtggcagtgtggatgatgaggctaatgtttggcattcacaagttgaaaatcaacttgacagaaagataaaaaggcttaggtctgatcgtggtggagagtttttctcgaacgagtttgacttattctgtgaggaacatggcatcatacatgagaggacgcctccctattctcccaagtctaatgggattgctgaaaggaagaaccgcacactgactgacttggtgaatgccatgttggacaccgcgggactgcctaaggcatgtgaagctcctcgaaggagtaagagacaaaggacggctaagtcttttggtgatgatttcactgtgtacctcgtggatgacactcctaagtcaatttcagaagcatatgcatctcctgatgcagactactggaaggaggctgtccgtagtgaaatggattccattatcgctaacgggacttgggaggtgacagagcgaccctatgggtgtaaacctgtggggtgcaagtgggtgttcaagaagaagcttaggcctgacgcctcacatggtcttctcgttcatcaaatggacgttaagacagcttttcttaatggagagctggatgaggagatctatatgtatcaacctgatgggtttgtagttgaaggctttgcagtcaatgaggcagataaatgtgtgtactatcgccatggtgggggtgagggagttattttgtgcttgtatgttgacgacatactgatatttgggacaaaccttgaggtgataaatgagtcccattatgtggagaagatcttgaatcgttttggctacattgataataagccttctccaacaccttatgatcctagcttgttgcttcgcaagaacaagagaattgctaggaatcaactggaatactcccaaatcattggcttgttgatgtacctggctagtgcaactaggcctgatatctcctttgctgtgagcaagttaagccgatttacctctaatccgggagatgatcattggcgtgcgcttgagcgagtaatgcgctatctgaaaggtactgtggaattggggcttcactatactgggtatcctgcggtactggagggttatagtgattctaactggatctctgatgtggatgagatcaaagccactagtggatatgttttcacactgggtggtggtgctgtttcatggagctcccagcgacgacagcgcttggtcctggcgagccgtcgccatcgcgcctgtacctgcttcctgccgctccggctcccggcgccgacacgttcctcccgcctcgccgccatcaacaagccgacgccgacgccggccttcccgcgcctccccgccgtcatggcaccggtcctcgagcgccctcatggcgtcgccgtcctcaccgcgttcctcccgcctcgccgccaccgccaagccgacgtcggatttgtacttgggaggagctcgccggcctccccgcgcctctgccatgcttccccactgcggcggcggcggccgccaccgccgccgctgtcgcggcgccgcccccctcctctcccgtctcgcgtcggctaccttgcagataagcggatctaccatgggggctatagggtctcgagcctccacttccggtattcccctcctactagttcttcttggatttgccaggcggtgacgtggtcgccccgtcgctggatggcggagcaaactatgaacaaagcacttttaggcggcgactcgttgaggacagcctcgcggatgagcaagggcaggatggacaacggcggcgacgacagcgcgtcaaccggcaaactctctcctcgccgcctccatccccacctccctcccgttgccgcggtctctgtcttccgctcctccctcgccctggatgggagtttcgtcgaagcggcgccctcttcctccacctcgccaccaccgttcccctccagctcccccttcgctctgcccctatggtcctgccaccgacgcccctccccgctcgcgtgtgccgacctcgtcgaccggggtgacttcaacagggcacaccacgtcgcggcgtgccgtgctcgccgccgccgacccttggggagaggatacaaggaaggccatagcggcgacgaaggcatgacgaagacaaaagaggccatggcggcgcccgaccgcgattctgacatgtgcgacacatgcgggtcccacgccgagtcagctgttacgtcggacaataccggggtcaaaaccaccgaatggcctaaagtgaacggcgctgcagcggcggcgcacttcgctagagggcggagcgaagaggcacacggacgggcattcggcgagtgggcataccgctgcagggttcaggagctcaaggctcctcttggatcgttggtggtggctttgaaatcgagcaacgagagcacgtccgtgctgttcccagcgatcgtcgtgcaacgaatgcttccagttccatag

SEQ ID NO: 14993 - DNA, 3633 bp, Oryza sativa
  Clone ID: TFbOSC401487j.C1.o3.fg
atggctggttttgccgatgcactgaggccggataaattcaccggtgtgcattttaagagatggcagatcagggtcactctgtggctgacagctatgaaatgcttctgggtgagtactggcaaacctgaaggagttcttactgctgaacagcagaagcaattcgaggaagccactactctctttgtgggatgcattcttagcgttcttggcgatcgtctggtcgaggtgtatatgcatatgaccgacgctaaggagttgtgggatgcactgaatactaaattcggtgctactgatgctagcaatgatctgtatatcatggagcagtttcatgactacaaaatggctgacaaccgttctgtagtcgaacaggctcatgagatacaaaccatggctaaggaactcgaactccttaagtgtgtcttacccgacaaatttgtggccgggtgcattattgcaaaacttcctccatcttggaggagtttcggtactgcactcaaacacaagagacaggaatactccgttgaggggttgattgcgtctcttgatgttgaggagaaagctcgggaaaaagatgccgcgtctaagggcgatggtgggcagtccagtgccaatgttgtgcacaaggcccagaacaagagcaaggggaaatacaaagctcagcagaccaccaacttcaagaagcagaagaagaacaacaacaatcctaatcaggatgagaggacttgctttgtgtgtggccaagttggtcatctggctaggaagtgtccacaacgcaaggggatgaaggcacctgcagggcagacttctaagtctgctaatgtgaccattggcaacactggagatggaagcgggtatggtcgcacggggttccaccgtcctaatggggaatgggtcacatgcttctgttcatggtgttggcacggtagatctgaagtttacttcgggaaagatcgtgcagctgaagaacgtgcagcatgtcccttctatcgacaggaatcttgttatgagtgcggaggcctgttccgcttttccctttctgatttctgcaataagtctgtgaaccatatttgtggcagtgtggatgatgaggctaatgtttggcattcacgtttatgtcatattaattttggcttgatgtctcggctttccagcatgtgtttaattcctaagttttccattgtcaaaggttctaagtgccatagttgtgtgcaatcgaagcaacctcgcaagcctcacaaggctgccgaggagagaaacttggcaccactagaactcctacattcagatctttgtgaaatgaatggggtgttgacgaagggtggaaaacgatatttcatgacattgattgatgatgctactagattttgctatgtgtacttgttgaaaacgaaagacgaggctctagactattttaaaatttataaggcagaagttgaaaatcaacttgacagaaagataaaaaggcttaggtctgatcgtggtggagagtttttctcgaacgagtttgacttattctgtgaggaacatggcatcatacatgagaggacgcctccctattctcccgagtctaatgggattgctgaaaggaagaaccgcacactgactgacttggtgaatgccatgttggacaccgcgggactgcctaaggcatggtggggggaggcattgttgacctcaaatcatgtgttaaacagagttcctaacagaaataaggacaaaacaccatatgagatatggattggtagaaaaccatcactttcttatttgcgcacatgggggtgcttggcgaaagtcaatgtaccaataacgaagaagcgcaaacttggacctaagactgtggactgtgtttttctgggatatgctcatcatagcattgcctatagatttttaatagttaaatccgaggtaccggacatgcatgttggtacaattatggagtctcgtgatgctaccttctttgagagcttttttccaatgaaggatacacatagtggttcgaaccaaccctctgaaataattcccagttcaatcacaccaccagaacaaactgaacatacacatgaacttgtctctgaggaggatgtcagtgaagctcctcgaaggagtaagagacaaaggacggctaagtcttttggtgatgatttcactgtgtacctcgtggatgacactcctaagtcaatttcagaagcatatgcatctcctgatgcagactactggaaggaggctgtccgtagtgaaatggattccattatcgctaacgggacttgggaggtgacagagcgaccctatgggtgtaaacctgtggggtgcaagtgggtgttcaagaagaagcttaggcctgacgcctcacatggtcttctcgttcatcaaatggacgttaagacagcttttcttaatggagagctggatgaggagatctatatggatcaacctgatgggtttgtagttgaaggtcaagaaggcaaagtgtgcaaattgttgaagtctttgtatggtctgaaacaagctcctaagcaatggcatgagaaatttgacaaaacattgacatctgcaggctttgcagtcaatgaggcagataaatgtgtgtactatcgccatggtgggggtgagggagttattttgtgcttgtatgttgacgacatactgatatttgggacaaaccttgaggtgataaatgaggttaaatcattcttgtctcaaaattttgatatgaaagatttgggagtagctgatgttatcttaaacattaagctaattagaggtgagaatgggattactctcttgcagtcccattatgtggagaagatcttgaatcgctttggctacattgatagtaagccttctccaacaccttatgatcctagcttgttgcttcgcaagaacaagagaattgctaggaatcaactggaatactcccaaatcattggctcgttgatgtacctggctagtgcaactaggcctgatatctcctttgctgtgagcaagttgagccgatttacttctaatccgggagatgatcactggcgtgcgcttgagcgagtaatgcgctatctgaaaggtactgtggaattgggacttcactatactgggtatcctgcggtactggagggttatagtgattctaactggatctctgatgtggatgagatcaaagccactagtggatatgttttcacactgggtggtggtgctgtttcatggaggtcttgcaaacagacaattttgacgaggtcaaccatggaagcagaactaacggcactggatactgctactgttgaggcagaatggctgcgtgatctattaatggatctgcctgttgttgaaaaaccggtgccggctatccttatgaactgtgacaatcaaacgacatgtgaaaagacgattgaagtctgtcaggaaattaagaaactccggagttataacgttggattacatccaaacagcgagaaacctggcagatcccttcacgaagggactatcacgaaatgtgatagacaatgcatcgaaggagatgggtttgagacccatagcattcttgaaggaactcacctttgtgagcttgactgttggtcgcagtctatgaagattttgggtgaatcttctaggaagcttactaaagacctaggagtatga

SEQ ID NO: 14994 - DNA, 3459 bp, Oryza sativa
  Clone ID: TFbOSC401546j.C1.o23.fg
atggctggttttgccgatgcactgaggccggataaattaaccggtgtgcattttaagagatggcaaatcagggtcactctgtggctgacagctatgaaatgcttctgggtgagtactggcaaacctgaaggagttcttactgctgaacagcagaagcaattcgaggaagccactactctctttgtgggatgcattcttagcgttcttggcgatcgtctggtcgaggtgtatatgcatatgaccgacgctaaggagttgtgggatgcactgaatactaaattcggtgctactgatgctagcaatgatctgtatattatggagcagtttcatgactacaagatggctgacaaccgttctgtagtcgaacaggctcatgagatacaaaccatggctagggaactcgaactccttaagtgtgtcttacccgacaaatttgtggccgggtgcattattgcaaaactacctccatcttggagaagtttcggtactgcactcaaacacaagagacaggaatactccgttgaggggttgatagcgtctcttgatgttgaggagaaagctcgggaaaaagatgccgcgtctaagggcgatggtgggcagtccagtgccaatgttgtgcacaaggcccagaacaagagcaaggggaaatacaaagctcagcagaccaccaacttcaagaagcagaagaagaacaacaacaatcctaatcagaatgagaggacttgctttgtgtgtggccaagttggtcatctggctaggaagtgtccacagcgcaaggggatgaaggcacctgcagggcagacttctaagtctgctaatgtgaccattggcaacactggacatggaagcgggtatggtaatttacctactgttttttcagttaatcaatctactaattggtgggttgatactggggccaatgtacatgtttgtgctgacatttcattgttttcttcttatcaggtcgcacggggttccaccgtcctaatagggaatgggtcacatgcttctgttcatggtgttggcacggtagatctgaagtttacttcgggaaagatcgtgcagctgaagaacatgcagcatgtcccttctatcgacaggaatcttgttagtggctcccgtctgactagagacggatttaagttggtttttgagtctaataaagtagtcgtgtctaaacatgtatattttattggtaaaggttatgagtgcggaggcctgttccgtttttccctttctgatttctgcaataagtctgtgaaccatatttgtggcagtgtggatgatgaggctaatgtttggcattcacgtttatgtcatattaattttggcttgatgtctcggctttccagcatgtgtttaattcctaagttttccattgtcaaaggttctaagtgccatagttgtgtgcaatcgaagcaacctcgcaagcctcacaaggctgccgaggagagaaacttggcaccactagaactcctacattcagatctttgtgaaatgaatggggtgttgacgaagggtggaaaacgatatttcatgacattgattgatgatgctactagattttgctacgtgtacttgttgaaaacgaaagacgaggctctagactattttaaaatttataaggcagaagttgaaaatcaacttgacagaaagataaaaaggcttagatctgatcgtggtggagagtttttctcgaacgagtttgacttattctgtgaggaacatggcatcatacatgagaggacgcctccctattctcccgagtctaatgggattgctgaaaggaagaaccgcacactgactgacttggtgaatgccatgttggacaccgcgggactgcctaaggcatggtggggggaggcattgttgacctcaaatcatgtgttaaacatagttcctaacagaaataaggacaaaacaccatatgagatatggattggtaaaaaaccaccactttcttatttgcgcacatgggggtgcttggcgaaagtcaatgtaccaataacgaagaagcgcaaacttggacctaagactgtggactgtgtttttctgggatatgctcatcatagcattgcctatagatttttaatagttaaatccgaggtaccggacatgcatgttggtacaattatggagtctcgtgattctatcttctttgagagctttttcccaatgaaggatacacatagtggttcgaaccaaccctctgaaataattcccagtccaatcacaccaccagaacaaactgaacatacacatgaacttgtctctgaggaggatgtcagtgaagctcctcgaaggagtaagagacaaaggacggctaagtcttttgatgatgatttcactgtgtaccttgtggatgacactcctaagtcaatttcagaagcatatgcatctcctgatgcagactactggaaggaggctgtccgtagtgaaatggattccattatcgctaacggaacttgggaggtgacagagcgaccctatgggtgtaaacctgtggggtgcaagtgggtgttcaagaagaagcttaggcctgacggtactattgaaaagtacaaggctcggcttgttgctaagggctatactcagaaagaaggcgaatatttctttgacacttactcacctgttgctagattgaccacaattcgtgtgctactttccctagcagcctcacatggtcttctcgttcatcaaatggacgttaagacagcttttcttaatggagagctggatgaggagatctatatggatcaacctgatgggtttgtagttgaaggtcaagaaggcaaagtgtgcaaattgttgaagtctttgtatggtctgaaacaagctcctaagcaatggcatgagaaatttgacaaaacattgacatctgcaggctttgcagtcaatgaggcagataaatgtgtgtactatcgccatggtgggggtgagggagttattttgtgcttgtatgttgacgacatactgatatttgggacaaaccttgaggtgataaatgaggttaaatcattcttgtctcaaaattttgatatgaaggatttgggagtagctgatgttatcttaaacattaagctaattagaggtgagaatgggattacactcttgcagtcccattatgtggagaagatcttgaatcgttttggctacattgatagtaagccttctccaacaccttatgatcctagcttgttgcttcgcaagaacaagagaattgctaggaatcaactggaatactcccaaatcattggctcgttgatgtacctggctagtgcaactaggcctgatatctcctttgctgtgagcaagttgagccgatttacctctaatccgggagatgatcactggcgtgcgcttgagcgagtaatgcgctatctgaaaggtactgtggaattggggcttcactatactgggtatcctgcggtactggagggttatagtgattctaactag

SEQ ID NO: 14995 - DNA, 3591 bp, Oryza sativa
  Clone ID: TFbOSC401589j.C1.o1.fg
atgcgcctctgcctcgattcgatcgtatgcctgtttgccaagaggacgtcaaggcggggtgttgacgggatggaacaacgaactagcattgccaacgttttgttggattattcatgttcgaaagtactttctactccctccgtttcacgattcaaatacgccttatatttctgggcggaggagaaagctcgggaaaaagatgccgcgtctaagggcgatggtgggcagtccagtgccaatgttgtgcacaagacccagaacaagagcaaggggaaatacaaagctcagcagaccaccaacttcaagaagaagaagaagaacaacaacaatcctaatcaggatgagaggacttgctttgtgtgtggccaagttggtcatctggctaggaagtgtccacaacgcaaggggatgaaggcacctgcagggcagacttctaagtctgctaatgtgaccattggcaacactggagatggaagcgggtatggtaatttacctactgttttttcagttaatcaatctactaattggtgggttgatactgggaccaatgtacatgtttgtgctgacatctcattgttttcttcttatcaggtcgcacggggttccaccgtcctaatggggaatgggtcacatgcttctgttcatggtgttggcatggtagatctgaagtttacttcgggaaagatcgtgcagctgaagaacgtgcagcatgtcccttctatcgacaggaatcttgttagtggctcccgtctgactagagacggatttaagttggtttttgagtctaataaagtagtcgtgtctaaacatggatattttattggtaaaggttatgagtgcggaggcctgttccgcttttccctttctgatttctgcaataagtctgtgaaccatatttgtggcagtgtggatgatgaggctaatgtttggcattcacgtttatgtcatattaattttggcttgatgtctcggctttccagcatgtgtttaattcctaagctttccattgtcaaaggttctaagtgccatagttgtgtgcaatcgaagcaacctcgcaagcctcacaaggctgccgaggagagaaacttggcaccactagaactcctacattcagatctttgtgaaatgaatggggtgttgacgaagggtggaaaacgatatttcatgacattgattgatgatgctactagattttgctatgtgtacttgttgaaaacgaaagacgaggctctagactattttaaaatttataaggcagaagttgaaaatcaacttgacagaaagataaaaaggcttaggtctgatcgtggtggagagtttttctcgaacgagtttgacttattctgtgaggaacatggcatcatacatgagaggacgcctccctattctctcgagtctaatgggattgctgaaaggaagaaccgcacactgactgacttggtgaatgccatgttggacaccgcgggactgcctaaggcatggtggggggaggcattgttgacctcaaatcatgtgttaaacagagttcctaacagaaataaggacaaaacaccatatgagatatggattggtagaaaactatcactttcttatttgcgcacatgggggtgcttggcgaaagtcaatgtaccaataacgaagaagcgtaaacttggacctaagactgtggactgtgtttttctgggatatgctcatcatagcattgcctatagatttttaatagttaaatctgaggtaccggacatgcatgttggtacaattatggagtctcgtgatgctaccttctttgagagctttttcccaatgaaggatacacatagtggttcgaaccaaccctctgaaataattctcagttcaatcacaccaccagaacaaactgaacatacacatgaacttgtctctgaggaggatgtcagtgaagctcctcgaaggagtaagagacaaaggatggctaagtcttttggtgatgatttcactgtgtacctcgtggatgacactcctaagtcaatttcagaagcatatgcatctcctgatgcagactactggaaggaggctgtccgtagtgaaatggattccattatcgctaacgggacttgggaggtgacagagcgaccctatgggtgtaaacctgtggggtgcaagtgggtgttcaagaagaagcttaggcctgacggtactattgaaaagtacaaggctcggcttgttgctaagggctatactcagaaagaaggcgaagatttctttgatacttactcacctgttgctagattgaccacaattcgtgtgctactttccctagcagcctcacatggtcttctcgttcatcaaatggacgttaagacagcttttcttaatggagagctggatgaggagatctatatgtatcaacctgatgggtttgtagttgaaggtcaagaaggcaaagtgtgcaaattgttgaagtctttgtatggtctgaaacaagctcctaagcaatggcatgagaaatttgacaaaacattgacatctgcaggctttgcagtcaatgaggcagataaatgtgtgtactatcgccatggtgggggtgagggagttattttgtgcttgtatgttgacgacatactgatatttgggacaaaccttgaggtgataaatgaggttaaatcattcttgtctcaaaattttgatatgaaggatttgggagtagctgatgttatcttaaacattaagctaattagaggtgagaatgggattacactcttgcagtcccattatgtggagaagatcttgaatcgttttggctacattgatagtaagccttttccaacaccttatgatcctagcttgttgcttcgcaagaacaagagaattgctaggaatcaactggaatactcccaaatcattggctcgttgatgtacctggctagtgcaactaggcctgatatctcctttgctgtgagcaagttgagccgatttacctctaatccgggagatgatcactggcgtgcgcttgagcgagtaatgcgctatctgaaaggtactgtggaattggggcttcactatactgggtatcctacggtactggagggttatagtgattctaactggatctctgatgtggatgagatcaaagccactagtggatatgttttcacactgggtggtggtgctgtttcatggaggtcttgcaaacagaccattttgacgaggtcaaccatggaagcagagctaacggcactggatactgctactgttgaggcagaatggctgcgtgatctattaatggatctgcctgttgttgaaaaaccggtgccggctatccttatgaactgtgacaatcaaacgacatgtgaaaagacgattgaagtctgtcaggaaattaagaaactccggagttataacgttggattacatccaaacagcgagaaacctggcagatcccttcacgaagggactatcacgaaatgtgatagacaatgcatcgaaggagatgggtttgagacccatagcattcttgaaagaactcacctttgtgagcttgactgttggtcgcagtctatgaagattttgggtgaatcttctaggaagcttactaaagacctaggagtatga

SEQ ID NO: 14996 - DNA, 3963 bp, Oryza sativa
  Clone ID: TFbOSC401620j.C1.o13.fg
atggctggttttgccgatgcactgaggccggataaattcaccggtgtgcattttaagagatggcagatcagggtcactctgtggctgacagctatgaaatgcttctgggtgagtactggcaaacctgaaggagttcttactgctgaacagcagaagcaattcgaggaagccactactctctttgtgggatgcattcttagcattcttggcgatcgtctggtcgaggtgtatatgcatatgaccgacgctaaggagttgtgggatgcactgaatactaaattcggtgctactgatgctagcaatgatctgtatatcatggagcagtttcatgactacaaaatggctgacaaccgttctgtagtcgaacaggctcatgagatacaaaccatggctaaggaactcgaactccttaagtgtgtcttacccgacaaatttgtggccgggtgcattattgcaaaacttcctccatcttggaggagtttcggtactgcactcaaacacaagagacaggaatactccgttgaggggttgattgcgtctcttgatgttgaggagaaagctcgggaaaaagatgccgcgtctaagggcgatggtgggcagtccagtgccaatgttgtgcacaaggcccagaacaagagcaaggggaaatacaaagctcagcagaccaccaacttcaagaagcagaagaagaacaacaacaatcctaatcaggatgagaggacttgctttgtgtgtggccaagttggtcatctggctaggaagtgtccacaacgcaaggggatgaaggcacctgcagggcagacttctaagtctgctaatgtgaccattggcaacactggagatggaagcgggtatggtaatttacctactgttttttcagttaatcaatctactaattggtgggttgatactggggccaatgtacatgtttgtgctgacatctcattgttttcttcttatcaggtcgcacggggttccaccgtcctaatggggaatgggtcacatgcttctgttcatggtgttggcacggtagatctgaagtttacttcgggaaagatcgtgcagctgaagaacgtgcagcatgtcccttctatcgacaggaatcttgttagtggctcccgtctgactagagacggatttaagttggtttttgagtctaataaagtagtcgtgtctaaacatggatattttattggtaaaggttatgagtgcggaggcctgttccgcttttccctttctgatttctgcaataagtctgtgaaccatatttgtggcagtgtggatgatgaggctaatgtttggcattcacgtttatgtcatattaattttggcttgatgtctcggctttccagcatgtgtttaattcctaagttttccattgtcaaaggttctaagtgccatagttgtgtgcaatcgaagcaacctcgcaagcctcacaaggctgccgaggagagaaacttggcaccactagaactcctacattcagatctttgtgaaatgaatggggtgttgacgaagggtggaaaacgatatttcatgacattgattgatgatgctactagattttgctatgtgtacttgttgaaaacgaaagacgaggctctagactattttaaaatttataaggcagaagttgaaaatcaacttgacagaaagataaaaaggcttaggtctgatcgtggtggagagtttttctcgaacgagtttgacttattctgtgaggaacatggcatcatacatgagaggacgcctccctattctcccgagtctaatgggattgctgaaaggaagaaccgcacactgactgacttggtgaatgccatgttggacaccgcgggactgcctaaggcatggtggggggaggcattgttgacctcaaatcatgtgttaaacagagttcctaatagaaataaggacaaaacaccatatgagatatggattggtagaaaaccatcactttcttatttgcgcacatgggggtgcttggcgaaagtcaatgtaccaataacgaagaagcgcaaacttggacctaagactgtggactgtgtttttctgggatatgctcatcatagcattgcctatagatttttaatagttaaatccgaggtaccggacatgcatgttggtacaattatggagtctcgtgatgctaccttctttgagagcttttttccaatgaaggatacacatagtggttcgaaccaaccctctgaaataattcccaattcaatcacaccaccagaacaaactgaacatacacatgaacttgtctctgaggaggatgtcagtgaagctcctcgaaggagtaagagacaaaggacggctaagtcttttggtgatgatttcactgtgtacctcgtggatgacactcctaagtcaatttcagaagcatatgcatctcctgatgcagactactggaaggaggctgtccgtagtgaaatggattccattatcgctaacgggacttgggaggtgacagagcgaccctatgggtgtaaacctgtggggtgcaagtgggtgttcaagaagaagcttaggcctgacggtactattgaaaagtacaaggctcggcttgttgctaagggctatactcagaaagaaggcgaagatttctttgacacttactcacctgttgctagattgaccacaattcgtgtgctactttccctagcagcctcacatggtcttctcgttcatcaaatggacgttaagacagcttttcttaatggagagctggataaggagatctatatggatcaacctgatgggtttgtagttgaaggtcaagaaggcaaagtgtgcaaattgttgaagtctttgtatggtctgaaacaagctcctaagcaatggcatgagaaatttgacaaaacattgacatctgcaggctttgcagtcaatgaggcagataaatgtgtgtactatcgccatggtgggggtgagggagttattttgtgcttgtatgttgacgacatactgatatttgggacaaaccttgaggtgataaatgaggttaaatcattcttgtctcaaaattttgatatgaaagatttgggagtagctgatgttatcttaaacattaagctaattagaggtgagaatgggattactctcttgcagtcccattatgtggagaagatcttgaatcgctttggctacattgatagtaagccttctccaacaccttatgatcctagcttgttgcttcgcaagaacaagagaattgctaggaatcaactggaatactcccaaatcattggctcgttgatgtacctggctagtgcaactaggcctgatatctcctttgctatgagcaagttgagccgatttacttctaatccgggagatgatcactggcgtgcgcttgagcgagtaatgcgctatctgaaaggtactgtggaattgggacttcactatactgggtatcctgcggtactggagggttatagtgattctaactggatctctgatgtggatgagatcaaagccactagtggatatgttttcacactgggtggtggtgctgtttcatggaggtcttgcaaacagacaattttgacgaggtcaaccatggaagcagaactaacggcactggatactgctactgttgaggcagaatggctgcgtgatctattaatggatctgcctgttgttgaaaaaccggtgccggctatccttatgaactgtgacaatcaaacgacatgtgaaaagacgattgaagtctgtcaggaaattaagaaactccggagttataacgttggattacatccaaacagcgagaaacctggcagatcccttcacgaagggactatcacgaaatgtgatagacaatgcatcgaaggagatgggtttgagacccatagcattcttgaaggaactcacctttgtgagcttgactgttggtcgcagtctatgaagattttgggtgaatcttctaggaagcttactaaagacctaggagtatga

SEQ ID NO: 14997 - DNA, 3687 bp, Oryza sativa
  Clone ID: TFbOSC401828j.C1.o40.fg
atggctggttttgccgatgcactgaggccggataaattcaccggtgtgcattttaagagatggcagatcagggtcactctatggctgacagctatgaaatgcttctgggtgagtactggcaaacctgaaggagttcttactgctgaacagcagaagcaattcgaggaagccactactctctttgtgggatgcattcttagcgttcttggcgatcgtctggtcgaggtgtatatgcatatgaccgacgctaaggagttgtgggatgcactgaatactaaattcggtgctactgatgctagcaatgatctgtatatcatggagcagtttcatgactacaaaatggctgacaaccgttctgtagtcgaacaggctcatgagatacaaaccatggctaaggaactcgaactccttaagtgtgtcttacccgacaaatttgtggccgggtgcattattgcaaaacttcctccatcttggaggagtttcggtactgcactcaaacacaagagacaggaatactccgttgaggggttgattgcgtctcttgatgttgaggagaaagctcgggaaaaagatgccgcgtctaagggcgatggtgggcagtccagtgccaatgttgtgcacaaggcccagaacaagagcaaggggaaatacaaagctcagcagaccaccaacttcaagaagcagaagaagaacaacaacaatcctaatcaggatgagaggacttgctttgtgtgtggccaagttggtcatctggctaggaagtgtccacaacgcaaggggatgaaggcacctgcagggcagacttctaagtctgctaatgtgaccattggcaacactggagatggaagcgggtatggtaatttacctactgttttttcagttaatcaatctactaattggtgggttgatactggggccaatgtacatgtttgtgctgacatctcattgttttcttcttatcaggtcgcacggggttccaccgtcctaatggggaatgggtcacatgcttctgttcatggtgttggcacggtagatctgaagtttactttgggaaagatcgtgcagctgaagaacgtgcagcatgtcccttctatcgacaggaatcttgttagtggctcccgtctgactagagacggatttaagttggtttttgagtctaataaagtagtcgtgtctaaacatggatattttattggtaaaggttatgagtgcggaggcctgttccgcttttccctttctgatttctgcaataagtctgtgaaccatatttgtggcagtgtggatgatgaggctaatgtttggcattcacgtttatgtcatattaattttggcttgatgtctcggctttccagcatgtgtttaattcctaagttttccattgtcaaaggttctaagtgccatagttgtgtgcaatcgaagcaacctcgcaagcctcacaaggctgccgaggagagaaacttggcaccactagaactcctacattcagatctttgtgaaatgaatggggtgttgacgaagggtggaaaacgatatttcatgacattgattgatgatgctactagattttgctatgtgtacttgttgaaaacgaaagacgaggctctagactattttaaaatttataaggcagaagttgaaaatcaacttgacagaaagataaaaaggcttaggtctgatcgtggtggagagtttttctcgaacgagtttgacttattctgtgaggaacatggcatcatacatgagaggacgcctccctattctcccgagtctaatgggattgctaaaaggaagaaccgcacactgacagacttggtgaatgccatgttggacaccgcgggactgcctaaggcatggtggggggaggcattgttgacctcaaatcatgtgttaaacagagttcctaacagaaataaggacaaaacaccatatgagatatggattggtagaaaaccatcactttcttatttgcgcacatgggggtgcttggcgaaagtcaatgtaccaataacgaagaagcgcaaacttggacctaagactgtggactgtgtttttctgggatatgctcatcatagcattgcctatagatttttaatagttaaatccgaggtaccggacatgcatgttggtacaattatggagtctcgtgatgctaccttctttgagagcttttttccaatgaaggatacacatagtggttcgaaccaaccctctgaaataattcccagttcaatcacaccaccagaacaaactgaacatacacatgaacttgtctctgaggaggatgtcagtgaagctcctcgaaggagtaagagacaaaggacggctaagtcttttggtgatgatttcactgtgtacctcgtggatgacactcctaagtcaatttcagaagcatatgcatctcctgatgcagactactggaaggaggctgtccgtagtgaaatggattccattatcgctaacgggacttgggaggtgacagagcgaccctatgggtgtaaacctgtggggtgcaagtgggtgttcaagaagaagcttaggcctgacggtactattgaaaagtacaaggctcggcttgttgctaagggctatactcagaaagaaggcgaagatttctttgacacttactcacctgttgctagattgaccacaattcgtgtgctactttccctagcagcctcacatggtcttctcgttcatcaaatggacgttaagacagcttttcttaatggagagctggatgaggagatctatatggatcaacctgatgggtttgtagttgaaggtcaagaaggcaaagtgtgcaaattgttgaagtctttgtatggtctgaaacaagctcctaagcaatggcatgagaaatttgacaaaacattgacatctgcaggctttgcagtcaatgaggcagataaatgtgtgtactatcgccatggtgggggtgagggagttattttgtgcttgtatgttgacgacatactgatatttgggacaaaccttgaggtgataaatgaggttaaatcattcttgtctcaaaattttgatatgaaagatttgggagtagctgatgttatcttaaacattaagctaattagaggtgagaatgggattactctcttgcagtcccattatgtggagaagatcttgaatcgctttggctacattgatagtaagccttctccaacaccttatgatcctagcttgttgcttcgcaagaacaagagaattgctaggaatcaactggaatactcccaaatcattggctcgttgatgtacctggctagtgcaactaggcctgatatctcctttgctgtgagcaagttgagccgatttacttctaatccgggagatgatcactggcgtgcgcttgagcgagtaatgcgctatctgaaaggtactgtggaattgggacttcactatactgggtatcctgcggtactggagggttatagtgattctaactggatctctgatgtggatgagatcaaagccactagtggatatgttttcacactgggtggtggtgctgtttcatggaggtcttgcaaacagacaattttgacgaggtcaaccatggaagcagaactaacggcactggatactgctactgttgaggcagaatggctgcgtgatctattaatggatctgcctgttgttgaaaaaaccggtgccggctatccttatgaactgtga

SEQ ID NO: 14998 - DNA, 3513 bp, Oryza sativa
  Clone ID: TFbOSC401831j.C1.o15.gm
atgggaagcgccttatacccgctcggcgaaatgcggcggtcgcagcgcgccgacgggctcgccgccgtgctcgccatcggcaccgccaaccctcccaactgcgttacccaggaggagttccccgacttctacttccgcgtcaccaacagcgaccacctcactgccctcaaggacaagttcaagcgtatctgtcaggaaatgggcgtgcagaggcggtacctgcaccacacggaggagatgctgtccgcacacccggagttcgtggaccgcgacgcgccgtcgctcgacgcgcggctggacatcgccgcggacgccgtgccggagctggcggcggaggccgccaagaaggcgatcgccgagtggggccgcccggccgccgacatcacccacctcgtcgtcaccaccaactccggcgcccacgtcccgggtgtcgacttccgcctcgtcccgctcctcggcctccgcccctccgtgcgccgcaccatgctccacctcaacggctgcttcgccggctgcgccgcgctccgcctcgccaaggacctcgccgagaacagccgcggcgcgcgcgtcctcgtcgtcgccgccgagctcaccctcatgtacttcaccgggcccgacgagggctgcttcaggacgctcctcgtccagggcctgttcggcgacggcgcggccgccgtcattgtcggcgccgacgccgacgacgtcgagcgcccgctgttcgagatagtgtcggcggcgcagacgatcatcccggagtcggaccacgccctgaacatgcggttcacggagcgccgcttggacggcgtcctcgggcggcaggtcccggggctcatcggggacaacgtcgagcggtgcctcctggacatgttcggcccacttctcggcggcgacggcggcggcgggtggaacgacctgttctgggcggtgcacccgggctcgtcgacgatcatggaccaggtcgacgcggcgctcggcctcgagcccggcaagctggcggcgagccgccgtgtgctcagcgactacgggaacatgtctggcgctacggtgatcttcgcgctggacgagctgcgccggcagcgcaaggaggcggcggcggcgggtgaatggccggagttgggagtgatgatggcgttcggcccggggatgaccgttgatgcgatgctgttgcacgccacctctcatggtgatggggggcttctcgactttttggatatgtggaacatcaaagctgtcgctaggacgtctccgaagatgcacggtggaaagactctgggaaactactccatcccgctcgccggcgtgcaccagcgatcgggagagcaggtctccggaacctctgcctttgacgtcctgcaccgggagaaggcggcaataaggcactgtgattttactatggctggttttgccgatgcactgaggccggataaattcaccggtgtgcattttaagagatggcagatcagggtcactctgtggctgacagctatgaaatgcttctgggtgagtactggcaaacctgaaggagttcttactgctgaacagcagaagcaattcgaggaagccactactctctttgtgggatgcattgttagcgttcttggcgatcgtctggtcgaggtgtatatgcatatgaccgacgctaaggagttgtgggatgcactgaatactaaattcggtgctactgatgctagcaatgatctgtatatcatggagcagtttcatgactacaaaatggctgacaaccgttctgtagtcgaacaggctcatgagatacaaaccatggataaggaactcgaactccttaagtgtgtcttacccgacaaatttgtggccgggtgcattattgcaaaactacctccatcttggaggagtttcggtactgcactcaaacacaagagacaggaatactccgttgaggggttgattgcgtctcttgatgttgaggagaaagctcgggaaaaagatgccgcgtctaagggcgatggtgggcagtccagtgccaatgttgtgcacaaggcccagaacaagagcaaggggaaatacaaagctcagcagaccaccaacttcaagaagcagaagaagaacaacaacaatcctaatcaggatgagaggacttgctttgtgtgtggccaagttggtcatctggctaggaagtgtccacaacgcaaggggatgaaggcacctgcagggcagacttctaagtctgctaatgtgaccattggcaacactggagatggaagcgggtatggtaatttacctactgtcgcacggggttccaccgtcctaatggggaatgggtcacatgcttctgttcatggtgttggcacggtagatctgaagtttacttcgggaaagatcgtgcagctgaagaacgtgcagcatgtcccttctatcgacaggaatcttgatacacatagtggttcgaaccaaccctctgaaataattcccagttcaatcacaccaccagaacaaactgaacatacacatgaacttgtctctgaggaggatgtcagtgaagctcctcgaaggagtaagagacaaaggacggctaagtcttttggtgatgacttcactgtgtacctcgtggatgacactcctaagtcaatttcagaagcatatgcatctcctgatgcagactactggaaggaggctgtccgtagtgaaatggattccattatcgctaacgggacttgggagtcccattatgtggagaagatcttgaatcgctttggctacattgatagtaagccttctccaacaccttatgatcctagcttgttgcttcgcaagaacaagagaattgctaggaatcaactggaatactcccaaatcattggctcgttgatgtacctggctagtgcaactaggcctgatatctcctttgctgtgagcaagttgagccgatttacttctaatccgggagatgatcactggcgtgcgcttgagcgagtaatgcgctatctgaaaggtactgtggaattggggcttcactatactgggtatcctgcggtactggagggttatagtgattctaactggatctctgatgtggatgagatcaaagccactagtggatatgttttcacactgggtggtggtgctgtttcatggaggtcttgcaaacagacaattttgacgaggtcaaccatggaagcagagctaacggcactggatactgctattgttgaggcagaatggctgcgtgatctattaatggatctgcctgttgttgaaaaaccggtgccggctatccttatgaactgtgacaatcaaacggaaattaagaaactccggagttataacgttggattacatccaaacagcgagaaacctggcagatcccttcacgaagggactatcacgaaatgtgatagacaatgcatcgaaggagatgggtttgagacccatagcattcttgaaggaactcacctttgtgagcttgactgttggtcgcagtctatgaagattttgggtgaatcttctaggaagcttactaaagacctaggagtatga

SEQ ID NO: 14999 - DNA, 4185 bp, Oryza sativa
  Clone ID: TFbOSC401876j.C1.o5.fg
atgcagcctccttttgcagttttgttttgctgcaaattcggattcgtttttgttttggaaacgttccgaaaaatccgatctaatgatgcgttcatgctagttttcatctgtaatgtcatgatttatttatggaatagattaaatcattatatgtctataatctcaacaatccaaaaaccttattataggcactgtgattttactttggctggttttgccgatgcactgaggccggataaattcaccggtgtgcattttaagagatggcagatcagggtcactctgtggctgacagttatgaaatgcttctgggtgagtactggcaaacctgaaggagttcttactgctgaacagcagaagcaattcgaggaagccactactctctttgtgggatgcattcttagcgttcttggcgatcgtctggtcgaggtgtatatgcatatgaccgacgctaaggagttgtgggatgcactgaatactaaattcggtgctactgatgctagcaatgatctgtatatcatggagcagtttcatgactacaaaatggctgacaaccgttctgtagtcgaacaggctcatgagatacaaaccatggctaaggaactcgaactccttaagtgtgttttacccgacaaatttgtggccgggtgcattattgcaaaactacctccatcttggaggagtttcggtactgcactcaaacacaagagacaggaatactccgttgaggggttgattgcgtctcttgatgttgaggagaaagctcgggaaaaagatgccgcgtctaagggcgatggtgggcagtccagtgccaatgttgtgcacaaggcccagaacaagagcaaggggaaatacaaagctcagcagaccaccaacttcaagaagcagaagaagaacaacaacaatcctaatcaggatgagaggacttgctttgtgtgtggccaagttggtcatctggctaggaagtgtccacagcgcaaggggatgaaggcacctgcagggcagacttctaagtctgctaatgtgaccattggcaacactggagatggaagcgggtatggtaatttacctgctgttttttcagttaatcaatctactaattggtgggttgatactggggccaatgtacatgtttgtgctgacatctcattgttttcttcttatcaggtcgcacggggttccaccgtcctaatggggaatgggtcacatgcttctgttcatggtgttggcacggtagatctgaagtttacttcgggaaagatcgtgcagctgaagaacgtgcagcatgtcccttctatcgacaggaatcttgttagtggctcccgtctgactagagacggatttaagttggtttttgagtctaataaagtagtcgtgtctaaacatggatattttattggtaaaggttatgagtgcggaggcctgttccgcttttccctttctgatttctgcaataagtctgtgaaccatatttgtggcagtgtggatgatgaggctaatgtttggcattcacgtttatgtcatattaattttggcttgatgtctcggctttccagcatgtgtttaattcctaagttttccattgtcaaaggttctaagtgccatagttgtgtgcaatcaaagcaacctcgcaagcctcacaaggctgccgaggagagaaacttggcaccactggaactcctacattcagatctttgtgaaatgaatggggtgttgacgaagggtggaaaacgatatttcatgacattcattgatgatgctactagattttgctatgtgtacttgttgaaaacgaaagacgaggctctagactattttaaaatttataaggcagaagttgaaaatcaacttgacagaaagataaaaaggcttaggtctgatcgtggtggagagtttttctcgaacgagtttgacttattctgtgaggaacatggcatcatacatgagatgacgcctccctattctcccgagtctaatgggattgctgaaaggaagaatcgcacactgactgacttggtgaatgccatgttggacaccgcgggactgcctaaggcatggtggggggaggcattgttgacctcaaatcatgtgttaaacagagttcctaacagaaataaggacaaaacaccatatgagatatggattggtagaaaaccatcactttcttatttgcgcacatgggggtgcttggcgaaagtcaatgtaccaataacgaagaagcgcaaacttggacctaagactgtggactgtgtttttctgggatatgctcatcatagcattgcctatagatttttaatagttaaatccgaggtaccggacatgcatgttggtacaattatggagtctcgtgatgctatcttctttgagagctttttcccaatgaaggatacacatagtggttcgaaccaaccatctgaaataattcccagttcaatcacaccaccagaacaaactgaacatacacatgaacttgtctctgaggaggatgtcagtgaagctcctcgaaggagtaagagacaaaggacggctaagtcttttggtgatgatttcactgtgtacctcgtggatgacactcctaagtcaatttcagaagcatatgcatctcctgatgcagactactggaaggaggctgtccgtagtgaaatggattccattatcgctaacgggacttgggaggtgacagagcgaccctatgggtgtaaacctgtggggtgcaagtgggtgttcaagaagaagcttaggcctgacggtactattgaaaagtacaaggctcggcttgttgctaagggctatactcagaaagaaggcgaagatttctttgacacttactcacctgttgctagattgaccacaattcgtgtgctactttccctagcagcctcacatggtcttctcgttcatcaaatggacgttaagacagcttttcttaatggagagctggatgaggagatctatatggatcaacctgatgggtttgtagttgaaggtcaagaaggcaaagtgtgcaaattgttgaagtctttgtatggtctaaaacaagctcctaagcaatggcatgagaaatttgacaaaacattgacatctgcaggctttgcagtcaatgaggcagataaatgtgtgtactatcgccatggtgggggtgagggagttattttgtgcttgtatgttgacgacatactgatatttgggacaaaccttgaggtgataaatgaggttaaatcattcttgtctcaaaattttgatatgaaggatttgggagtagctgatgttatcttaaacattaagctaattagaggtgagaatgggattacactcttgcagtcccattatgtggagaagattttgaatcgctttggctacattgatagtaagccttctccaacaccttataaacctagcttgttgcttcgcaagaacaagagaattgctaggaatcaactggaatactcccaaatcattggctcgttgatgtacctggctagtgcaactaggactgatatctcctttgctgtgagcaagttgagccgatttacctttaatccgggagatgatcactggcgtgcgcttgagcgagtaatgcgctatctgaaaggtactgtggaattggggcttcactatactgggtatcctgcggtactggagggttatagtgattctaactggatctctgatgtggatgagatcaaagccactagtggatatgttttcacactgggtggtggtgctgtttcatggaggtcttgcaaacagaccattttgacgaggtcaaccatggaagcagagctaacggcactggatactgctactgttgaggcagaatggctgcgtgatctattaatggatctgcctgttgttgaaaaaccggtgccggctatccttatgaactgtgacaatcaaacgacatgtgaaaagacgattgaagtctgtcaggaaattaagaaactccggagttataacgttggattacatccaaacagcgagaaacctggcagatcccttcacgaagggactatcacgaaatgtgatagacaatgcatcgaaggagatgggtttgagacccatatgagttatactatggtgagcattcttgaaagaactcacctttgtgagcttgactgttggtcgcagtctatgaagattttgggtgaatcttctaggaagcttactaaagacctaggagtatga

SEQ ID NO: 15000 - DNA, 3939 bp, Oryza sativa
  Clone ID: TFbOSC402429j.C1.o11.fg
atggctggttttgccgatgcactgaggccggataaattcaccggtgtgcattttaagagatggcagatcagggtcactctgtggctgacagctatgaaatgcttctgggtgagtactggcaaacctgaaggagttcttactgctgaacagcagaagcaattcgaggaagccactactctctttgtgggatgcattcttagcgttcttggcgatcgtctggtcgaggtgtatatgcatatgaccgacgctaaggagttgtgggatgcactgaatactaaattcggtgctactgatgctagcaatgatctgtatatcatggagcagtttcatgactacaagatggctgacaaccgttctgtagtcgaacaggctcatgagatacaaaccatggctaaggaactcgaactccttaagtgtgtcttacccgacaaatttgtggccgggtgcattattgcaaaactacctccatcttggagaagtttcggtactgcactcaaacacaagagacaggaatactccgttgaggggttgatagcgtctcttgatgttgaggagaaagctcgggaaaaagatgccgcgtctaagggcgatggtgggcagtccagtgccaatgttgtgcacaaggcccagaacaagagcaaggggaaatacaaagctcagcagaccaccaacttcaagaagcagaagaagaacaacaacaatcctaatcaggatgagaggacttgctttgtgtgtggccaagttggtcatctggctaggaagtgtccacagcgcaaggggatgaaggcacctgcagggcagacttctaagtctgctaatgtgaccattggcaacactggagatggaagcgggtatggtaatttacctactgttttttcagttaatcaatctactaattggtgggttgatactggggccaatgtacatgtttgtgctgacatctcattgttttcttcttatcaggtcgcacggggttccaccgtcctaatggggaatgggtcacatgcttctgttcatggtgttggcacggtagatctgaagtttacttcgggaaagatcgtgcagctgaagaacgtgcagcatgtcccttctatcgaccggaatcttgttagtggctcccgtctgactagagacggatttaagttggtttttgagtctaataaagtagtcgtgtctaaacatggatattttattggtaaaggttatgagtgcggaggcctgttccgcttttccctttctgatttctgcaataagtctgtgaaccatatttgtggcagtgtggatgatgaggctaatgtttggcattcacgtttatgtcatattaattttggcttgatgtctcggctttccagcatgtgtttaattcctaagttttccattgtcaaaagttctaagtgccatagttgtgtgcaatcgaagcaacctcgcaagcctcacaaggctgccaaggagagaaacttggcaccactagaacttctacattcagatctttgtgaaatgaatggggtgttgacgaagggtggaaaacgatatttcatgacattgattgatgatgctactagattttgctatgtgtacttgttgaaaacgaaagacgaggctctagactattttaaaatttataaggcagaaattgaaaatcaacttgacagaaagataaaaaggcttaggtctgatcgtggtggagagtttttctcgaacgagtttgacttattctgtgaggaacatggcatcatacatgagaggacgcctccctattctcccgagtctaatgggattgctgaaaggaagaaccgcacactgactgacttggtgaatgccatgttggacaccgcgggactgcctaaggcatggtggggggaggcattgttgacctcaaatcatgtgttaaacagagttcctaacagaaataaggacaaaacaccatatgagatatggattggtagaaaaccatcactttcttatttgcgcacatgggggtgcttggcgaaagtcaatgtaccaataacgaagaagcgcaaacttggacctaagactgtggactgtgtttttctgggatatgctcatcatagcattgcctatagatttttaatagttaaatccgaggtaccagacatgcatgttggtacaattatggagtctcgtgatgctaccttctttgagagctttttcccaatgaaggatacacatagtggttcgaaccaaccctctgaaataattcccagttcaatcacaccatcagaacaaactgaacatacacatgaacttgtctctgaggaggatgtcagtgaagctcctcgaaggagtaagagacaaaggacggctaagtcttttggtgatgatttcactgtgtacctcgtggatgacactcctaagtcaatttcagaagcatatgcatctcctgatgcagactactggaaggaggctatctgtagcgaaatggattccattatcgctaacgggacttgggaggtgacagagcgaccctatgggtgtaaacctgtggggtgcaagtgggtgttcaagaagaagcttaggcctgacggtactattgaaaagtacaaggctcggcttgttgctaagggctatactcagaaagaaggcgaagatttctttgacacttactcacctgttgctagattgaccacaattcgtgtgctactttccctagcagcctcacatggtcttctcgttcatcaaatggacgttaagacagcttttcttaatggagagctggatgaggagatctatatggatcaacctgatgggtttgtagttgaaggtcaagaaggcaaagtgtgcaaattgttgaagtctttgtatggtctgaaacaagctcctaagcaatggcatgagaaatttgacaaaacattgatatctgcaggctttgcagtcaatgaagcagataaatgtgtgtactatcgccatggtgggggtgagggagttattttgtgcttgtatgttgacgacatactgatatttgggacaaaccttgaggtgataaatgaggttaaatcattcttgtctcaaaattttgatatgaaggatttgggagtagctgatgttatcttaaacattaagttaattagaggtgagaatgggattacactcttgcagtcccattatgtggagaagatcttgaatcgctttggctacattgatagtaagccttctccaacaccttatgatcctagcttgttgcttcgcaagaacaagagaattgctaggaatcaactggaatactcccaaatcattggctcgttgatgtacctggctagtgcaactaggcctgatatctcctttgctgtgagcaagttgagccgatttacctctaatccgggagatgatcactggcgtgcgcttgagcgagtaatgcgctatctgaaaggtactgtggaattggggtttcactatactgggtatcctgcggtactggagggttatagtgattctaactggatctctgatgtggatgagatcaaagccactagtggatatgttttcacactgggtggtggtgctgtttcatggaggtcttgcaaacagaccattttgacgaggtcaaccatggaagcagagctaacggcactggatactgctactgttgaggcagaatggctgcgtgatctattaatggatctgcctgttgttgaaaaaccggtgccagctatccttatgaactgtgacaatcaaacgacatgtgaaaagacgattgaagtctgtcaggaaattaagaaactccggagttataacgttggattacatccaaacagcgagaaatctggcagatcccttcacgaagggactatcacgaaatgtgatagacaatgcatcgaaggagatgggtttgagacccatattaaatcattatatgtctataatctcaacacaaacaatcagaaaaaacaaccgtttctgggcacagatatcacaacctga

SEQ ID NO: 15001 - DNA, 3963 bp, Oryza sativa
  Clone ID: TFbOSC402924j.C1.o5.fg
atggctggttttgccgatgcactgaggccggataaattcaccggtgtgcattttaagagatggcagatcagggtcactctgtggctgacagctatgaaatgcttctgggtgagtactggcaaacctgaagaagttcttactgctgaacagcagaagcaattcgaggaagccactactctctttgtgggatgcattcttagcgttcttggcgatcgtctggtcgaggtgtatatgcatatgaccgacgctaaggagttgtgggatgcactgaatactaaattcggtgctactgatgctagcaatgatctgtatatcatggagcagtttcatgactataaaatggctgacaaccgttctgtagtcgaacaggctcatgagatacaaaccatggctaaggaactcgaactccttaagtgtgtcttacccgacaaatttgtggccgggtgcattattgcaaaactacctccatcttggaggagtttcggtactgcactcaaacacaagagacaggaatactccgttgaggggttgattgcgtctcttgatgttgaggagaaagctcgggaaaaagatgccgcgtctaagggcgatggtgggcagtccagtgccaatgttgtgcacaaggcccagaacaagagcaatgggaaatacaaagctcagcagaccaccaacttcaagaagcagaagaagaacaacaacaatcctaatcaggatgagaggacttgctttgtgtgtggccaagttggtcatctggctaggaagtgtccacagcgcaaggggatgaaggcacctgcagggcagacttctaagtctgctaatgtgaccattggtaacactggagatggaagcgggtatggtaatttacctactgttttttcagttaatcaatctactaattggtgggttgatactggggccaatgtacatgtttgtgctgacatctcattgttttcttcttatcaggtcgcacggggttccaccgtcctaatggggaatgggtcacatgcttctgttcatggtgttggcacggtagatctgaagtttacttcgggaaagatcgtgcagctgaagaacgtgcaacatgtcccttctatcgacaggaatcttgttagtggctcccgtctgactagagacggatttaagttggtttttgagtctaataaagtagtcgtgtctaaacatggatattttattggtaaaggttatgagtacggaggcctgttccgcttttccctttctgatttctgcaataagtctgtgaaccatatttgtggtactgtggatgatgaggctaatgtttggcattcacgtttatgtcatattaattttggcttgatgtctcggctttccagcatgtgtttaattcctaagttttccattgtcaaaggttctaagtgccatagttgtgtgcaatcgaagcaacctcgcaagcctcacaaggctgccgaggagagaaacttggcaccactagaactcctacattcagatctttgtgaaatgaatggggtgttgacgaagggtggaaaacgatatttcatgacattgattgatgatgctactagattttgctatgtgtacttgttaaaaacgaaagacgaggctctagactattttaaaatttataaggcagaagttgaaaatcaacttgacagaaagataaaaaggcttaggtctgatcgtggtggagagtttttctcgaacgagtttgacttattctgtgaggaacatggcatcatacatgagaggacgcctccctattctcccgagtctaatgggattgctgaaaggaagaaccgcacactgactgacttggtgaatgccatgttggacaccgcgggactgcctaaggcatggtggggggaggcattgttgacctcaaatcatgtgttaaacagagttcctaacagaaataaggacaaaacaccatatgagatatggattggtagaaaaccatcactttcttatttgcgcacatgggggtgcttggtgaaagtcaatgtaccaataacgaagaagcgcaaacttggacctaagactgtggactgtgtttttctgggatatgctcatcatagcattgcctacagatttttaatagttaaatccgaggtaccggacatgcatgttggtacaattatggagtctcgtgatgctaccttctttgagagctttttcccaatgaaggatacaaatagtggttcgaaccaaccctctgaaataattcccagttcaatcacaccaccagaacaaactgaacatacacatgaacttgtctctgaggaggatgtcagtgaagctcctcgaaggagtaagagacaaaggacggctaagtcttttggtgatgatttcactgtgtacctcgtggatgacactcctaagtcaatttcagaagcatatgcatctcctgatgcagactactggaaggaggctgtccgtagtgaaatggattccattatcgctaacgggacttgggaggtgacagagcgaccctatgggtgtaaacctgtggggtgcaagtgggtgttcaagaagaagcttaggcctgacggtactattgaaaagtacaaggctcggcttgttgctaagggctatactcagaaagaaggcgaagatttctttgacacttactcacctgttgctagattgaccacaattcgtgtgctactttccctagcagcctcacatggtcttctcgttcatcaaatggacgttaagacagcttttcttaatggagagctggatgaggagatctatatggatcaacctgatgggtttgtagttgaaggtcaagaaggcaaagtgtgcaaattgttgaagtctttgtatggtctgaaacaagctcctaagcaatggcatgagaaatttgacaaaacattgacatctgcaggctttgcagtcaatgaggcagataaatgtgtgtactatcgccatggtgggggtgagggagttattttgtgcttgtatgttgacgacatactgatatttgggacaaaccttgaggtgataaatgaggttaaatcattcttgtctcaaaattttgatatgaaggatttgggagtagctgatgttatcttaaacattaagctaattagaggtgagaatgggattacactcttgcagtcccattatgtggagaagatcttgaatcgctttggctacattgatagtaagccttctccaacaccttatgatcctagcttgttgcttcgcaagaacaagagaattgctaggaatcaactggaatactcccaaatcattggctcgttgatgtacctggctagtgcaactaggcctgatatctcctttgctgtgagcaagttgagccgatttacctctaatccgggagatgatcactggcgtgcgcttgagcgagtaatgcgctatctgaaaggtactgtggaattggggcttcactatactgggtatcctgcggtactggagggttatagtgattctaactggatctctgatgtggatgagatcaaagccactagtggatatgttttcacactgggtggtggtgctgtttcatggaggtcttgcaaacagaccattttgacgaggtcaaccatggaagcagagctaacggcactggatactgctactgttgaggcagaatggctgcgtgatctattaatggatctgcctgttgttgaaaaaccggtgccggctatccttatgaactgtgacaatcaaacgacatgtgaaaagacgattgaagtctgtcaggaaattaagaaactccggagttataacgttggattacatccaaacagcgagaaacctggcagatcccttcacgaagggactatcacgaaatgtgatagacaatgcatcgaaggagatgggtttgagacccatagcattcttgaaagaactcacctttgtgagcttgactgttggtcgcagtctatgaagattttgggtgaatcttctaggaagcttactaaagacctaggagtatga

SEQ ID NO: 15002 - DNA, 4611 bp, Oryza sativa
  Clone ID: TFbOSC403329j.C1.o39.gm
atgtactggtcggtgtccagtgctgtcatgtggggccgcacctatgtgcgtcagcgtcgagcccgcgacgtcaggagagccgcggcccgagcacgatcctcgccgcgccgcgccgtctccccaccacccgccacatcctcgccaccaccagccgccgcgccaccatcctcggactcgtcctccggcgcgtcctgcccacccggcatgggtgaccccaatgacctcaagacctccgtggaggctctcaccaccgccatgaaggagatgcaggcctcgatcgccgccaacgccaaggccattgccgccctctcctccggccgcacctcatcctcgggcgccacgacagactccggcgaaccccgcaccgtccggccgccgcgatttcagaaaatggatttcccgcgctatgatgggaagtccgatccgctcaccttcctcaattggtgtgagtcgtacttccaccaacaacggatcatggacgaagagaaggtttggatggcgtcctacaaccttgaagatggtgcacagctatggtacatgcaagtccaggcggatgagggtaaaccgtcgtggcgtcgcttccgggaactcctcgtcctacggtacgggccgccactccgttcggctcccctcttcgagttagccgactgccgccgcactaccaccgtggaggactaccaggaccacttccaagcgctcctgccccgcgccggccgcctgacgaaggcacaacgggttcagctcttcaccggcggtctgcttcctccgctcagtctcaaggtccagatgcagaatccgcagtccctcgtcaccgccatgagtttggctcggcagttcgagctgatggagcagtgcactgccaccctggccaaagcccctggccacgggatactgccgacgctgggtccgcgccaggccccgccccagccgccggcgcctagggccgcatcgccccctgtcctcatcgacggtcgcccggtgaagcggctctctcaggcggagcaggacgagcgtcgccgcctcgggctatgctttaactactactccatcccgctcgccggcgtgcaccagcgatcaggagagcaggtctccggaacctctgcctttgacgtcctgcaccgggagaaggcggcaataaggcactgtgattttactatggctggttttgctgatgcactgaggccggataaattcaccggtgtgcattttaagagatggcagatcagggtcactctgtggctgacagctatgaaatgcttctgggtgagtactggcaaacctgaaggaattcttactgctgaacagcagaagcaattcgaggaagccactactctctttgtgggatgcattcttagcgttcttggcgatcgtctggtcgaggtgtatatgcatatgaccgacgctaaggagttgtgggatgcactgaatactaaattcggtgctactgatgctagcaatgatctgtatatcatggagcagtttcatgactacaaaatggctgacaaccgttctgtagtcgaacaggctcaagagatacaaaccatggctaaggaactcgaactccttaagtgtgtcttacccgacaaatttgtggccgggtgcattattgcaaaactacctccatcttggaggagtttcggtactgcactcaaacacaagagacaggaatactccgttgaggggttgattgcgtctcttgatgttgaggagaaagctcgggaaaaagatgccgcgtctaagggcgatggtgggcagtccagtgccaatgttgtgcacaaggcccagaacaagagcaaggggaaatacaaagctcagcagaccaccaacttcaagaagcagaagaagaacaacaacaatcctaatcaggatgagaggacttgctttgtgtgtggccaagttggtcatctggctaggaagtgtccacaacgcaaggggatgaaggcacctgcagggcagacttctaagtctgctaatgtgaccattggcaacactggagatggaagcgggtatggtaatttacctactgtcgcacggggttccaccgtcctaatggggaatgggtcacatgcttctgttcatggtgttggcacggtagatctgaagtttacttcgggaaagatcgtgcagctgaagaacgtgcagcatgtcccttctatcgacaggaatcttgttagtggctcccgtctgactagagacggatttaagttggtttttgagtctaataaagtagtcgtgtctaaacatggatattttattggtaaaggttatgagtgcggaggcctgttccgcttttccctttctgatttctgcaataacatgtgtttaattcctaagttttccattgtcaaaggttctaagtgccatagttgtgtgcaatcgaagcaacctcgcaagcctcacaaggctgccgaggagagaaacttggcaccactagaactcctacattcagatctttgtgaaatgaatggggtgttgacgaaggaagttgaaaatcaacttgacagaaagataaaaaggcttaggtctgatcgtggtggagagtttttctcgaacgagtttgacttattctgtgaggaacatggcatcatacatgagaggacacctccctattctcccgagtctaatgggattgctgaaaggaagaaccgcacactgactgacttggtgaatgccatgttggacaccgcgggactgcctaaggcatgtgaagctcctcgaaggagtaagagacaaaggacggctaagtcttttggtgatgatttcactgtgtacctcgtggatgacactcctaagtcaatttcagaagcatatgcatctcctgatgcagactactggaaggaggctgtccatagtgaaatggattccattatcgctaacgggacttgggaggtgacagagcgaccctatgggtgtaaacctgtggggtgcaagtgggtgttcaagaagaagcttaggcctgacgcctcacatggtcttctcgttcatcaaatggacgttaagacagcttttcttaatggagagctggatgaggagatctatatggatcaacctgatgggtttgtagttgaagtcaatgaggcagataaatgtgtgtactatcgccatggtgggggtgagggagttattttgtgcttgtatgttgacgacatactgatatttgggacaaaccttgaggtgataaatgagtcccattatgtggagaagatcttgaatcgctttggctatattgatagtaagccttctccaacaccttatgatcctagcttgttgcttcgcaagaacaagagaattgctaggaatcaactggaatactcccaaatcattggctcgttgatgtacctggctagtgcaactaggcctgatatctcctttgctgtgagcaagttgagccgatttacttctaatccgggagatgatcactggcgtgcgcttgagcgagtaatgcgctatctgaaaggtactgtggaattgtggcttcactatactgggtatcctgcggtactggagggttatagtgattctaactggatctctgatgtggatgagatcaaagccactagtggatatgttttcacactgggtggtggtgctgtttcatggagcaaagatgttgtcctgcagagcattcttgaaggaactcacctttgtgagcttgactgttggtcgcagtctatgaagattttggactactccatcccgctcgccggcgtgcaccagcgatcgggagagcaggtctccggaacctctgcctttgacgtcctgcaccgggagaaggcggcaataagccgtggccataacaaaatctgcaagcacttgttcctcttggactgcgctatggatgacgacgacgacaccgacgcggctgaggaaccgcaggacttggagtccccggtgttctccctccacgcgatcgccggcgtaccggtcgccgacaccatgcaggtacaggtgaccgtcggcgccaccaccctcaccgctctcctcgacagcggctccacccacagcttcattgccgaggaggcagcgtgccgcacgggtctgccggtccagccacgcccacgcatgacggcgactgtggccaatggcgagaaggtcgcatgtcctggcgtcatccgacaggccgtgctctccatcgacggctcgctcttcaccgtcgatctctttgtcattccacttgcaggttacgacatggtgctcggcacccagtggatggcgtctctggggccgattgtttgggacttcacggagcggacgatgtccttccagtaccacggccgcaccatctgctgggcaggcgtgccgtcgtctcctgcaccacgcatccgagtcacaacagcggccagcgagtcgctactcgatgagctcctagccgacttcggcgacgtcttcgccgagcccaaggggctgcccctgcagcatgctcgagatcacaccatcgtcctcaagccggacgcgccccctgtcgctgttcgtccgtaccggtacccggcggcccataaggatgaactggaacggcagtgcgccgctatgatcgagcagggcatcgtccgccgtagcgactcggcgttctcttcaccagtccttctcattaagaaggctgacgggtcgtga

SEQ ID NO: 15003 - DNA, 3963 bp, Oryza sativa
  Clone ID: TFbOSC404997j.C1.o16.fg
atggctggttttgccgatgcactgaggccggataaattcaccggtgtgcattttaagagatggcagatcagggtcactctgtggctgacagctatgaaatgcttctgggtgagtactggcaaacctgaaggagttcttactgctgaacaacagaagcaattcgaggaagctactactctctttgtgggatgcattcttagcgttcttggcgattgtctggtcgaggtgtatatgcatatgaccgacgctaaggagttgtgggatgcactgaatactaaattcggtgctactgatgctagcaatgatctgtatatcatggaggagtttcatgactacaaaatggctgacaaccgttctgtagtcgaacaggctcatgagatacaaaccatggctaaggaactcgaactccttaagtgtgtcttacccgacaaatttgtggccgggtgcattattgcaaaactacctccatcttggaggagtttcggtactgcactcaaacacaagagacaggaatactccgttgaggggttgattgcgtctcttgatgttgaggagaaagctcgggaaaaagatgccgcgtctaagggcgatggtgggcagtccagtgccaatgttgtgcacaaggcccagaacaagagcaaggggaaatacaaagctcagcagaccaccaactttaagaagcagaagaagaacaacaacaatcctaatcaggatgagaggacttgctttgtgtgtggccaagttggtcatctggctaggaagtgtccacagcgcaaggggatgaaggcacctgcagggcagacttctaagtctgctaatgtgaccattggcaacactggagatggaagcgggtatggtaatttacctactgttttttcagttaatcaatctactaattggtgggttgatactggggccaatgtacatgtttgtgctgacatctcattgttttcttcttatcaggtcgcacggggttccaccgtcctaatggggaatgggtcacatgcttctgttcatggtgttggcacggtagatctgaagtttacttcgggaaagatcgtgcagctgaagaacgtgcagcatgtcccttctatcgacaggaatcttgttagtggctcccgtctgactagagacggatttaagttggtttttgagtctaataaagtagtcgtgtctaaacatggatattttattggtaaaggttatgagtgcggaggcctgttccgcttttccctttctgatttctgcaataagtctgtgaaccatatttgtggcagtgtggatgatgaggctaatgtttggcattcacgtttatgtcatattaattttggcttgatgtctcggctttccagcatgtgtttaattcctaagttttccattgtcaaaggttctaagtgccatagttgtgtgcaatcgaagcaacctcgcaagcctcacaaggctgccgaggagagaaacttggcaccactagaactcctacattcagatctttgtgaaatgaatggggtgttgacgaagggtggaaaacgatatttcatgacattgattgatgatgctactagattttgctatgtgtacttattgaaaacgaaagacgaggctctagactattttaaaatttataaggcagaagttgaaaatcaacttgacagaaagataaaaaggcttaggtctgatcgtggtggagagtttttctcgaacgagtttgacttattctgtgaggaacatggcatcatacatgagaggacgcctccctattctcccgagtctaatgggattgctgaaaggaagaaccgcacactgactgacttggtgaatgccatgttggacaccgcgggactgcctaaggcatggtggggggaggcattgttgacctcaaatcatgtgttaaacagagttcctaacagaaataaggacaaaacaccatatgagatatggattggtagaaaaccatcactttcttatttgcgcacatgggggtgcttggcgaaagtcaatgtaccaataacgaagaagcgcaaacttggacctaagactgtggactgtgtttttctgggatatgctcatcatagcattgcctatagatttttaatagttaaatccgaggtaccggacatgcatgttggtacaattatggagtctcgtgatgctaccttctttgagagctttttcccaatgaaggatacacatagtggttcgaaccaaccctctgaaataattcccagttcaatcacaccaccagaacaaactgaacatacacatgaacttgtctctgaggaggatgtcagtgaagctcctcgaaggagtaagagacaaaggacggctaagtcttttggtgatgatttcactgtgtacctcgtggatgacactcctaagtcaatttcagaagcatatgcatctcctgatgcagactactggaaggaggctgtccgtagtgaaatggattccattatcgctaacgggacttgggaggtgacagagcgaccctatgggtgtaaacctgtggggtgcaagtgggtgttcaagaagaagcttaggcctgacggtactattgaaaagtacaaggctcggcttgttgctaagggctatactcagaaagaaggcgaagatttctttgacacttactcacctgttgctagattgaccacaattcgtgtgctactttccctagcagcctcacatggtcttctcgttcatcaaatggacgttaagacagcttttcttaatggagagctggatgaggagatctatatggatcaacctgatgggtttgtagttgaaggtcaagaaggcaaagtgtgcaaattgttgaagtctttgtatggtctgaaacaagctcctaagcaatggcatgagaaatttgacaaaacattgacatctgcaggctttgcagtcaatgaggcagataaatgtgtgtactatcgccatggtgggggtgagggagttattttgtgcttgtatgttgatgacatactgatatttgggacaaaccttgaggtgataaatgaggttaaatcattcttgtctcaaaattttgatatgaaagatttgggagtagctgatgttatcttaaacattaagctaattagatgtgagaatgggattacactcttgcagtctcattatgtggagaagatcttgaatcgctttggctacattgatagtaagccttctccaacaccttatgatcctagcttgttgcttcgcaagaacaagagaattgctagaaatcaactggaatactcccaaatcattggctcgttgatgtacctggctagtgcaactaggcctgatatctcctttgctgtgagcaagttgagccgatttacctctaatccgggagatgatcactggcgtgcacttgagcgagtaatgcgctatctgaaaggtactgtggaattggggcttcactatactgggtatcctgcggtactggagggttatagtgattctaactggatctctgatgtggatgagatcaaagccactagtggatatgttttcacactgggtggtggtgctgtttcatggaggtcttgcaaacagacaattttgacgaggtcaaccatggaagcagagctaacggcactggatactgctactgttgaggcagaatggctgcgtgatctattaatggatctgcctgttgttgaaaaaccggtgccggctatccttatgaactgtgacaatcaaacgacatgtgaaaagacgattgaagtctgtcaggaaattaagaaactccggagttataacgttggattacatccaaacagcgagaaacctggcagatctcttcacgaagggactatcacgaaatgtgatagacaatgcatcgaaggagatgggtttgagacccatagcattcttgaaagaactcacctttgtgagcttgactgttggtcgcagtctatgaagattttgggtgaatcttctaggaagcttactaaagacctaggagtatga

SEQ ID NO: 15004 - DNA, 4557 bp, Oryza sativa
  Clone ID: TFbOSC405015j.C1.o1.fg
atggcggattcgacggcgaggacggtgaaggacgtgaaccctcatgagttcgtcaaggcctactccgcccacctcaagcgctccggcaagatggagctccctgagtgggttgacatcgtgaagactgcgaggttcaaggagctccctccttatgatccggactggtactacacgagggctgcctcgattgcaaggaagatctacctgaggcagggtattggtgtaggtggcttccagaagatctatggtggccgccagaggaacggctcacgccccccgcacttctgcaagagcagcggcgctatctcacgcaacatccttcagcagctgcagaagatgggcatcattgatgtcgacccgaagggtggaagactcatcacctcccagggaaggcgtgatctggaccaagtggccggaagagttgatgaatcaatcagagacaggaaagttgaagcaactggccagcaatcccagacgttagattcaacttggacggccaagatgcaccctaacgccctaccatctaatgatgcgttcatgctagttttcatctgtaatgtcatgatttatttatggaataaattaaatcattatatgcccataatctcaacaatccaaaaaccttattataggcactgtgattttactatggctggttttgccgatgcactgaggccggataaattcaccggtgtgcattttaagagatggcagatcagggtcactctgtggctgacagctatgaaatgcttctgggtgagtactggcaaacctgaaggagttcttactgctgaacagcagaagcaattcgaggaagccactactctctttgtgggatgcattcttagcgttcttggcgatcgtctggtcgaggtgtatatgcatatgaccgacgctaaggagttgtgggatgcactgaatactaaattcggtgctactgatgctagcaatgatctgtatatcatggagcagtttcatgactacaaaatggctgacaaccgttctgtagtcgaacaggctcatgagatacaaaccatggctaaggaactcgaactccttaagtgtgtcttacccgacaaatttgtggccgggtgcattattgcaaaactacctccatcttggaggagtttcggtactgcactcaaacacaagagacaggaatactccgttgaggggttgattgcgtctcttgatgttgaggagaaagctcgggaaaaagatgccgcgtctaagggcgatggtgggcagtccagtgccaatgttgtgcacaaggcccagaacaagagcaaggggaaatacaaagctcagcagaccaccaacttcaagaagcagaagaagaacaacaacaatcctaatcaggatgagaggacttgctttgtgtgtggccaagttggtcatctggctaggaagtgtccacaacgcaaggggatgaaggcacctgcagggcagacttctaagtctgctaatgtgaccattggcaacactggagatggaagcgggtatggtaatttacctactgttttttcagttaatcaatctactaattggtgggttgatactagggccaatgtacatgtttgtgctgacatctcattgttttcttcttatcaggtcgcacggggttccaccgtcctaatggggaatgggtcacatgcttctgttcatggtgttggcacggtagatctgaagtttacttcgggaaagatcgtgcagctgaagaacgtgcagcatgtcccttctatcgacaggaatcttgttagtggctcccgtctgactagagacggatttaagttggtttttgagtctaataaagtagtcgtgtctaaacatggatattttattggtaaaggttatgagtgcggaggcctgttccgcttttccctttctgatttctgcaataagtctgtgaaccatatttgtggcagtgtggatgatgaggctaatgtttggcattcacgtttatgtcatattaattttggcttgatgtctcggctttccagcatgtgtttaattcctaagttttccattgtcaaaggttctaagtgccatagttgtgtgcaatcgaagcaacctcgcaagcctcacaaggctgccgaggagagaaacttggcaccactagaactcctacattcagatctttgtgaaatgaatggggtgttgacgaagggtggaaaacgatatttcatgacattgattgatgatgctactagattttgttatgtgtacttgttgaaaacgaaagacgaggctctagactattttaaaatttataaggcagaagttgaaaatcaacttgacagaaagataaaaaggcttaggtctgatcgtggtggagagtttttctcgaacgagtttgacttattctgtgaggaacatggcatcatacatgagaggacgcctccctattctcccgagtctaatgggattgctgaaaggaagaaccgcacactgactgacttggtgaatgccatgttggacaccgcgggactgcctaaggcatggtggggggaggcattgttgacctcaaatcatgtgttaaacagagttcctaacagaaataaggacaaaacaccatatgagatatggattggtagaaaaccattactttcttatttgcgcacatgggggtgcttggcgaaagtcaatgtaccaataacgaagaagcgcaaacttggacctaagactgtggactgtgtttttctgggatatgctcatcatagcattgcctatagatttttaatagttaaatccgaggtaccggacatgcatgttggtacaattatggagtctcgtgatgctaccttttttgagagctttttcccaatgaaggatacacatagtggttcgaaccaaccctctgaaataattcccagttcaatcacaccaccagaacaaactgaacatacacatgaacttgtctctgaggaggatgtcagtgaagctcctcgaaggagtaagagacaaaggacggctaagtcttttggtgatgacttcactgtgtacctcgtggatgacactcctaagtcaatttcagaagcatatgcatctcctgatgcagactactggaaggaggctgtccgtagtgaaatggattccattatcgctaacgggacttgggaggtgacagagcgaccctatgggtgtaaacctgtggggtgcaagtgggtgttcaagaagaagcttaggcctgacggtactattgaaaagtacaaggctcggcttgttgctaagggctatactcagaaagaaggcgaagatttctttgacacttactcacctgttgctagattgaccacaattcgtgtgctactttccctagcagcctcacatggtcttctcgttcatcaaatggacgttaagacagcttttcttaatggagagctggatgaggagatctatatggatcaacctgatgggtttgtagttgaaggtcaagaaggcaaagtgtgcaaattgttgaagtctttgtatggtctgaaacaagctcctaagcaatggcatgagaaatttgacaaaacattgacatctgcaggctttgcagtcaatgaggcagataaatgtgtgtactatcgccatggtgggggtgagggagttattttgtgcttgtatgttgacgacatactgatatttgggacaaaccttgaggtgataaatgaggttaaatcattcttgtctcaaaattttgatatgaaagatttgggagtagctgatgttatcttaaacattaagctaattagaggtgagaatgggattactctcttgcagtcccattatgtggagaagatcttgaatcgctttggctacattgatagtaagccttctccaacaccttatgatcctagcttgttgcttcgcaagaacaagagaattgctaggaatcaactggaatactcccaaatcattggctcgttgatgtacctggctagtgcaactaggcctgatatctcctttgctgtgagcaagttgagccgatttacttctaatccgggagatgatcactggcgtgcgcttgagcgagtaatgcgctatctgaaaggtactgtggaattggggcttcactatactgggtatcctgcggtactggagggttatagtgattctaactggatctctgatgtggatgagatcaaagccactagtggatatgttttcacactgggtggtggtgctgtttcatggaggtcttgcaaacagacaattttgacgaggtcaaccatggaagcagagctaacggcactggatactgctactgttgaggcagaatggctgcgtgatctattaatggatctgcctgttgttgaaaaaccggtgccggctatccttatgaactgtgacaatcaaacggtaattgtcaaagtgaatagttctaaggataatatgaaatcgtctagacatgtgaaaagacgattgaagtctgtcaggaaattaagaaactccggagttataacgttggattacatccaaacagcgagaaacctggcagatcccttcacaaagggactatcacgaaatgtgatagacaatgcatcgaaggagatgggtttaagacccatgtga

SEQ ID NO: 15005 - DNA, 2361 bp, Oryza sativa
  Clone ID: TFbOSC405836j.C1.o5.gm
atgtccaaccaggcggacaagaagttactgctcaggctgcttccacaacactaccaccaccatcttaagcctaaggcgaatgactactccatcccgctcgccggcgtgcaccggcgatcgggagagcaggtctccagaacctttgccttcgacgttctgcaccgggagaaggcggcaataaggcactgtgattttactatggctggtttttccgatgcactgaggccggataaattcaccggtgtgcattttaagagatggcagatcagggtcactctgtggctgacagctatgaaatgcttctgggtgagtactggcaaacctgaaggagttcttactgctgaacagcagaagcaattcgaggaagccactactctctttgtgggatgcattcttagcgttcttggcgatcgtctggtcgaggtgtatatgcatatgaccgacgctaaggagttgtgggatgcactgaatactaaattcggtgctactgatgctagcaatgatctgtatatcatggagcagtttcatgactacaaaatggctgacaaccgttctgtagtcgaacaggctcatgagatacaaaccatggctaaggaactcgaactccttaagtgtgtcttacccgacaaatttgtggccgggtgcattattgcaaaactacctccatcttggaggagtttcggtactgcactcaaacacaagagacaggaatactccgttgaggggttgattgcgtctcttgatgttgaggagaaagctcgggaaaaagatgccgcgtctaagggcgatggtgggcagtccagtgccaatgttgtgcacaaggcccagaacaagagcaaggggaaatacaaagctcagcagaccaccaacttcaagaagcagaagaagaacaaaaacaatcctaatcaggatgagaggacttgctttgtgtgtggccaagttggtcatctggctaggaagtgtccacagcgcaaggggatgaaggcacctgcagggcagacttctaagtctgctaatgtgaccattggcaacactggagatggaagcgggtatggtaatttacctactgtcgcacggggttccaccgtcctaatggggaatgggtcacatgcttctgttcatggtgttggcacggtatatctgaagtttacttcgggaaagatcgtgcagctgaagaacgtgcagcatgtcccttctatcgacaggaatcttgttagtggctcccgtctgactagagacggatttaagttggtttttgagtctaataaagtagtcgtgtctaaacatggatattttattggtaaaggttatgagtgcggatgcctgttccgcttttccctttctgatttctgcaataagtctgtgaaccatatttgtggtagtgtggatgatgaggctaatgtttggcattcacactactggaaggaggctgtccatagtgaaatggattccattatcgctaacgggacttgggaggtgacagagcgaccctatgggtgtaaacctgtggggtgcaagtgggtgttcaagaagaagcttaggcctgacgatactattgaaaagtacaaggctcggcttgttgctaagggctatactcagaaagaaggcgaagatttctttgacacttactcacctgttgctagattgaccacaattcgtgtgctactttccctagcagcctcacatggtcttctcgttcatcaaatggacgttaagacagcttttcttaatggagagctggatgaggagatctatatggatcaacctgatgggtttgtagttgaaggctttgcagtcaatgaggcagataaatgtgtgtactatcgccatggtgggggtgagggagttattttgtgcttgtatgttgacgacatactgatatttgggacaaaccttgaggtgataaatgagtcccattatgtggagaagatcttgaatcgctttggctacattgatagtaagccttctccaacaccttatgatcctagcttgttacttcgcaagaacaagagaattgctaggaatcaactggaatactcccaaatcattggctcgttgatgtacctggctagtgcaactaggcctgatatctcctttgctgtgagcaagttgagccgatttacctctaatccgggagatgatcactggcgtgcgcttgagcgagtaatgcgctatctgaaagactactccatcccgctcgccggcgtgcaccggcgatcgggagagcaggtctccggaacctctgccttcgacgttctgcaccgggagaaggcggcaataagtcctccacgctccacgccatgtcggagctcatcgccggcggccgcgtcctacgtcatccacgcctcatgccgaagctag

SEQ ID NO: 15006 - DNA, 1815 bp, Oryza sativa
  Clone ID: TFbOSC407908j.C1.o8.fg
atgtgggatgcacttgaggccaagttcggagttttcgacgccggcagtgagctgtatgtcatagagcagttctatgactacaagatggtcgatgaccattctatagtagaacaagctcatgagattcagatgctggctaaggaacttgagaacaacaattgtaagttgctggacaagtttgtggcgggtggcattattgccaaattgccaccttcttggttggactttgccacttctctaaagcacaagagacaagagttcagtgtttctgatctcattggctctttgggtgttgaggagaaggcgagggcaaaggacaaggcaaaaaggttgagggagaaagtcaagcctgatgtcaaacccaaggctgcaaccaactttaagaagaaaggcaagggaaaggcaaagggaagctgctttgtgtgtggcaagtctgggcattgggccaaggactgtcctgagcgcaaagacaagaagtcttccaacatggttattagcgagggcggaggaacatcggggtacggtaaaatattacctacagttctctctgtttttcactcacctgattggtgggtggatactggcgctaatattcatgtcgggagaggttcctccttgttgatgggaaacgggtcgcttgcggctgttcatggtgttggttctaagtgccatacttgtgttcaatcgaaacaacctcgcaagcctcacaaggcatctgagcataaggaaatgacaccattcgaggaatgggaaaggaagaaattaaatctctcatacctacgaatatggggctgtttggctaagtccagagatgctacattctttgagaatgaatttcccatgaaacatacacctagcacttctagtcaagaaactgtcatgccccatgagcactttgcaccgatagaacacaatgatcaaacgcctgaggaaaatcctgaggaggacaacattgtagatactcgtaagagtaagagacaaagggttgcaaaatcctttggagatgactacattgtatacctcgtggatgacaccccaagaaccatagaagaggcatattcatctcctgacgctgactactggaaggaagcagtacgcagtgagatggactcgattatgtctaatggtacttgggaagtcgttgagcgtccatatgggtgcaagcctgtaggatgcaaatgggttttcaagaaaaagcttaggcctgatggtacaattgaaaagtacaaggcaaggcttgtggccaagggttatacccaaaaggaaggcgaggattttttcgacacatactcaccagttgctcgcttgaccacgattcgagtactacttgctctggcggcctctcatggttttctcgtccatcagatggacgttaagacagctttcctaaacggagagctggaggaggagatctatatggatcaaccagacgggtatgtactagaaggtcaggagggaatggtgtgtaaactgttgaaatccttgtatggccttaagcaagcacctaagcaatggcatgagaagtttgacaccacgcttacatctgtaggctttgttgtgaacgaagctgacaaatgtgtgtactatcgctatggtgggggagaaggagtgatcttgtgcttatatgtcgatgacatattgatctttgggaccagcctcaatgtgattgaggaggtcaaggactatctgtccaagagttttgaaatgaaggatttgggagaggctgatgttattcttaagggaaaagtccattttacaccctctaacttttatgtttgtctaaaatgcacccctaaattacaaaaccggatataa

SEQ ID NO: 15007 - DNA, 3726 bp, Oryza sativa
  Clone ID: TFbOSC408072j.C1.o12.fg
atggctggttttgccgatgcactgaggccggataaattcaccggtgtgcattttaagagatggcagatcagggtcactctgtggctgacagctatgaaatgcttctgggtgagtactggcaaacctgaaggagttcttactgctgaacagcagaagcaattcgaggaagccactactctctttgtgggatgcattcttagcgttcttggcgatcgtctggtcgaggtgtatatgcatatgaccgacgctaaggagttgtgggatgcactgaatactaaattcggtgctactgatgctagcaatgatctgtatatcatggagcagtttcatgactacaagatggctgacaaccgttctgtagtcgaacaggctcatgagatacaaacgatggctaaggaactcgaactccttaagtgtgtcttacccgacaaatttgtggccgggtgcattattgcaaaactacctccatcttggagaagtttcggtactgcactcaaacacaagagacaggaatactccgttgaggggttgattgcgtctcttgatgttgaggagaaagctcgggaaaaagatgccgcgtctaagggcgatggtgggcagtccagtgccaatgttgtgcacaaggcccagaacaagagcaaggggaaatacaaagctcagcagaccaccaacttcaagaagcagaagaagaacaacaacaatcctaatcaggatgagaggacttgctttgtgtgtggccaagttggtcatctggctagaaagtgtccacagcgcaaggggatgaaggcacctgcagggcagacttctaagtctgctaaagtgaccattggcaacactggagatggaagcgggtatggtaatttacctactgttttttcagttaatcaatctactaattggtgggttgatactggggccaatgtatatgtttgtgctgacatctcattgttttcttcttatcaggtcgcacggggttccaccgtcctaatggggaatgggtcacatgcttctgttcatggtgttggcacggtagatctgaagtttacttcgggaaagatcgtgcagctgaagaacgtgcagcatgtcccttctatcgacaggaatcttgttagtggctcccgtctgactagagacggatttaagttggtttttgagtctaataaagtagtcgtgtctaaacatggatattttattggtaaaggttatgagtgcggaggcctgttccgcttttccctttctgatttctgcaataagtctgtgaaccatatttgtggcagtgtggatgatgaggctaatgtttggcattcacgtttatgtcatattaattttggcttgatgtctcggctttccagcatgtgtttaattcctaatttttccattgtcaaaggttctaagtgccatagttgtgtgcaatcgaagcaacctcgcaagcctcacaaggctgccgaggagagaaacttggcaccactagaactcctacattcagatctttgtgaaatgaatggggtgttgacgaagggtggaaaacgatatttcatgacattgattgatgatgctactagattttgctatgtgtacttgttgaaaacgaaagacgaggctctagactattttaaaatttataaggcagaagttgaaaatcaacttgacagaaagataaaaaggcttaggtctgatcgtggtggagagtttttctcgaacgagtttgacttattctgtgaggaacatggcatcatacatgagaggacgcctccctattctcccgagtctaatgggattgctgaaaggaagaaccgcacactgactgacttggtgaatgccatgttggacaccgcgggactgcctaaggcatggtggggggaggcattgttgacctcaaatcatgtgttaaacagagttcctaacagaaataaggacaaaacaccatatgagatatggattggtagaaaaccatcactttcttatttgcgcacatgggggtgcttggcgaaagtcaatgtaccaataacgaagaagcgcaaacttggacctaagactgtggactgtgtttttctgggatatgctcatcatagcattgcctatagatttttaatagttaaatccgagttcatcacaccaccagaacaaactgaacatacacatgaacttgtctctgaggaggatgtcagtgaagctcctcgaaggagtaagagacaaaggacggctaagtcttttggtgatgatttcactgtgtacctcgtggatgacactcctaagtcaatttcagaagcatatgcatctcctgatgcagactactggaaggaggttgtccatagtgaaatggattccattatcgctaacgggacttgggaggtgacagagcgaccctatgggtgtaaacctgtggggtgcaagtgggtgttcaagaagaagcttaggcctgacggtactattgaaaagtacaaggctcggcttgttgctaagggctatactcagaaagaaggcgaagatttatttgacacttactcacctgttgctagattgaccacaattcgtgtgctactttccctagcagcctcacatggtcttctcgttcatcaaatggacgttaagacagcttttcttaatggagagctggatgaggagatctatatgtatcaacctgatgggtttgtagttgaaggtcaagaaggcaaagtgtgcaaattgttgaagtctttgtatggtctgaaacaagctcctaagcaatggcatgagaaatttgacaaaacattgacatctgcaggctttgcagtcaatgaggcagataaatgtgtgtactatcgccatggtgggggtgagggagttattttgtgcttgtatgttgacgacatactgatatttgggacaaatcttgaggtgataaatgaggttaaatcattcttgtctcaaaattttgatatgaaggatttgggagtagctgatgttatcttaaacattaagctaattagaggtgagaatgggattacactcttgcagtcccattatgtggagaagatcttgaatcgtttggctacattgataaacaagagaattgctaggaatcaactggaatactcccaaatcattggctcgttgatgtacctggctagtgcaactaggcctgatatttcctttgctgtgagcaagttgagccgatttacctctaatccgggagatgatcactggcgtgcgtttgagcgagtaatgcgctatctgaaaggtactatggaattggggcttcactatactgggtatcctgcggtactggagggttatagtgattctaactggatctctgatgtggatgagatcaaagccactagtggatatgttttcacactgggtggtggtgctgtttcatggaggtcttgcaaacagaccattttgacgaggtcaaccatggaagcagagctaacggcactggatactgctactgttgaggcagaatggctgcgtgatctattaatggatctgcctgttgttgaaaaaccggtgccgactatccttatgaactgtgacaatcaaacgacatgtgaaaagacgattgaagtctgtcaggaaattaagaaactccggagttataacgttggattacatccaaacagcgagaaacctggcagatcccttcacgaagggactatcacgaaatgtgatagacaatgcatcgaaggagatgggtttgagacccatgtgagttatactatggtggtaacccagtctatgtga

SEQ ID NO: 15008 - DNA, 3963 bp, Oryza sativa
  Clone ID: TFbOSC408663j.C1.o15.fg
atggctggttttgccgatgcactgaggccggataaattcaccggtgtgcattttaagagatggcagatcagggtcactctgtggctgacagctatgaaatgcttctgggtgagtactggcaaacctgaaggagttcttactgctgaacagcagaagcaattcgaggaagccactactctctttgtgggatgcattcttagcgttcttggcgatcgtctggtcgaggtgtatatgcatatgaccgacgctaaggagttatgggatgcactgaatactaaattcggtgctactgatgctagcaatgatctgtatatcatggagcagtttcatgactacaaaatggctgacaaccgttctgtagtcgaacaggctcatgagatacaaaccatggctaaggaactcgaactccttaagtgtgtcttacccgacaaatttgtggccgggtgcattattgcaaaactacctccatcttggaggagtttcggtactgcactcaaacacaagagacaggaatactccgttgaggggttgattgcgtctcttgatgttgaggagaaagctcgggaaaaagatgccgcgtctaagggcgatggtgggcagtccagtgccaatgttgtgcacaaggcccagaacaagagcaaggggaaatacaaagctcagcagaccaccaacttcaagaagcagaagaagaacaacaacaatcctaatcaggatgagaggacttgctttgtgtgtggccaagttggtcatctggctaggaagtgtccacaacgcaaggggatgaaggcacctgcagggcagacttctaagtctgctaatgtgaccattggcaacactggagatggaagcgggtatggtaatttacctactgttttttcagttaatcaatctactaattggtgggttgatactggggccaatgtacatgtttgtgctgacatctcattgttttcttcttatcaggtcgcacggggttccaccgtcctaatggggaatgggtcacatgcttctgttcatggtgttggcacggtagatctaaagtttacttcgggaaagatcgtgcagctgaagaacgtgcagcatgtcccttctatcgacaggaatcttgttagtggctcccgtctgactagagacggatttaagttggtttttgagtctaataaagtagtcgtgtctaaacatggatattttattggtaaaggttatgagtgcggaggcctgttccgcttttccctttctgatttctgcaataagtctgtgaaccatatttgtggcagtgtggatgatgaggctaatgtttggcattcacgtttatgtcatattaattttggcttgatgtctcggctttccagcatgtgtttaattcctaagttttccattgtcaaaggttctaagtgccatagttgtgtgcaatcgaagcaacctcgcaagcctcacaaggctgccgaggagagaaacttggcaccactagaactcctacattcagatctttgtgaaatgaatggggtgttgacgaagggtggaaaacgatatttcatgacattgattgatgatgctactagattttgctatgtgtacttgttgaaaacgaaagacgaggctctagactattttaaaatttataaggcagaagttgaaaatcaacttgacagaaagataaaaaggcttaggtctgatcgtggtggagagtttttctcgaacgagtttgacttattctgtgaggaacatggcatcatacatgagaggacgcctccctattctcccgagtctaatgggattgctgaaaggaagaaccgcacactgactgacttggtgaatgccatgttggacaccgcgggactgcctaaggcatggtggggggaggcattgttgacctcaaatcatgtgttaaacagagttcctaacagaaataaggacaaaacaccatatgagatatggattggtagaaaaccatcactttcttatttgcgcacatgggggtgcttggcgaaagtcaatgtaccaataacgaagaagcgcaaacttggacctaagactgtggactgtgtttttctgggatatgctcatcatagcattgcctatagatttttaatagttaaatccgaggtaccggacatgcatgttggtacaattatggagtctcgtgatgctaccttctttgagagctttttcccaatgaaggatacacatagtggttcgaaccaaccctctgaaataattcccagttcaatcacaccaccagaacaaactgaacatacacatgaacttgtctctgaggaggatgtcagtgaagctcctcgaaggagtaagagacaaaggacggctaagtcttttggtgatgatttcactgtgtacctcgtggatgacactcctaagtcaatttcagaagcatatgcatctcctgatgcagactactggaaggaggctgtccgtagtgaaatggattccattatcgctaacgggacttgggaggtgacagagcgaccctatgggtgtaaacctgtggggtgcaagtgggtgttcaagaagaagcttaggcctgacggtactattgaaaagtacaaggctcggcttgttgctaagggctatactcagaaagaaggcgaagatttctttgacacttactcacctgttgctagattgaccacaattcgtgtgctactttccctagcagcctcacatggtcttctcgttcatcaaatggacgttaagacagcttttcttaatggagagctggatgaggagatctatatggatcaacctgatgggtttgtacttgaaggtcaagaaggcaaagtgtgcaaattgttgaagtctttgtatggtctgaaacaagctcctaagcaatggcatgagaaatttgacaaaacattgacatctgcaggctttgcagtcaatgaggcagataaatgtgtgtactatcaccatggtgggggtgagggagttattttgtgcttgtatgttgacgacatactgatatttgggacaaaccttgaggtgataaatgaggttaaatcattcttgtctcaaaattttgatatgaaagatttgggagtagctgatgttattttaaacattaagctaattagaggtgagaatgggattacactcttgcagtctcattatgtggagaagatcttgaatcgctttggctacattgatagtaagccttctccaacaccttatgatcctagcttgtcgcttcgcaagaacaagagaattgctaggaatcaactggaatactcccaaatcattggctcgttgatgtacctggctagtgcaactaggcctgatatctcctttgctgtgagcaagttgagccgatttacctctaatccgggagatgatcactggcgtgcgcttgagcgagtaatgcgctatctgaaaggtactgtggaattggggcttcactatactgggtatcctgcggtactggagggttatagtgattctaactggatctctgatgtggatgagatcaaagccactagtggatatgttttcacactgggtggtggtgctgtttcatggaggtcttgcaaacagacaattttgacgaggtcaaccatggaagcagagctaacggcactggatactgctactgttgaggcagaatggttgcgtgatctattaatggatctgcctgttgttgaaaaaccggtgccggctatccttatgaactgtgacaatcaaacgacatgtgaaaagacgattgaagtctgtcaggaaattaagaaactccggagttataacgttggattacatccaaacagcgagaaacctggcagatcccttcacgaagggactatcacgaaatgtgatagacaatgcatcgaaggagatgggtttgagacccatagcattcttgaaggaactcacctttgtgagcttgactgttggtcgcagtccatgaagattttgggtgaatcttctaggaagcttactaaagacctaggagtatga

SEQ ID NO: 15009 - DNA, 4230 bp, Oryza sativa
  Clone ID: TFbOSC409798j.C1.o5.fg
atgcagtctagggtttgcctcctactctgtactgcgccgtcgctcgtagactactccatcccgctcgccggcgtgcacctgcgatcgggagagcaggtctccggaacctctgcctttgacgtcctgcaccgggagaaggcggcaataagatctaatgatgcgttcatgctagttttcatctgtaatgtcatgatttatttatggaataaattaaatccttatatgcccataatctcaacaatccaaaaaccttattataggcactgtgattttactatggctggttttgccgatgcactgaggccggataaattcaccggtgtgcattttaagagatggcagatcagggtcactctgtggctgacagctatgaaatgcttctgggtgagtactggcaaacctgaaggagttcttactgctgaacagcagaagcaattcgaggaagccactactctctttgtgggatgcgttcttggcgatcgtctggtcgaggtgtatatgcatatgaccgacgctaaggagttgtgggatgcactgaatactaaattcggtgctactgatgctagcaatgatctgtatatcatggagcagtttcatgactacaaaatggctgacaaccgttctgtagtcgaacaggctcatgagatacaaaccatggctaaggaactcgaactccttaagtgtgtcttacccgacaaatttgtggccgggtgcattattgcaaaacttcctccatcttggaggagtttcggtactgcactcaaacacaagagacaggaatactccgttgaggggttgattgcgtctcttgatgttgaggagaaagctcgggaaaaagatgccgcgtctaagggcgatggtgggcagtccagtgccaatgttgtgcacaaggcccagaacaagagcaaggggaaatacaaagctcagcagaccaccaacttcaagaagcagaagaagaacaacaacaatcctaatcaggatgagaggacttgctttgtgtgtggccaagttggtcatctggctaggaagtgtccacaacgcaaggggatgaaggcacctgcagggcagacttctaagtctgctaatgtgaccattggcaacactggagatggaagcgggtatggtaatttacctactgttttttcagttaatcaatctactaattggtgggttgatactggggccaatgtacatgtttgtgctgacatctcattgttttcttcttatcaggtcgcacggggttccaccgtcctaatggggaatgggtcacatgcttctgttcatggtgttggcacggtagatctgaagtttacttcgggaaagatcgtgcagctgaagaacgtgcagcatgtcccttctatcgacaggaatcttgttagtggctcccgtctgactagagacggatttaagttggtttttgagtctaataaagtagtcgtgtctaaacatggatattttattggtaaaggttatgagtgcggaggcctgttccgcttttccctttctgatttctgcaataagtctgtgaaccatatttgtggcagtgtggatgatgaagctaatgtttggcattcacgtttatgtcatattaattttggcttgatgtctcggctttccagcatgtgtttaattcctaagttttccattgtcaaaggttctaagtgccatagttgtgtgcaatcgaagcaacctcgcaagcctcacaaggctgccgaggagagaaacttggcaccactagaactcctacattcagatctttgtgaaatgaatggggtgttgacgaagggtggaaaacgatatttcatgacattgattgatgatgctactagattttgctatgtgtacttgttgaaaacgaaagacgaggctctagactattttaaaatttataaggcagaagttgaaaatcaacttgacagaaagataaaaaggcttaggtctgatcgtggtggagagtttttctcgaacgagtttgacttattctgtgaagaacatggcatcatacatgagaggacgcctccctattctcccgagtctaatgggattgctgaaaggaagaaccgcacactgactgacttggtgaatgccatgttggacaccgcgggactgcctaaggcatggtggggggaggcattgttgacctcaaatcatgtgttaaacagaattcctaacagaaataaggacaaaacaccatatgagatatggattggtagaaaaccatcactttcttatttgcgcacatgggggtgcttggcgaaagtcaatgtaccaataacgaagaagcgcaaacttggacctaagactgtggactgtgtttttctgggatatgctcatcatagcattgcctatagatttttaatagttaaatccgaggtaccggacatgcatgttggtacaattatggagtctcgtgatgctaccttctttgagagcttttttccaatgaaggatacacatagtggttcgaaccaaccctctgaaataattcccagttcaatcacaccaccagaacaaactgaacatacacatgaacttgtctctgaggaggatgtcagtgaagctcctcgaaggagtaagagacaaaggacggctaagtcttttggtgatgatttcactgtgtacctcgtggatgacactcctaagtcaatttcagaagcatatgcatctcctgatgcagactactggaaggaggctgtccgtagtgaaatggattccattatcgctaacgggacttgggaggtgacagagcgaccctatgggtgtaaacctgtggggtgcaagtgggtgttcaagaagaagcttaggcctgacggtactattgaaaagtacaaggctcggcttgttgctaagggctatactcagaaagaaggcgaagatttctttgacacttactcacctgttgctagattgaccacaattcgtgtgctactttccctagcagcctcacatggtcttctcgttcatcaaatggacgttaagacagcttttcttaatggagagctggatgaggagatctatatggatcaacctgatgggtttgtagttgaaggtcaagaaggcaaagtgtgcaaattgttgaagtctttgtatggtctgaaacaagctcctaagcaatggcatgagaaatttgacaaaacattgacatctgcaggctttgcagtcaatgaggcagataaatgtgtgtactatcgccatggtgggggtgagggagttattttgtgcttgtatgttgacgacatactgatatttgggacaaaccttgaggtgataaatgaggttaaatcattcttgtctcaaaattttgatatgaaagatttgggagtagctgatgttatcttaaacattaagctaattagaggtgagaatgggattactctcttgcagtcccattatgtggagaagatcttgaatcgctttggctacattgatagtaagccttctccaacaccttatgatcctagcttgttgcttcgcaagaacaagagaattgctaggaatcaactggaatactcccaaatcattggctcgttgatgtacctggctagtgcaactaggcctgatatctcctttgctgtgagcaagttgagccgatttacttctaatccgggagatgatcactggcgtgcgcttgagcgagtaatgcgctatctgaaaggtactgtggaattgggacttcactatactgggtatcctgcggtactggagggttatagtgattctaactggatctctgatgtggatgagatcaaagccactagtggatatgttttcacactgggtggtggtgctgtttcatggaggtcttgcaaacagacaattttgacgaggtcaaccatggaagcagaactaacggcactggatactgctactgttgaggcagaatggctgcgtgatctattaatggatctgcctgttgttgaaaaaccggtgccggctatccttatgaactgtgacaatcaaacgacatgtgaaaagacgattgaagtctgtcaggaaattaagaaactccggagttataacgttggattacatccaaacagcgagaaacctggcagatcccttcacaaagggactatcacgaaatgtgatagacaatgcatcgaaggagatgggtttgagacccatagcattcttgaaggaactcacctttgtgagcttgactgttggtcgcagtctatgaagattttgggtgaatcttctaggaagcttaccaaagacctaggagtatga

SEQ ID NO: 15010 - DNA, 8493 bp, Oryza sativa
  Clone ID: TFbOSC409831j.C1.o21.gm
atgccgcccccaatcgtcgggaacggccgcgccaagtccggccgccttcctttgccgccggccaccattcccgtcgccgttcccgcgcctcccgtggccggctccctcccccatcctataaaatgggatcctcatcccccgttctctcgttttagccccatcccgagcctccccgtgccctccacctcgtccactcctcggtttcgccggaacgccatcgccgcgaacctctacatccgcctcgccggagttgttcggccgcctgtccctcctcgccgtgcaccggtcgaccacacctccaccacctccggcatcgcagcggcaagcggcgtggtcctcgtcgtcctcgtccccgtgcagccgctgccggctgtcctcgtcgcctcctcgccggtcccggtcgtcgtcgtcgtcgtcgtcgtcatcctctcgtcgttcccggtcgtcgtggcgttcgtccctccgtcaagccgttctcgttcgtcgtcctcgcttcgtcaagatcgctgcagccccgtcctcgtgttcgtcctcggttccgcgtcgtcaagcctcgtgccggccgcgtctcgccttcgcccaaggatcgccgccgaagccgtcccctcgccgttcgtctccgttgtgcccgtctgtctccgccgcgcccgttcgtcgttgtcgttcccacgcctcgtcgcgtggtgggcaaatgaaggctacacgagctgcggcccggtagtcgagatgtcatacggcggagggttggtgcccaatgctaggggctcagttctgcctgcctgtcccgggtatcccggccgtagggctaaggagcatgctttgagggagaatatgacaaagatcttttgtccgtgccgtcattgcaagaatcagaaattgttggtagatcctggtgaaatattgggtcacataatggagtacggattcaccgccaactacaaggtttggacctatcacggggaattcgccaatccggaagatgacgatgaagagttaagtttcgagatgaatgaggcagagaattttataatcgaagacatgtcgcgtgaaagaatgattgtcgatgtttccaccgatagtgatgatttcgatggtggttttgatttagaggatatgctacgccatgttgaaccagaggaccgcctgaagcgtctgtactcaaacccgactgatgctgagttgatgagatggcatcaagagagccggaaaatagatggtatgattcgacatcccgccgacgctcgccagtggaagacatttgatgcaaaacacccagaatttgctaaggatcctaggaatgtaaggtttgcgttgagcactgatggaatgaacccgtttggtgacttaagcagctcgcacagcacatggccagtccttctcacaatgtataatcttccaacatggatatgtcagaaacgaaagtacattctactcactatcctcatacaaggtccaaaccaacctggaatcgacatagatgttttccttgagcctttgatggaggacatggaggagctttggaaagaggggttacgactatgggatgagtttaagcgggagcacttcaatctacgtgcaatcatattcgttaccatcaatgacctacctgcaaacttttcattatctgggcagattaaagggaagactggatgtctgatatgtctggagaaaacttcatacaaatacctgacgtcgtctttgaagacagtgtacatgcgacatcgacggttcctaccacaaagacataggtaccgtaagatggctagattgttcgataatacagtggagaatgacactgccccagtagcaagaggtggtacatacgtgtatgagataacaaagaagattaaggttgtatatggaaagggaaagaagaagacagtaaagaggaagaaagctgatggtgacaacggtactgcgtcgcctttcaagaagcactcaattttctttaaatacttagattactggaaggacctagagattcgacatgcaattgatgttatgcacctcgagaagaacgtgtttgatagcaccgttggcacattgctggacatcccgagtccgcttcagacatttgccgtcgagactgtatgccagcttgagatgtatttcccaccatcatttttagatatgatggagcatttgatcgttcacatcgtccctcagattattgaacttggtccattatacttacatcagatgtgggcctatgagcgttacatgtcgatcctcaaaggctatgtacacaatcgcgctcacccggaaggatcaatgatagagggatacacaactgaagaggcagtcgagtgttgtatggactacataaaggatgctaatgccattggcattcctgttcatcgacatgaaggtagattgtctggaaggggtactgttggtaggaagcagttcttcgataatgattacaaaaaggtgtccgcggcacacaacagcgttcttcaacagctcgctatcgttgagccattcattgagcgacacctagaagaaatcaaagcctgcttcccagggcggtccaatgattggatatcaagagagcacaagcgtcgctttcctctgtggttgaaagatctaaacctgccagttggtgattctgtggaggaacttactttacaaagattggcatgtgggccttcaagtattgtcaattcatggcaaggttacgacatcaatggatttaccttgagtacgactacgaaggacatgaaaagcacatcacaaaacagtgggatccgtgtcgaagcgattgacacgagtggagaaaagaggtcgtattatgggaccattcaagaaatatgggaactggactatggcctaaacatccagatccctgtgctccgttgtgaatgggttaaagacacaataggggtttccgttgatgactacgggctaacgatagtcgatcacagtaaaacaggccacaaggatgatccatgggttttagcagagcgtgtggctcaggtgttttatgtgaaggacccttcagatgaaagaaaaactattgtcatatccggaaagcaacagatcgtcggcatcgacaacatcgaagaccccaatgattacaaccagttcgacgatgtaccattgtttactgatcttcctatgcgaattaagaaggttgagagaacaatcgatgaagcaaatatgtcgtacgttcgagcagatggtgttgccaaggacctctcccccctcgccgtcgccgtcgctgccgccaggacctctcccccctcgccgtcgccgtcgccgccggcaggtcgccgtcgccactgcacggaactctcccccctcgccgttgccatccccgccgccaggtcgtccccgccgccaagtcgtccccgctaccgccggctcctccccgaagtcgccccgcccctcgccgtcgccgacgccactgccaggacctctcccccctcgccgtcgccgtcgccgccgcacggacctctcccccctcgccgttgccatcgccgccgccaggtcgtcgccgccgccaggtcgtccccgccgtcgctcggcgcttctagtgaagaaacgtggcgcacaccaagtgacccgtttccaatggaaataacacaagtcgccccccgcgatgatgatccggactacatacctatcgaacaggccatggtagtccgacgccgctcgaaacgtaaagccgggaggaacaggacagagcaagaagttgagatggacaccgctacgtctgcacctgaacgtacggagacatctacaagtgcaggcgggagtgggaaaaaaagacgtggtgagagaagcaagaataaattacccaaggaaacttacaacgtgattgctctcgatcaggatgggaagcccatcgagccaccgatagtgcggtccaagttcagcaacgcctgtggcactctagtcaggacgcgttgtcccattaatgtcaagttgtgggaaacagtggacgacaacatcaagacacttctctggaatgagttgcagaagtattttgtgttccctcctggatcagaggctgactgggacacgtttgttgcggatcgtacaacagctgaagcattggctttgaggaaaaaaatgtccgagctcgcgaagaagaacaaatatccccatagattggggtcgagcggatacgctggtcacgtcgatcaatggcgggagatcgagcaaagatttgccgcggccggtaagcccctgctggtagaccccatggttgaacgtagcaagaactgggtttgggcgcgcagcacaggtcaagtctcggatgagggagacatactattcgagactccagacatagaagaagtgactactaatttgcagcagatagtcgagaaagaaagatcaggacagttcgtcccacggagggagagagatcagcttactgcggcgttggggacggctgaacactctggacgtgtaaggggtttgtcctcaaagacaagttggaaggtcgggtttccacaagacgcaccaagttataagaagagagacaaatacaaagaacaactatcggacaagatctatgcgcaagtgaaggaacacttctactcgttggcagctgaaaacccgacagcatttccaaggaattctgagaagagaaaagaacttgctcacgtcttgtcagactcccagaagtcagtactagcggcccaagatgaagtgcaatcctggttatctgccgatgtgcctgaaacttatgagtatggcaagccattcttgccaacttatcttatgaacaagctaccatgggaaatgagggtaatgcacgaatgtatgcaattccacgaagctgatagaactggagcaaaggttggatacgtcgatccaacaagaatatgcaaaacacaacacaccatagagctgagacaggactgcgagcaattggttggcaagaccccggaagaaaaggaagaatatgtgaagacattgcacaagaggaagaagctagaagtagcaacatacttggcaatagcaatgttggcgcacgccgacaaagatgtcttaatggtcccctaccagttcacagcacacaagtactaccgcaaaagaggtggaccagtacatattccatcccagaagaagttatccgtcaggactggctggccgatccccgaaatcccatatattgcacaacgattcaaccacactactatcttgaacgtggccgctgacctctgccgattcatccgtcgcgatgtctgcaacgcaagaggtctcttctacgacaaccagagtgtcacgcctgagtcagcaagctttgccgatactggatatgaccccccgccaaaaaaatggaaagggatttgccaggttggcccatcgtttgaggccataagttgcaaccggaagtttatcggtgcacggtggtacatcgatgacgagattctaagtagcatatccgataacgaggttctttctcctagggatgtcgaaggccacggcacgcacacagcctcaacggctggcggcaacatcatccacaatgttagctttctggggctagctgcagggacagttcggggtggagcgccccgtgcacgattagccatatacaaggcctgttggtccggttatggctgctccggtgccaccgtgttgaaagccatggacgacgctgtctatgatggtgttgatgtcttatcactttctataggtggtacaaaagaagatgtgggaaccctacatgtcgtcgctaatggtatctcggttgtctacgctggtggaaacgatggtcccattgctcagacggtggagaaccaatcaccatggctagtaacggtcgctgcaaccaccattgatcggtccttgcctgtggttatcaccttgggaaacggcgaaaagttggtggcgcaatcctttgtcctcctggaaactgcaagtcagttcagtgagatacagaagtacacagacgaggaatgcaatgccaacaatattatgaacagcacggtgaaggggaaaatagccttctgcttcatgggagagatgttgaataataagcagcagacatcataccctgatgtcaccacggcagtggcagccaaaggaggcagagcaccggacattgctgcaccaggggtttcgattttagccgctgctcagattccatattacaaaggtgtttcctaccatttcgattctggaacatctatggcttgcccccatgtagctgggatcattgcggtgctcaagtccattcatccaaaatggtcacctgcggctctcaaatccgcaatcatgacaacagactactccatcccgctcgctggcgtgcaccagcgatcgggagagcaggtctccggaacctctgcctttgacgtcctgcaccgggagaaggcggcaataaggcactgtgattttactatggctgattttgccgatgcactgaggccggataaattcaccggtgtgcattttaagagatggcagatcagggtcactctgtggctgacagctatgaaatgcttctgggtgagtactggcaaacctgaaggagttcttactgctgaacagcagaagcaattcgaggaagccactactctatttgtgggatgcattcttagcgttcttggcgatcgtctggtcgaggaatactccgttgaggggttgatagcgtctcttgatgttgaggagaaagctcgggaaaaagatgccgcgtctaagggcgatggtgggcagtccagcgccaatgttgtgcacaaggcccagaacaagagtaaggggaaatacaaagctcagcagaccaccaacttcaagaagcagaagaagaacaacaacaatcctaatcaggatgagaggacttgctttgtgtgtggccaagttggtcatctggctaggaagtgtccacagcgcaaggggatgaaggcacctgcagggcagacttctaagtctgctaatgtgaccattggcaacactggagatggaagcgggtatggtaatttacctactgtcgcacggggttccaccgtcctaatggggaatgggtcacatgcttctgttcatggtgttggcacggtagatctgaagtttacttcgggaaagatcgtgcagctgaagaacgtgcagcatgtcccttctatcgacaggaatcttgatacacatagtggttcgaaccaaccctctgaaataattcccagttcaatcataccaccagaacaaactgaacatacacatgaacttgtctctgaggaggatgtcagtgaagctcctcgaaggagtaagagacaaaggacggctaagtcttttggtgatgattttactgtgtacctcgtggatgacactcctaagtcaatttcagaagcatatgcatctcctgatgcagactactggaaggaggctgtccgtagtgaaatggattccattatcgctaacgggacttgggaggtgacagagcaaccctatgggtgtaaacctgtggggtgcaagtgggtgttcaagaagaagcttaggcctgacgcctcacatggtcttctcgttcatcaaatggacgttaagacagcttttcttaatggagagctggatgaggagatctatatggatcaacctgatgggtttgtagttgaaggctttggagtcaatgaggcagataaatgtgtgtattatcgccatggtgggggtgagggagttattttgtgcttgtatgttgacgacatactgatatttgggacaaaccttgaggtgataaatgagtcccattatgtggagaagatcttgaatcgctttggctacattgatagtaagccttctccaacaccttatgatcctagcttgttgcttcgcaagaacaagagaattgctaggaatcaactggaatactcccaaatcattggctcgttgatgtacctggctagtgcaactaggcctgatatctcctttgctgtgagcaagttgagccgatttacctctaatccgggagatgatcactggcgtgcgcttgagcgagtaatgcgctatctgaaaggtactgtggaattggggcttcactatactgggtatcctgcggtactggagggttatagtgattctaactggatctctgatgtggatgagatcaaagccactagtggatatgttttcacactgggtggtggtgctgtttcatggaggtcttgcaaacagacaattttgacgaggtcaaccatggaagcagagctaacggcactggatactgctactgttgaggcagaatggctgcgtgatctattaatggatctgcctgttgttgaaaaaccggtgccggctatccttatgaactgtgacaatcaaacggaaattaagaaactccggagttataacgttggattacatccaaacagcgagaaacctggcagatcccttcacgaagggactatcacgaaatactactccatgccgctcgccggcgtgcaccagcgatcgggagagcaggtctccggaacctctgcctttgacgtcctgcaccgggagaaggcggcaataagacacctgcgaaaagtttcgaccaagcagcagatctaa

SEQ ID NO: 15011 - DNA, 3963 bp, Oryza sativa
  Clone ID: TFbOSC411700j.C1.o3.fg
atggctggttttgccgatgcactgaggccggataaattcaccgctgtgcattttaagagatggcagatcagggtcactctgtggctgacagctatgaaatgcttctgggtgagtactggcaaacctgaaggagttcttactgctgaacagcagaagcaattcgaggaagccactactctctttgtgggatgcattcttagcgttcttggcgatcgtctggtcgaggtgtatatgcatatgaccgacgctaaggagttgtgggatgcactgaatactaaattcggtgctactgatgctagcaatgatctgtatatcatggagcagtttcatgactacaaaatggctgacaaccgttctgtagtcgaacaggctcatgagatacaaaccatggctaaggaactcgaactccttaagtgtgtcttacccgacaaatttgtggccgggtgcattattgcaaaactacctccatcttggaggagtttcggtactgcactcaaacacaagagacaggaatactccgttgaggggttgattgcgtctcttgatgttgaggagaaagctcgggaaaaagatgccgcgtctaagggcgatggtgggcagtccagtgccaatgttgtgcacaaggcccagaacaagagcaaggggaaatacaaagctcagcagaccaccaacttcaagaagcagaagaagaacaacaacaatcctaatcaggatgagaggacttgctttgtgtgtggccaagttggtcatctggctaggaagtgtccacagcgcaaggggatgaaggcacctgcagggcagacttctaagtctgctaatgtgaccattggcaacactggagatggaagcgggtatggtaatttacctactgttttttcagttaatcaatctactaattggtgggttgatactggggccaatgtacatgtttgtgctgacatctcattgttttcttcttatcaggtcgcacggggttccaccgtcctaatggggaatgggtcacatgcttctgttcatggtgttggcacggtagatctgaagtttacttcgggaaagatcgtgcagctgaagaacgtgcagcatgtcccttctatcgacaggaatcttgttagtggctcccgtctgactagagacggatttaagttggtttttgagtctaataaagtagtcatgtctaaacatggatattttattggtaaaggttatgagtgcggagacctgttccgcttttccctttctgatttctgcaataagtctgtgaaccatatttgtggcagtgtggatgatgaggctaatgtttggcattcacgtttatgtcatattaattttggcttgatgtctcggctttccagcatgtgtttaattcctaagttttccattgtcaaaggttctaagtgccatagttgtgtgcaatcgaagcaacctcgcaagcctcacaaggctgccgaggagagaaacttggcaccactagaactcctacattcagatctttgtgaaatgaatggggtgttgacgaagggtggaaaacgatatttcatgacattgattgatgatgctactagattttgctatgtgtacttgttgaaaacgaaagacgatgctctagactattttaaaatttataaggcagaagttgaaaatcaacttgacagaaagataaaaaggcttaggtctgatcgtggtggagagtttttctcgaacgagtttgacttattctgtgaggaacatggcatcatacatgagaggacgcctccctattctcccgagtctaatgggattgctgaaaggaagaatcgcacactgactgacttggtgaatgccatgttggacaccgcgggactgcctaaggcatggtggggggaggcattgttgacctcaaatcatgtgttaaacagagttcctaacagaaataaggacaaaacaccatatgagatatggattggtagaaaaccatcactttcttatttgcgcacatgggggtgcttggcgaaagtcaatgtaccaataacgaagaagcgcaaacttggtcctaagactgtggactgtgtttttctgggatatgctcatcatagcattgcctatagatttttaatagttaaatccgaggtaccggacatgcatgttggtacaattatggagtctcgtgattctatcttctttgagagctttttcccaatgaaggatacacatagtggttcgaaccaaccctctgaaataattcccagttcaatcacaccaccagaacaaactgaacatacacatgaacttgtctctgaggaggatgtcagtgaagctcctcgaaggagtaagagacaaaggacggctaagtcttttggtgatgatttcactgtgtacctcgtggatgacactcctaagtcaatttcagaagcatatgcatctcctgatgcagactactggaaggaggctgtccgtagtgaaatggattccattatcgctaacggaacttgggaggtgacagagcgactctatgggtgtaaacctgtgtggtgcaagtgggtgttcaagaagaagcttaggcctgacggtactattgaaaagtacaaggctcggcttgttgctaagggctatactcagaaagaaggcgaagatttctttgacacttactcacctgttgctagattgaccacaattcgtgtgctactttccctagcagcctcacatggtcttctcgttcatcaaatggacgttaagacagcttttcttaatggagagctggatgaggagatctatatggatcaacctgatgggtttgtagttgaaggtcaagaaggcaaagtgtgcaaattgtttaagtctttgtatggtctgaaacaagctcctaagcaatggcatgagaaatttgacaaaacattgacatctgcaggctttgcagtcaatgaggcagataaatgtgtgtactatcgccatggtgggggtgagggagttattttgtgcttgtatgttgacgacatactgatatttgggacaaaccttgaggtgataaatgaggttaaatcattcttgtctcaaaattttgatatgagggatttgggagtagctgatgttatcttaaacattaagctaattagaggtgagaatgggattacactcttgcagtcccattatgtggagaagatcttgaatcgctttggctacattgatagtaagccttctccaacaccttatgatcctagcttgttgcttcgcaagaacaagagaattgctaggaatcaactggaatactcccaaatcattggctcgttgatgtacctggctagtgcaactaggcctaatatctcctttgctgtgagcaagttgagccgatttacctctaatccgggagatgatcactggcgtgcgcttgagcgagtaatgcgctatctgaaaggtactgtggaattgaggcttcactatactgggtgtcctgcggtactggagggttatagtgattctaactggatctctgatgtggatgagatcaaagccactagtggatatgttttcacactaggtggtggtgctgtttcatggaggtcttgcaaacagaccattttgacgaggtcaaccatggaagcagagctaacggcactggatactgctactgttgaggcagaatggctgcgtgatctattaatggatctgcctgttgttgaaaaaccggtgccggctatccttatgaactgtgacaatcaaacgacatgtgaaaagacgattgaagtctgtcaggaaattaagaaactccggagttataacgttggattacatccaaacagcgagaaacctggcagatcccttcacgaagggactatcacgaaatgtgatagacaatgcatcgaaggagatgggtttgagacccatagcattcttgaaagaactcacctttgtgagcttgactgttggtcgcagtctatgaagattttgggtgaatcttctaggaagcttactaaagacctaggagtatga

SEQ ID NO: 15012 - DNA, 3963 bp, Oryza sativa
  Clone ID: TFbOSC412577j.C1.o22.fg
atggctggttttgccgatgcactgaggccggataaattcaccggtgtgcattttaagagatggcagatcagggtcactctgtggctgacagctatgaaatgcttctgggtgagtactggcaaacctgaaggagttcttactgctgaacagcagaagcaattcgaggaagccactactctctttgtgggatgcattcttagtgttcttggcgatcgtctggtcgaggtgtatatgcatatgaccgacgctaaggagttgtgggatgcactgaatactaaattcggtgctactgatgctagcaatgatctgtatatcatggagcagtttcatgactacaaaatggctgacaaccgttctgtagtcgaacaggctcatgagatacaaaccatggctaaggaactcgaactccttaagtgtgtcttacccgacaaatttgtggccgggtgcattattgcaaaactacctccatcttggaggagtttcggtactgcactcaaacacaagagacaggaatactccgttgaggggttgattgcgtctcttgatgttgaggagaaagctcgggaaaaagatgccgcgtctaagggcgatggtgggcagtccagtgccaatgttgtgcacaaggcccagaacaagagcaaggggaaatacaaagctcagcagaccaccaacttcaagaagcagaagaagaacaacaacaatcctaatcaggatgagaggacttgctttgtgtgtggccaagttggtcatctggctaggaagtgtccacagcgcaaggggatgaaggcacctgcagggcagacttctaagtctgctaatgtgaccattggcaacactggagatggaagcgggtatggtaatttacctactgttttttcagttaatcaatctactaattggtgggttgatactggggccaatgtacatgtttgtgctgacatctcattgttttcttcttatcaggtcgcacggggttccaccgtcctaatggggaatgggtcacatgcttctgttcatggtgttggcacggtagatctgaagtttacttcgggaaagatcgtgcagctgaagaacgtgcagcatgtcccttctatcgacaggaatcttgttagtggctcccgtctgactagagacggatttaagttggtttttgagtctaataaagtagtcgtgtctaaacatggatattttattggtaaaggttatgagtgcggaggcctgttccgctttttcctttctgatttctgcaataagtctgtgaaccatatttgtggcagtgtggatgatgaggctaatgtttggcattcacgtttatgtcatattaattttggcttgatgtctcggctttccagcatgtgtttaattcctaagttttccattgtcaaaggttctaagtgctatagttgtgtgcaatcgaagcaacctcgcaagcctcacaaggctgccgaggagagaaacttggcaccactagaactcctacattcagatctttgtgaaatgaatggggtgttgacgaagggtggaaaacgatatttcatgacattgattgatgatgctactagattttgctatgtgtacttgttgaaaacgaaagacgaggctctagactattttaaaatttataaggcagaagttgaaaatcaacttgacagaaagataaaaaggcttaggtctgatcgtggtggagagtttttctcgaacgagtttgacttattctgtgaggaacatggcatcatacatgagaggacgcctccctattctcccgagtctaatgggattgctgaaaggaagaaccgcacactgactgacttggtgaatgccatgttggacaccgcgggactgcctaaggcatggtggggggaggcattgttgacctcaaatcatgtgttaaacagagttcctaacagaaataaggacaaaacaccatatgagatatggattggtagaaaaccatcactttcttatttgcgcacatggggttgcttggcgaaagtcaatgtaccaataacaaagaagcgcaaacttggacctaagactgtggactgtgtttttctgggatatgctcatcatagcattgcctatagatttttaatagttaaatccgaggtaccggacatgcatgttggtacaattatggagtctcgtgatgctaccttctttgagagctttttcccaatgaaggatacacatagtggttcgaaccaaccctctgaaataattcccagttcaatcacaccaccagaacaaactgaacatacacatgaacttgtctctgaggaggatgtcagtgaagctcctcgaaggagtaagagacaaaggacggctaagtcttttggtgatgatttcactgtgtacctcgtggatgacactcctaagtcaatttcagaagcatatgcatctcctgatgcagactactggaaggaggctgtccgtagtgaaatggattccattatcgctaacgggacttgggaggtgacagagcgaccctatgggtgtaaacctgtggggtgcaagtgggtgttcaagaagaagcttaggcctgacggtactattgaaaagtacaaggctcggcttgttgctaagggctatactcagaaagaaggcgaagatttctttgacacttactcacctgttgctagattgaccacaattcgtgtgctactttccctagcagcctcacatggtcttctcgttcatcaaatggacgttaagacagcttttcttaatggagagctggatgaggagatctatatggatcaacctgatgggtttgtagttgaaggtcaagaaggcaaagtgtgcaaattgttgaagtctttgtatggtctgaaacaagctcctaagcaatggcatgagaaatttgacaaaacattgacatctgcaggctttgcagtcaatgaggcagataaatgtgtgtactatcgccatggtgggggtgagggagttattttgtgcttgtatgttgatgacatactgatatttgggacaaaccttgaggtgataaatgaggttaaatcattcttgtctcaaaattttgatatgaaagatttgggagtagctgatgttatcttaaacattaagctaattagaggtgagaatgggattacactcttgcagtcccattatgtggagaagatcttgaatcgctttggctacattgatagtaagccttctccaacaccttatgatcctagcttgttgcttcgcaagaacaagagaattgctaggaatcaactggaatactcccaaatcattggctcgttgatgtacctggctagtgcaactaggcctgatatctcctttgctgtgagcaagttgagccgatttacctctaatccgggagatgatcactggcgtgcgcttgagcgagtaatgcgctatctgaaaggtactgtggaattggggcttcactatactgggtatcctgcggtactggagggttatagtgattctaactggatctctgatgtggatgagatcaaagccactagtggatatgttttcacactgggtggtggtgctgtttcatggaggtcttgcaaacagaccattttgacgaggtcaaccatggaagcagagctaacggcactggatactgctactgttgaggcagaatggctgcgtgatctattaatggatctgcctgttgttgaaaaaccggtgccggctatccttatgaactgtgacaatcaaacgacatgtgaaaagacgattgaagtctgtcaggaaattaagaaactccggagttataacgttgaattacatccaaacagcgagaaacctggcagatcccttcacgaagggactatcacgaaatgtgataaacaatgcatcgaaggagatgggtttgagacccatagcattcttgaaagaactcacctttgtgagcttgactgttggtcgcagtctatgaagattttgggtgaatcttctaggaagcttactaaagacctaggagtatga

SEQ ID NO: 15013 - DNA, 4383 bp, Oryza sativa
  Clone ID: TFbOSC413111j.C1.o1.fg
atggctggttttgccgatgcactgaggccggataaattcaccggtgtgcattttaagagatggcagatcagggtcactctgtggctgacagctatgaaatgcttctgggtgagtactggcaaacctgaaggagttcttactgctgaacagcagaagcaattcgaggaagccactactctctttgtgggatgcattcttagcgttcttggcgatcgtctggtcgaggtgtatatgcatatgaccgacgctaaggagttgtgggatgcactgaatactaaattcggtgctactgatgctagcaatgatctgtatatcatggagcagtttcatgactacaaaatggctgacaaccgttctgtagtcgaacaggctcatgagatacaaaccatggctaaggaactcgaactccttaagtgtgtcttacccgacaaatttgtggccgggtgcattattgcaaaactacctccatcttggaggagtttcggtactgcactcaaacacaagagacaggaatactccgttgaggggttgattgcgtctcttgatgttgaggagaaagctcgggaaaaagatgccgcgtctaagggcgatggtgggcagtccagtgccaatgttgtgcacaaggcccagaacaagagcaaggggaaatacaaagctcagcagaccaccaacttcaagaagcagaagaagaacaacaacaatcctaatcaggatgagaggacttgctttgtgtgtggccaagttggtcatctggctaggaagtgtccacaacgcaaggggatgaaggcacctgcagggcagacttctaagtctgctaatgtgaccattggcaacactggagatggaagcgggtatggtaatttacctactgttttttcagttaatcaatctactaattggtgggttgatactggggccaatgtacatgtttgtgctgacatctcattgttttcttcttatcaggtcgcacggggttccaccgtcctaatggggaatgggtcacatgcttctgttcatggtgttggcacggtagatctgaagtttacttcgggaaagatcgtgcagctgaagaacgtgcagcatgtcccttctatcgacaggaatcttgttagtggctcccgtctgactagagacggatttaagttggtttttgagtctaataaagtagtcgtgtctaaacatggatattttattggtaaaggttatgagtgcggaggcctgttccgcttttccctttctgatttctgcaataagtctgtgaaccatatttgtggcagtgtggatgatgaggctaatgtttggcattcacgtttatgtcatattaattttggcttgatgtctcggctttccagcatgtgtttaattcctaagttttccattgtcaaaggttctaagtgccatagttgtgtgcaatcgaagcaacctcgcaagcctcacaaggctgccgaggagagaaacttggcaccactagaactcctacattcagatctttgtgaaatgaatggggtgttgacgaagggtggaaaacgatatttcatgacattgattgatgatgctactagattttgctatgtgtacttgttgaaaacgaaagacgaggctctagactattttaaaatttataaggcagaagttgaaaatcaacttgacagaaagataaaaaggcttaggtctgatcgtggtggagagtttttctcgaacgagtttgacttattctgtgaggaacatggcatcatacatgagaggacgcctccctattctcccgagtctaatgggattgctgaaaggaagaaccgcacactgactgacttggtgaatgccatgttggacaccgcgggactgcctaaggcatggtggggggaggcattgttgacctcaaatcatgtgttaaacagagttcctaacagaaataaggacaaaacaccatatgagatatggattggtagaaaaccatcactttcttatttgcgcacatgggggtgcttggcgaaagtcaatgtaccaataacgaagaagcgcaaacttggacctaagactgtggactgtgtttttctgggatatgctcatcatagcattgcctatagatttttaatagttaaatccgaggtaccggacatgcatgttggtacaattatggagtctcgtgatgctaccttctttgagagctttttcccaatgaaggatacacatagtggttcgaaccaaccctctgaaataattcccagttcaatcacaccaccagaacaaactgaacatacacatgaacttgtctctgaggaggatgtcagtgaagctcctcgaaggagtaagagacaaaggacggctaagtcttttggtgatgatttcactgtgtacctcgtggatgacactcctaagtcaatttcagaagcatatgcatctcctgatgcagactactggaaggaggctgtccgtagtgaaatggattccattatcgctaacgggacttgggaggtgacagagcgaccctatgggtgtaaacctgtggggtgcaagtgggtgttcaagaagaagcttaggcctgacggtactattgaaaagtacaaggctcggcttgttgctaagggctatactcagaaagaaggcgaagatttctttgacacttactcacctgttgctagattgaccacaattcgtgtgctactttccctagcagcctcacatggtcttctcgttcatcaaatggacgttaagacagcttttcttaatggagagctggatgaggagatctatatggatcaacctgatgggtttgtacttgaaggtcaagaaggcaaagtgtgcaaattgttgaagtctttgtatggtctgaaacaagctcctaagcaatggcatgagaaatttgacaaaacattgacatctgcaggctttgcagtcaatgaggcagataaatgtgtgtactatcgccatggtgggggtgagggagttattttgtgcttgtatgttgacgacatactgatatttgggacaaaccttgaggtgataaatgaggttaaatcattcttgtctcaaaattttgatatgaaagatttgggagtagctgatgttattttaaacattaagctaattagaggtgagaatgggattacactcttgcagtctcattatgtggagaagatcttgaatcgctttggctacattgatagtaagccttctccaacaccttatgatcctagcttgtcgcttcgcaagaacaagagaattgctaggaatcaactggaatactcccaaatcattggctcgttgatgtacctggctagtgcaactaggcctgatatctcctttgctgtgagcaagttgagccgatttacctctaatccgggagatgatcactggcgtgcgcttgagcgagtaatgcgctatctgaaaggtactgtggaattggggcttcactatactgggtatcctgcggtactggagggttatagtgattctaactggatctctgatgtggatgagatcaaagccactagtggatatgttttcacactgggtggtggtgctgtttcatggaggtcttgcaaacagacaattttgacgaggtcaaccatggaagcagagctaacggcactggatactgctactgttgaggcagaatggttgcgtgatctattaatggatctgcctgttgttgaaaaaccggtgccggctatccttatgaactgtgacaatcaaacgacatgtgaaaagacgattgaagtctgtcaggaaattaagaaactccggagttataacgttggattacatccaaacagcgagaaacctggcagatcccttcacgaagggactatcacgaaatgtgatagacaatgcatcgaaggagatgggtttgagacccatagcattcttgaaggaactcacctttgtgagcttgactgttggtcgcagtccatgaagattttgggtgaatcttctaggaagcttactaaagacctaggacgacagcatcaaccacgaatcgagcagcaacaatccaatcaacaacgcagcaagcagcagtggtggtggcggccggcgggaggggacggattcggcggtggctcaagcaaatccgccgccggtggcaggttcggctgcggctcagcgcggaacagcgcaaggacgcctggtggtggtgaagactcgaagacggcggtgagatccatccccatccttctcgaagacgacgatggcggtggcacggattcggtggtggctcaagcaaatccgccgccggtggtagtctggcagtcgagggagcacattcaatggtggcggcgaggtcgtggtgagctcatcgcagcggtggacggcgggtccggctgcggctcggcgcggagcagcgcgaggatgcccagtggcggtgaagattcaaagacgcggtga

SEQ ID NO: 15014 - DNA, 4287 bp, Oryza sativa
  Clone ID: TFbOSC413293j.C1.o2.fg
atggctggttttgccgatgcactgaggccggataaattcaccggtgtgcattttaagagatggcagatcagggtcactctgtggctgacagctatgaaatacttctgggtgagtactggcaaacctgaaggagttcttactgctgaacagcagaagcaattcgaggaagccactactctctttgtgggatgcattcttagcgttcttggcgatcgtctggtcgaggtgtatatgcatatgaccgacgctaaggagttgtgggatgcactgaatactaaattcggtgctactgatgctagcaatgatctgtatatcatggagcagtttcatgactacaagatggctgacaaccgttctgtagtcgaacaggctcatgagatacaaaccatggctaaggaactcgaactccttaagtgtgtcttacccgacaaatttgtggctgggtgcattattgcgaaactacctccatcttggagaagtttcggtactgcactcaaacacaagagacaggaatactccgttgaggggttgatagcgtctcttgatgttgaggagaaagctcgggaaaaagatgccgcgtctaagggcgatggtgggcagtccagcgccaatgttgtgcacaaggcccagaacaagagcaaggggaaatacaaagctcagcagaccaccaacttcaagaagcagaagaagaacaacaacaatcctaatcaggatgagaggacttgctttgtgtgtggccaagttggtcatctggctaggaagtgtccacagcgcaagggcatgaaggcacttgcagggcagacttctaagtctgctaatgtgaccattggcaacactggagatggaagcgggtatggtaatttacctactgttttttcagttaatcaatctactaattggtgggttgatactggggccaatgtacatgtttgtgctgacatctcattgttttcttcttatcaggtcgcacggggttccaccgtcctaatggggaatgggtcacatgcttctgttcatggtgttggcacggtagatctgaagtttacttcgggaaagatcgtgcagctgaagaacgtgcagcatgtcccttctatcgacaggaatcttgttagtggctcccgtctgactagagacggatttaagttggtttttgagtctaataaagtagtcgtgtctaaacatggatattttattagtaaaggttatgagtgcggaggcctgttccgcttttccctttctgatttctgcaataagtctgtgaaccatatttgtggcagtgtggatgatgaggctaatgtttggcattcacgtttatgtcatattaattttggcttgatgtctcggctttccagcatgtgtttaattcctaagttttctattgtcaaaggttctaagtgccatagttgtgtgcaatcgaagcaacctcgcaagcctcacaaggctgccgaggagagaaacttggcaccactagaactcctacattcagatctttgtgaaatgaatggggtgttgacgaagggtgaaaaacgatatttcatgacattgattgatgatgctactagattttgctatgtgtacttgttgaaaacgaaagacgaggctctagactattttaaaatttataaggcagaagttgaaaatcaacttgacagaaagataaaaaggcttaggtctgatcgtggtggagagtttttctcgaacgagtttgacttattctgtgaggaacatggcatcatacatgagaggacgcctccctgttctcccgagtctaatgggattgctgaaaggaagaaccgcacactgactgacttggtgaatgccatgttggacaccgcgggactgcctaaggcatggtggggggaggcattgttgacctcaaatcatgtgttaaacagagttcctaacagaaataaggacaaaacaccatatgagatatggattggtagaaaaccatcactttcttatttgcgcacatgggggtgcttggcgaaagtcaatgtaccaataacgaagaagcgcaaacttggacctaagactgtggactgtgtttttctgggatatgctcatcatagcattgcctatagatttttaatagttaaatccgaggtaccggacatgcatgttggtacaattatggagtctcgtgatgctaccttctttgagagcttttttccaatgaaggatacacatagtggttcgaaccaaccctctgaaataattcccagttcaatcacaccaccagaacaaactgaacatacacatgaacttgtctctgaggaggatgtcagtgaagctcctcgaaggagtaagagacaaaggacggctaagtcttttggtgatgatttcactgtgtacctcgtggatgacactcctaagtcaatttcagaagcatatgcatctcctgatgcagactactggaaggaggctgtccgtagtgaaatggattccattatcgctaacgggacttgggaggtgacagagcgaccctatgggtgtaaacctgtggggtgcaagtgggtgttcaagaagaagcttaggcctgacggtactattgaaaagtacaaggctcggcttgttgctaagggctatactcagaaagaaggcgaagatttctttgacacttactcacctgttgctagattgaccacaattcgtgtgctactttccctagcagcctcacatggtcttctcgttcatcaaatggacgttaagacagcttttcttaatggagagctggatgaggagatctatatggatcaacctgatgggtttgtagttgaaggtcaagaaggcaaagtgtgcaaattgttgaagtctttgtatggtctgaaacaagctcctaagcaatggcatgagaaatttgacaaaacattgacatctgcaggctttgcagtcaatgaggcagataaatgtgtgtactatcgccatggtgggggtgagggagttattttgtgcttgtatgttgacgacatactgatatttgggacaaaccttgaggtgataaatgaggttaaatcattcttgtctcaaaattttgatatgaaagatttgggagtagctgatgttatcttaaacattaagctaattagaggtgagaatgggattactctcttgcagtcccattatgtggagaagatcttgaatcgctttggctacattgatagtaagccttctccaacaccttatgatcctagcttgttgcttcgcaagaacaagagaattgctaggaatcaactggaatactcccaaatcattggctcgttgatgtacctggctagtgcaactaggcctgatatctcctttgctgtgagcaagttgagccgatttacttctaatccgggagatgatcactggcgtgcgcttgagcgagtaatgcgctatctgaaaggtactgtggaattgggacttcactatactgggtatcctgcggtactggagggttatagtgattctaactggatctctgatgtggatgagatcaaagccactagtggatatgttttcacactgggtggtggtgctgtttcatggaggtcttgcaaacagacaattttgacgaggtcaaccatggaagcagaactaacggcactggatactgctactgttgaggcagaatggctgcgtgatctattaatggatctgcctgttgttgaaaaaccggtgccggctatccttatgaactgtgacaatcaaacgacatgtgaaaagacgattgaagtctgtcaggaaattaagaaactccggagttataacgttggattacatccaaacagcgagaaacctggcagatcccttcacgaagggactatcacgaaatgtgatagacaatgcatcgaaggagatgggtttgagacccatactactccatcccgctcgccggcgtgcaccagcgatcgggagaagcaggtctccggaacctctgcctttgacgtcctgcaccgggagaaggcggcaataaggtacatcggcacaactacgacacaggatctttctctgaccgaggttatgtcatgggactccgaaatctacctcccggaaattccaaattcattgcagatgtgcaactggggtatctacacggggtaccgccctaacctgctctcacctctcaccttcgcgtcccaacaagatgacgacgaagatgaagaagacgagtctggtccgttcatccgccagttgctgtgtgcaattcgacacaagaaattgttgaaacgcagcttgcccatgacgtcgaccaatcacaccagcggcaaaagaatttgctccggaaattcatgcatatgctaa

SEQ ID NO: 15015 - DNA, 2832 bp, Oryza sativa
  Clone ID: TFbOSC413295j.C1.o5.fg
atggcagcgatctgcggggagacgatctccgtcgacgagttgtggcgggagatcttgctcagggcgccaaccaaagacgtcgcccgttcatgctgcgtctcgacgcagtggcgcggcatcgtcagggacccctccttccggaagctccaccatgacaggcatgccgtgccgtccaaggacgacgtcccggacgctctgctcgtcatcacggtcaacgccgacggccaaagcgtctccaccgtcgtcccagctatggtctctccggtgtcgacgagccagcgggcgcccatgtaccgggttattaagaacggcatcagctatagcctcgccaatgtctgcaatggcttcctctgcttcgcgtcatggagcagggccaaggtcgtcgtgtgcaaccccatcaccggcgagaagctggcgatccccagggctcctcccatcgggccagattataaatcgtcgcgtgccaggatcgacgtgtacacgctgcccacaagcggtggcaagatatgcgtgatgaccgctactggcaccccgagctggcacccacccgaaattcccacactcggtccggtgttggtggtcgacgtcgcgagcgagaagcatcgcatgtatagcccaccggacaacgggtgcccagcggctgacgaaacgtcgttcactgcctttgagctgcacggacggttgtgcctggccatcaggatatccatgaccaacacagtccagttctggactttgtcggttgaagaagacgacgacgacgacgacgacctgccgtggcagcttctctacacgatcaaaatcaacatgaaagatggctataataatggattccaggaactagagcctatgaatgattggttcaatggcggcaataatggatttatccaggtaccagagcccatggatgcttggctcgacggcgagacccacacccttgctacagagagggcagcacattgtactttagactactccatcccgctcgccggcgtgcaccagcgatcgggagagcaggtctccggaacctctgcctttgacgtcctgcaccgggagaaggcggcaataagatctaatgatgcgttcatgctagttttcatctgtgatgtcatgatttatttatggaataaattaaatccttatatgcccataatctcaacaatccaaaaaccttattataggcactgtgattttactatggctggttttgccgatgcactgaggccggataaattcaccggtgtgcattttaagagatggcagatcagggtcactctgtggctgacagctatgaaatgcttctgggtgagtactggcaaacctgaaggagttcttactgctgaacagcagaagcaattcgaggaagccactactctctttgtgggatgcattcttagcgttcttggcgatcgtctggtcgaggtgtatatgcatatgaccgacgctaaggagttgtgggatgcactgaatactaaattcggtgctactgatgctagcaatgatctgtatatcatggagcagtttcatgactacaaaatggctgacaaccgttctgtagtcgaacaggctcatgagatacaaaccatggctaaggaactcgaactccttaagtgtgtcttacccgacaaatttgtggccgggtgcattattgcaaaacttcctccatcttggaggagtttcggtactgcactcaaacacaagagacaggaatactccgttgaggggttgattgcgtctcttgatgttgaggagaaagctcgggaaaaagatgccgcgtctaagggcgatggtgggcagtccagtgccaatgttgtgcacaaggcccagaacaagagcaaggggaaatacaaagctcagcagaccaccaacttcaagaagcagaagaagaacaacaacaatcctaatcaggatgagaggacttgctttgtgtgtggccaagttggtcatctggctaggaagtgtccacaacgcaaggggatgaaggcacctgcagggcagacttctaagtctgctaatgtgaccattggcaacactggagatggaagcgggtatggtaatttacctactgttttttcagttaatcaatctactaattggtggattgatactggggccaatatacatgtttgtgctgacatctcattgttttcttcttatcaggtcgcacggggttccaccgtcctaatggggaatgggtcacatgcttctgttcatggtgttggcacggtagatctgaagtttacttcgggaaagatcgtgcagctgaagaacgtgcagcatgtcccttctatcgacaggaatcttgttagtggctcccgtctgactagagacggatttaagttggtttttgagtctaataaagtagtcgtgtctaaacatggatattttattggtaaaggttatgagtgcggaggcctgttccgcttttccctttctgatttctgcaataagtctgtgaaccatatttgtggcagtgtggatgatgaggctaatgtttggcattcacgtttatgtcatattaattttggcttgatgtctcggctttccagcatgtgtttaattcctaagttttccattgtcaaaggttctaagtgccatagttgtgtgcaatcgaagcaacctcgcaagcctcacaaggctgccgaggagagaaacttggcaccactagaactcctacattcagatctttgtgaaatgaatggggtgttgacgaagggtggaaaacgatatttcatgacattgattgatgatgctactagattttgctatgtgtacttgttgaaaacgaaagacgaggctctagacttttttaaattttttaaggcagaaagttga

SEQ ID NO: 15016 - DNA, 4230 bp, Oryza sativa
  Clone ID: TFbOSC413883j.C1.o1.fg
atggctggttttgccgatgcactgaggccggataaattcaccggtgtgcattttaagagatggcagatcagggtcactctgtggctgacagctatgaaatgcttctgggtgagtactggcaaacctgaaggagttcttactgctgaacagcagaagcaattcgaggaagccactactctctttgtgggatgcattcttagcgttcttggcgatcgtctggtcgaggtgtatatgcatatgaccgacgctaaggagttgtgggatgcactgaatactaaattcggtgctactgatgctagcaatgatttgtatatcatggagcagtttcatgactacaagatggctgacaaccgttctgtagtcgaacaggctcatgagataaaaaccatggctaaggaactcgaactccttaagtgtgtcttacccgacaaatttgtggccgggtgcattattgcaaaactacctccatcttggagaagtttcggtgctgcactcaaacacaagagacaggaatactccgttgaggggttgattgcgtctcttgatgttgaggagaaagctcgggaaaaagatgccgcgtctaagggcgatggtgggcagtccagtgccaatgttgtgcacaaggcccagaacaagagcaaggggaaatacaaagctcagcagaccaccaacttcaagaagcagaagaagaacaacaacaatcctaatcaggatgagaggacttgctttgtgtgtggccaagttggtcatctggctagaaagtgtccacagcgcaaggggatgaaggcacctgcagggcagacttctaagtctgctaatgtgaccattggcaacactggagatggaagcgggtatggtaatttacctactgttttttcagttaatcaatctactaattggtgggttgatactggggccaatgtacatgtttgtgctgacatctcattgttttcttcttatcaggtcgcacggggttccaccgtcctaatggggaatgggtcacatgcttctgttcatggtgttggcacggtagatctgaagtttacttcgggaaagatcgtgcagctgaagaacgtgcagcatgtcccttctatcgacaggaatcttgttagtggctcccgtctgactagagacggatttaagttggtttttgagtctaataaagtagtcgtgtctaaacatggatattttattggtaaaggttatgagtgcggaggcctgttccgcttttccctttctgatttctgcaataagtctgtgaaccatatttgtggcagtgtggatgatgaggctaatgtttggcattcacgtttatgtcatattaattttgtcttgatgtctcggctttccagcatgtgtttaattcctaagttttctattgtcaaaggttctaagtgccatagttgtgtgcaatcgaagcaacctcgcaagcctcacaaggctgccgaggagagaaatttggcaccactagaactcttacattcagatctttgtgaaatgaatggggtgttgacgaagggtggaaaacgatatttcatgacattgattgatgatgctactagattttgctatgtgtacttgttgaaaacgaaagacgaggctctagactattttaaaatttataaggcagaagttgaaaatcaacttgacagaaagataaaaaggcttaggtctgatcgtggtggagagtttttctcgaacgagtttgacttattctgtgaggaacatggcatcatacatgagaggacgcctccctattctcccgagtctaatgggattgctgaaaggaagaaccgcacactgactgacttggtgaatgccatgttggacaccgcgggactgcctaaggcatggtggggggaggcattgttgacctcaaatcatgtgttaaacagagttcctaacagaaataaggacaaaacaccatatgagatatggattggtagaaaaccaacactttcttatttgcgcacatgggggtgcttggcgaaagtcaatgtaccaataacgaagaagcgaaaacttggacctaagactgtggactgtgtttttctgggatatgctcatcatagcattgcctatagattttcaatagttaaatctgaggtaccggacatgcatgttggtacaattatggagtctcgtgatgctaccttctttgagagctttttcccaatgaaggatacacatagtggttcgaaccaaccctctgaaataattcccagttcaatcacaccaccagaacaaactgaacatacacatgaacttgtctctgaggaggatgtcagtgaagctcctcgaaggagtaagagacaaaggacggctaagtcttttggtgatgatttcactgtgtacctcgtggatgacactcctaagtcaatttcagaagcatatgcatctcctgatgcagactactggaaggaggctgtccgtagtgaaatggattccattatcgctaacgggacttgggaggtgacagagcgaccctatgggtgtaaacctgtggggtgcaagtgggtgttcaagaagaagcttaggcctgacggtactattgaaaagtacaaggctcggcttgttgctaagggctatactcagaaagaaggcgaagatttctttgacacttactcacatgttgctagattgaccacaattcgtgtgctactttccctagcagcctcacatggtcttctcgttcatcaaatggacgttaagacaacttttcttaatggagagctggatgaggagatctatatgtatcaacctgatggttttgtagttgaaggtcaagaaggcaaagtgtgcaaattgttgaagtctttgtatggtctgaaacaagctcctaagcaatggcatgagaaatttgacaaaacattgacatctgcaggctttgcagtcaatgaggcagataaatgtgtgtactatcgccatggtaggggtgagggagttattttgtgcttgtatgttgacgacatactgatatttaagacaaatcttgaggtgataaatgaggttaaatcattcttgtctcaaaattttgatatgaaggatttgggagtagctgatgttatcttaaacattaagctaattagaggtgagaatgggattacactcttgcagtcccattatgtggagaagatcttgaatcgttttggctatattgatagtaagccttctccaacaccttatgatcctagcttgttgcttcgcaagaacaagagaattgctaggaatcaactggaatactcccaaatcattggctcgttgatgtacctggctagtgcaactaggcctgatatctcctttgctgtgagcaagttgagccgatttacctctaatccgggagatgatcactggcgtgcgcttgagcgagtaatgcgctatctgaaaggtactgtggaattggggcttcactatactgggtatcctgcggtactggagggttatagtgattctaactggatctctgatgtggatgagatcaaagccactagtggatatgttttcacactgggtggtggtgctgtttcatggaggtcttgcaaacagaccattttgacgaggtcaaccatggaagcagagctaacggcactggatactgctactgttgaggcagaatggctgcgtgatctattaatggatctgcctgttgttgaaaaaccggtgtcggctatccttatgaactgtgacaatcaaacgacatgtgaaaagacgattgaagtctgtcaggaaattaagaaactccggagttataacgttggattacatccaaacagcgagaaacctggcagatcctttcacgaagggactatcacgaaatgtgatagacaatgcatcgaaggagatgggtttgagacccatattaaatcattatatgtctataatctcaacaggctgtacctcccgctggcgccggtctgcatcaccagcgcgccgccattgctgaggcgacgccgagcctcgtctgcaaggacgctgaacagcacggccgacctcgcaaagcacctcccgaccggcgccgtgctcgccttcgaggtgctctcgccgtcctccaccgcggacgacagctacacggccaccaaccgtgcgctcatcgcctgcctcgtcggcgcctatgcactctgctgcttcctgctctccttcaccgacagctaccgcgacggcacgggcgccgtgcgctacgacttcgtcacgcccaagacttattgtgctgtgcgtgcagcccgtgggtag

SEQ ID NO: 15017 - DNA, 4134 bp, Oryza sativa
  Clone ID: TFbOSC414138j.C1.o4.fg
atggcgatcaggggcatcccgtcctctcgcgagatgaccgtggacgacttcaagaactggctgaagcagttcgacaccgacaacgacggccggataagccggggcgagctccgggaggccatccgccgccgcggcggctggttctccggcctgaaagccggccgcgccgtccgccacgccgacagggacaacagcggcttcgtggacgagtccgagatcgagaacctcgtcgccttcgcccagaaaactctgggcatgaaggttactgcctggcactgtgattttactatggctgattttgccgatgcactgaggccggataaattcaccggtgtgcattttaagagatggcagatcagggtcactctgtggctgacagctatgaaatgcttctgggtgagtactggcaaacctgaaggagttcttactgctgaacagcagaagcaattcgaggaagccactactctctttgtgggatgcattcttagcgttcttggcgatcgtctggtcgaggtgtatatgcatatgaccgacgctaaggagttgtgggatgcactgaatactaaattcggtgctactgatgctagcaatgatctgtatatcatggagcagtttcatgactacaaaatggctgacaaccgttctgtagtcgaacaggctcatgagatacaaaccatggctaaggaactcgaactccttaagtgtgtcttacccgacaaatttgtggccaggtgcattattgcaaaactacctccatcttggaggagtttcggtactgcactcaaacacaagagacaggaatactccgttgaggggttgattgcgtctcttgatgttgaggagaaagctcgggaaaaagatgccgcgtctaagggcgatggtgggcagtccagtgccaatgttgtgcacaaggcccagaacaagagcaaggggaaatacaaagctcagcagaccaccaacttcaagaagcagaagaagaacaacaacaatcctaatcaggatgagaggacttgctttgtgtgtggccaagttggtcatctggctaggaagtgtccacaacgcaaggggatgaaggcacctgcagggcagacttctaagtctgctaatgtgaccattggcaacactggagatggaagcgggtatggtaatttacctactgttttttcagttaatcaatctactaattggtgggttgatactggggccaatgtcgcacggggttccaccgtcctaatggggaatgggtcacatgcttctgttcatggtgttggcacggtagatctgaagtttacttcgggaaagatcgtgcagctgaagaacgtgcagcatgtcccttctatcgacaggaatcttgttagtggctcccgtctgactagagacggatttaagttggtttttgagtctaataaagtagtcgtgtctaaacatggatattttattggtaaaggttatgagtgcggaggcctgttccgcttttccctttctgatttctgcaataagtctgtgaaccatatttgtggcagtgtggatgatgaggctaatgtttggcattcacgtttatgtcatattaattttggcttgatgtctcggctttccagcatgtgtttaattcctaagttttccattgtcaaaggttctaagtgccatagttgtgtgcaatcgaagcaacctcgcaagcctcacaaggctgccgaggagagaaacttggcaccactagaactcctacattcagatctttgtgaaatgaatggggtgttgacgaagggtggaaaacgatatttcatgacattgattgatgatgctactagattttgctatgtgtacttgttgaaaacgaaagacgaggctctagactattttaaaatttataaggcagaggttgaaaatcaacttgacagaaagataaaaaggcttaggtctgatcgtggtggagagtttttctcgaacgagtttgacttattctgtgaggaacatggcatcatacatgagaggacgcctccctattctcccgagtctaatgggattgctgaaaggaagaaccgcacactgactgacttggtgaatgccatgttggacaccgcgggactgcctaaggcatggtggggggaggcattgttgacctcaaatcatgtgttaaacagagttcctaacagaaataaggacaaaacaccatatgagatatggattggtagaaaaccatcactttcttatttgcgcacatgggggtgcttggcgaaagtcaatgtaccaataacgaagaagcgcaaacttggacctaagactgtggactgtgtttttctgggatatgctcatcatagcattgcctatagatttttaatagttaaatccgaggatacacatagtggttcgaaccaaccctctgaaataattcccagttcaatcacaccaccagaacaaactgaacatacacatgaacttgtctctgaggaggatgtcagtgaagctcctcgaaggagtaagagacaaaggacggctaagtcttttggtgatgatttcactgtgtacctcgtggatgacactcctaagtcaatttcagaagcatatgcatctcctgatgcagactactggaaggaggttgtccgtagtgaaatggattccattatcgctaacgggacttgggaggtgacagagcgaccctatgggtgtaaacctgtggggtgcaagtgggtgttcaagaagaagcttaggcctgacggtactattgaaaagtacaaggctcggcttgttgctaagggctatactcagaaagaaggcgaagatttctttgacacttactcacctgttgctagattgaccacaattcgtgtgctactttccctagcagcctcacatggtcttctcgttcatcaaatggacgttaagacagcttttcttaatggagagctggatgaggagatctatatggatcaacctgatgggtttgtacttgaaggtcaagaaggcaaagtgtgcaaattgttgaagtctttgtatggtctgaaacaagctcctaagcaatggcatgagaaatttgacaaaacattgacatctgcaggctttgcagtcaatgaggcagataaatgtgtgtactatcgccatggtgggggtgagggagttattttgtgcttgtatgttgacgacatactgatatttgggacaaaccttgaggtgataaatgaggttaaatcattcttgtctcaaaattttgatatgaaagatttgggagtagctgatgttattttaaacattaagctaattagaggtgagaatgggattacactcttgcagtctcattatgtggagaagatcttgaatcgctttggctacattgatagtaagccttctccaacaccttatgatcctagcttgtcgcttcgcaagaacaagagaattgctaggaatcaactggaatactcccaaatcattggctcgttgatgtacctggctagtgcaactaggcctgatatctcctttgctgtgagcaagttgagccgatttacctctaatccgggagatgatcactggcgtgcgcttgagcgagtaatgcgctatctgaaaggtactgtggaattggggcttcactatactgggtatcctgcggtactggagggttatagtgattctaactggatctctgatgtggatgagatcaaagccactagtggatatgttttcacactgggtggtggtgctgtttcatggaggtcttgcaaacagacaattttgacgaggtcaaccatggaagcagagctaacggcactggatactgctactgttgaggcagaatggttgcgtgatctattaatggatctgcctgttgttgaaaaaccggtgccggctatccttatgaactgtgacaatcaaacgacatgtgaaaagacgattgaagtctgtcaggaaattaagaaactccggagttataacgttggattacatccaaacagcgagaaacctggcagatcccttcacgaagggactatcacgaaatgtgatagacaatgcatcgaaggagatgggtttgagacccatagcattcttgaaggaactcacctttgtgagcttgactgttggtcgcagtccatgaagattttgggtgaatcttctaggaagcttactaaagacctaggagtatga

SEQ ID NO: 15018 - DNA, 4824 bp, Oryza sativa
  Clone ID: TFbOSC417160j.C1.o3.fg
atggcgctgcgcctcgctgccgtaccagagagcgccgccgccgacctgagcgccgccgccaataccctgccgtgcatctcctaccgcgactcgatccggagcgtcgccgccgtcgtctccggcggccgagggcctctcttccagtccgaagattccgcctccacctggtcgtcttcctcctacgcgtccgactgctccggccactcctccggcgtctccgccgccgcggccgctggcttcagggcactcacggcgcacgagctcagggaggtcgcgcgtcgcatggtcgccgacggctacgcccagcgcatggtccaagcgttcgacgacgcggcgacggtcgaggtcctcgagggggagatgttagccgattgtaggttagatgacgatattgccaaagattatgaggcgcgagcggctgtgcgggaagcgcgcgcggcgcgtgaggaagcagaggcgcggctgcaggtagccacgagggcggcacgtctcgtggcagcagaagctgaagcagcacgcaccgcggaggccgccaggcaggctgcagctgctgctgctactttgcgagctgaggaggaggaggagcgacgtgacctggagctgacagacgcggcccgcgtgcgacgcgacgcggaccgggatcgacacataggccgacgtgatcgcgacttcagcccccatcgcagaggatcagatctccaccgcggtgaggaggagcggcgcgatccatggcgcgatcctcgaatcaaccgcgctctggagacccagcgactccgggagcaggcagcggcgattgaggcacaactggacttcgaccgggagcagggtggacgagacgttggcgcacggagccctcgcaggcagcgcgcctccccttccccggaccggcgccgtggtcgccgtggacgctccggctctcctcccgttgtgcagatcgtcgtcaaggatgttggcggcgcatggcccatgctcaccaagactaactacgccgagtgggcgatggtgatgaaggtgaagttgcaggcgcgccacatgtgggacgcggttcgatacggcgacgtcgactacggggaagatcggcgggcgttggagcggttggcgcagctcggcgacaccaccatcgatgaggagagagccgtggagaagctcctttgcgtcgtccccgagaagtacacgcagctggctctgtcgatcgagacgctgctggacttcaccgagctcacgaacgaagaggtgacaggtcgcctcaaggccgtcgacaaccgcaagcagctacctccctcagagccgatcaccattggtggcaagcttttcttcaccaaggagaagtggctcgcccgccaacaagagcggaagaagggggaggccacaagctcttcggcttcgggatcgtcgagcagccgcaagcgtcgaccacgcaagtgggagaaggcgcgtagtggcgctcttggcggcgccgatggcgagcgcaagggcagccgcaacgacacctgccacaactgcgggaagaccggccactgggccaaggactgccggcaggcgaagcacggcggtcaagcacacgtcgctcaagcgcaggagggtgatgaggtggctctgtttttcgtacacggaagcatcgagccacacttcactcccacaccggacgctaccgcgcccctccacctcgacgagctgtgggcccacgtcttcctcagcaacggatcctgcgacgacaagatcgacgggtggtgcctcgacactggtgccactcaccacatgaccgggcgacgggaattcttctccaagcttgactccagtgttcaaggctccgtcaagtttgaggacgcctcagccgtggagatcaagggcgtcggctccatcctcttcaccaccaagaccggcgagcaccggctgctcaccggtgtctactacatccccgcgctgaggaactccatcatcagtttgggacaactggatgagaacggcttgctcgtggagatagaggacggggtcttgcgggtttgggatcgccatcgtcgccttctcgtcaaggtgaacaggggtgccaaccgcctctatgttctccatgtacaggtggcgcagcccgtgtgccttgcagcccgccgcgacgatgatgcatggcggtggcacgagcgctttgggcacctcaacttcgaggccttgaagcagctcagcaacaaggagatggtgcagggcatgccacgagtcgagcacgtggagcagttttgcgacacctgcgtcctcaccaagcagcggcgactcccctttccccgccaagcaagtttctgcgccaaggagaagttggagctcgtgcacggcgacctctgcggtcccgtgactccggccacacctggaggccggcgcttcttcctgctgctcgtcgacgacgtgtcctgctacatgtgggtggtcctgctcgactccaaggcagtggctgcagacgccatcaagcaccatcaagttgctgcggagaaggagtgcggccgcaagcttcgggtgctacacaccgacaacggtggcgagttcacgacggctgagttcgcagcgtactgcgccgacgagaggatccagcgccacttctccgcgccatacaccccgcagcagaacggcgttgtggagcgccgcaaccagacagtggtggccactgcccgcgccctcctcaagcaaagagggatgccggcaatctactggggggaggcggtgatgactgccgtccatctcctcaaccgctcgcccaccaaggcccttgatggcaagacgtcgtacgaggcctggcacgggcgcaagccggtggtgagccacctccgcgtctttggctgtctcgccttcgccaaggagctcaaccacgtcggcaagctcaacgaccggagctcgccgggagtcttcatcggctatgcggagggtgtcaaggcctaccgcatcctcgacccttcgacgcagcacgtccgcatttctcgggacgtcgtgttcgacgaagggcgaggttgggcttcgtacaaggcggtggacgacggctcgacttcgactctcagagacttcgtcgtcgactacgtccactttagggcagccgggggagctagcagctcatcttcaccgagctcgtccacctcggcacccggctcgccatcagctccggcgagtcctctaccacctacaccaccagcaactcctccatcaccagctacgccccgctctcctacaccggcgcccacaccaccggtggagttcgccactccgttgtccaacgacgaggatcgtgttgatgcgtaccacgacgacgagcctctgcgctaccgcaccatggacaacatcttcggtgatcagcccgtccctggactggagacgcgcgacttcgaggccgagttgcacctggcgcatgaggacggcgagccctgctccttcgcagaggcgaatggagatgtggcatggcgcactgcgatgcagcacgagatggacgcggtcgagcggaactggacgtgggtgttggcagatcttcctgccagccaccgcgccatcacccttaagtgggtctacaagctcaagaaggatgaggccggggcggtgatcaagcacaaggcacgtctagtggcgcgcggcttcgttcagcaggagggagtcgactttgacgacgccttcgcgcccgttgcgcgaatggagtctgttcgtctgctcctcgcgctggcagcccaggaaggatggcgtgtgcaccacatggatgtcaagtccgccttcctcaacggagacctgaaggaggaggtctacgtccaccagccgccgggattcgtcatccccggcaaggagaacaaggttctccgcctgcgcaaggccctctacggcttgcggcaggccctctacgccaagctggactccactctcaagcaaatggggttccagcagaactctcacgaagctgctgtctaccagcggggcaaggacggcaatgccctgttggtaggcgtctacgtcgacgacttggtgatcaccggcaccaaggaggctgaggtggaggcgtttaaggaggagatgaaggcgactttccagatgagcgatttgggccttctctctttctacctggggatcgaggtccaccaggacagctctggcatctcccttcgccaaaccgcctacgccaagtgcatcgtcgagttgggcgggctcaccggctgcaacccagcgtacactcccatggaggaaaggttaaagctgagccgcgacagcacgctgagggaggtcgacgccacgcagtaccggcatattgtgggcagccttcgctacctcgtccacacgcggccagacttggcatttgctgttggctatgtcagccggttcatgcagcgaccgacgacagagcaccagcaggctgtcacgtcgagggcaccaccgactacggctttcactacccgaggtgtcccgtgcctgatcagctggcagtcggtcaagcaacaagtggtggccctgtctagttgcgaggcagagtacatcgctaccacaaccgcctcaactcaagctctctggttggctcggctgctgggtgatctcttgggcagaaacactgaagcagtggagctcaggatggacagcaagtccgctttggccttggcaaagaatcccgtcttccatgagcgcagcaagcacatccgcatcaagtatcatttcattcggagctgcttggaggaggggagcatcaaggccagctacattaacacccaggatcagctcgccgatcttctcaccaagtcccttgggcgggtcaagttccaggagtttcgcgccaggattggaatggttcaaattccccaaaaggcgccacacatgacttag

SEQ ID NO: 15019 - DNA, 1715 bp, Oryza sativa
  Clone ID: TFbOSC417394j.C1.o2.gm
atggctggttttgccgatgcactgagaccggataaattcaccggtgtgcattttaagagatggcagatcagggtcactctgtggctgacagctatgaaatgcttctgggtgagtactggcaaacctgaaggagttcttactgctgaacagcagaagcaattcgaggaagccactactctctttgtgggatgcattcttagcgttcttggcgatcgtctggtcgaggtgtatatgcatatgaccgacgctaaggagttgtgggatgcactgaatactaaattcggtgctactgatgctagcaatgatctgtatatcatggagcagtttcatgactacaagatggctgacaaccgttctgtagtcgaacaggctcatgagatagaaaccatggctaaggaactcgaactccttaagtgtgtcttacccgacaaatttgtggccgggtgcattattgcaaaactacctccatcttggagaagtttcggtactgcactcaaacacaagagacaggaatactccgttgaggggttgattgcgtctcttgatgttgaggagaaaactcgggaaaaagatgccgcgtctaagggcgatggtgggcagtccagtgccaatgttgtgcacaaggcccagaacaagagcaaggggaaatacaaagctcagcagaccaccaacttcaagaagcagaagaagaacaacaacaatcctaatcaggatgagaggacttgctttgtgtgtggccaagttggtcatctggctagaaagtgtccacagcgcaaggggatgaaggcacctgcagggcagacttctaagtctgctaatgtgaccattggcaacactggagatggaagcgggtatggtaatttacctactgtcgcacggggttccaccgtcctaatggggaatgggtcacatgcttctgttcatggtgttggcacggtagatctgaagtttacttcgggaaagatcgtgcagctgaagaacgtgcagcatgtcccttctatcgacaggaatcttgttagtggctcccgtctgactagagacggatttaagttggtttttgagtctaataaaatagtcgtgtctaaacatggatattttattggtaaaggttatgagtgcggaggcctgttccgcttttccctttctgatttctgcaataagtctgtgaaccatatttatggcactgtggatgatgaggctaatgtttggcattcacactactggaaggaggctgtccgtagtgaaatggattccattatcgctaacgggacttgggaggtgacagagcgaccctatgggtgtaaacctgtggggtgcaagtgggtgttcaagaagaagcttaggcctgacgactactccatcccgctcgccggcgtgcaccggcgatcgggagagcaggtctccggaacctctgccttcgacgtcctgcaccgggagaaggcggcaataaggttagagcatgaagacagagcctctggtatcgtgccagtgaggccattagaggtgaggttcagtgactcgagatgtgtggctcttgctacaagtgacaccgggccattgacagtattgcgaagaatcatttctccaggaagccatgactccggcattgtcattgagatggagcttgaggcaaagcagagcctgaaaatcgggatgctgtgggagcccaaaggcgccatcagttttgctaatgagaattacaatgtgagcaacag

SEQ ID NO: 15020 - DNA, 5808 bp, Oryza sativa
  Clone ID: TFbOSC418579j.C1.o4.fg
atgggcatgggaagtgaattgtacgtcgctacgggatggagggagcggagcgcgatgcaggccgttggacgcgagactcgatggtgccttcggttggctggagggagcggcgcaactcactactccatcccgctcgccggcgtgcaccagcgatcgggagagcaggtctccggaacctctgcctttgacgtcctgcaccgggagaaggcggcaataagattaaatcattatatgtctataatctcaacaatccaaaaaccttattataggcactgtgattttactatggctggttttgccgatgcactgaggccggataaattcaccggtgtgcattttaagagatggcagatcagggtcactctgtggctgacagctatgaaatgcttctgggtgagtactggcaaacctgaaggagttcttactgctgaacagcagaagcaattcgaggaagccactactctctttgtgggatgcattcttagtgttcttggcgatcgtctggtcgaggtgtatatgcatatgaccgacgctaaggagttgtgggatgcactgaatactaaattcggtgctactgatgctagcaatgatctgtatatcatggagcagtttcatgactacaaaatggctgacaaccgttctgtagtcgaacaggctcatgagatacaaaccatggctaaggaactcgaactccttaagtgtgtcttacctgacaaatttgtggccgggtgcattattgcaaaactacctccatcttggaggagtttcggtactgcactcaaacacaagagacaggaatactccgttgaggggttgattgcgtctcttgatgttgaggagaaagctcgggaaaaagatgccgcgtctaagggcgatggtgggcagtccagtgccaatgttgtgcacaaggcccagaacaagagcaaggggaaatacaaagctcagcagaccaccaacttcaagaagcagaagaagaacaacaacaatcctaatcaggatgagaggacttgctttgtgtgtggccaagttggtcatctggctaggaagtgtccacagcgcaaggggatgaaggcacctgcagggcagacttctaagtctgctaatgtgaccattggcaacactggagatggaagcgggtatggtaatttacctactgttttttcagttaatcaatctactaattggtgggttgatactggggccaatgtacatgtttgtgctgacatctcattgttttcttcttatcaggtcgcacggggttccaccgtcctaatggggaatgggtcacatgcttctgttcatggtgttggcacggtagatctgaagtttacttcgggaaagatcgtgcagctgaagaacgtgcagcatgtcccttctatcgacaggaatcttgttagtggctcccgtctgactagagacggatttaagttggtttttgagtctaataaagtagttgtgtctaaacatggatattttattggtaaaggttatgagtgcggaggcctgttccgcttttccctttctgatttctgcaataagtctgtgaaccatatttgtggcagtgtggatgatgaggctaatgtttggcattcacgtttatgtcatattaattttggcttgatgtctcggctttccagcatgtgtttaattcctaagttttccattgtcaaaggttctaagtgccatagttgtgtgcaatcgaagcaacctcgcaagcctcacaaggctgccgaggagagaaacttggcaccactagaactcctacattcagatctttgtgaaatgaatggggtgttgacgaagggtggaaaacgatatttcatgacattgattgatgatgctactagattttgctatgtgtacttgttgaaaacgaaagacgaggctctagactattttaaaatttataaggcagaagttgaaaatcaacttgacagaatgataaaaaggcttaggtctgatcgtggtggagagtttttctcgaacgagtttgacttattctgtgaggaacatggcatcatacatgagaggacgcctccctattctccaaagtctaatgggattgctgaaaggaagaaccgcacactgactgacttggtgaatgccatgttggacaccgcgggactgcctaaggcatggtggggggaggcattgttgacctcaaatcatgtgttaaacagagttcctaacagaaataaggacaaaacaccatatgagatatggattggtagaaaaccatcactttcttatttgcgcacatgggggtgcttggcgaaagtcaatgtaccaataacgaagaagcgcaaacttggacctaagactgtggactgtgtttttctgggatatgctcatcatagcattgcctatagatttttaatagttaaatccgaggtaccggacatgcatgttggtacaattatggagtctcgtgatgctaccttctttgagagctttttcccaatgaaggatacacatagtggttcgaaccaaccctctgaaataattcccagttcaatcacaccaccagaacaaactgaacatacacatgaacttgtctctgaggaggatgtcagtgaagctcctcgaaggagtaagagacaaaggacggctaagtcttttggtgatgatttcactgtgtacctcgtggatgacactcctaagtcaatttcagaagcatatgcatctcctgatgcagactactggaaggaggctgtccgtagtgaaatggattccattatcgctaacgggacttgggaggtgacagagcgaccctatgggtgtaaacctgtggggtgcaagtgggtgttcaagaagaagcttaggcctgacggtactattgaaaagtacaaggctcggcttgttgctaagggctatactcagaaagaaggcgaagatttctttgacacttactcatctgttgctagattgaccacaattcgtgtgctactttccctagcagcctcacatggtcttctcgttcatcaaatggacgttaagacagcttttcttaatggagagctggatgaggagatctatatggatcaacctgatgggtttgtagttgaaggtcaagaaggcaaagtgtgcaaattgttgaagtctttgtatggtctgaaacaagctcctaagcaatggcatgagaaatttgacaaaacattgacatctgcaggctttgcagtcaatgaggcagataaatgtgtgtactatcgccatggtgggggtgagggagttattttgtgcttgtatgttgacgacatactgatatttgggacaaaccttgaggtgataaatgaggttaaatcattcttgtctcaaaattttgatatgaaagatttgggagtagctgatgttatcttaaacattaagctaatagagaagatcttgaatcgctttggctacattgatagtaagccttctccaacaccttatgattctagcttgttgcttcgcaagaacaagagaattgctaggaatcaactggaatactcccaaatcattggctcgttgatgtacctggctagtgcaactaggcctgatatctcctttgctgtgagcaagttgagccgatttacctctaatccgggagatgatcactggcgtgcgcttgagcgagtaatgcgctatctgaaaggtactgtggaattggggcttcactatactgggtatcctgcggtactggagggttatagtgattctaactggatctctgatgtggatgagatcaaagccactagtggatatgttttcacactgggtggtggtgctgtttcatggaggtcttgcaaacagaccattttgacgaggtcaaccatggaagcagagctaacggcactggatactgctactgttgaggcagaatggctgcgtgatctattaatggatctgcctgttgttgaaaaaccggtgccggctatccttatgaactgtgacaatcaaacgacatgtgaaaagacgattgaagtctgtcaggaaattaagaaactccggagttataacgttggattacatccaaacagcgagaaacctggcagatcccttcacgaagggactatcacgaaatgtgataaacaatgcatcgaaggagatgggtttgagacccatattaaatcattatatgtctataatctcaacagggctgtgcatgccttcaagccgttcgacaagttagcgagacgagaaagccccagagtggaatcgatcatgtcaacgacgccaacggcagcatcgcgccggctcgtcctgatcctctgcaccctcgctatctcctgcagcagcggcatcgccggattcgccgccggcgatgacgacgcgttcatccgctgcctcgccgccgccgctgtcccgccacggctggtccacaccccgggctccgcgtcctacgccccgacgctcgtctcctccatccggaacctccgcttcgtcacgccggggacgccgaggccgctcgccatcgtcgcggccgccgaggcgggccacgcccaggccgcggtgcggtgcggccggcgccacggggtccgcgtccgcgcgcgcagcggcgggcacgactacgagggcctctcctacctctccctcgaccgccgcgagcggttcgcggtgctcgacctcgccgcgctccgcgacgtccgcgtggacgccgatcgcgccgaggcgtgggtcgggtcgggcgccacgctcggcgagctctactacgcggtgggcgccgcgagccgcactctcgcgttcccggccggtgtctgcccgaccgtcggcgtcgggggccacatcagcggcgggggattcggcacgctgatgcgcaggtacggcctcgccgcggacaacgtcctcgacgccgtcctcgtggacgccgacggccggctcctgaacaggaccaccatgggggagggcctcttctgggcaatcaggggcggcggcggcgagagcttcggcgtcgtgctgtcctggaagctgcggctggtccgcgtcccggagacggtcaccgtgttcaccatccgccgcccgagaaaccaatccgccaccgacctcatcaccaaatggcaagagatctccccctcactgccccgagacgtcatcctccgcgtcgtcgtgcagagccagcacgcgcagttcgagtccctgttcctcggccggtgccgccgcctcgcccgcctcatgcgagctcgcttcccggagctcgggatgacgcagtccgactgcgaggagatcacctggatccaatccaccgtctacttcgccttctactccagctccaagccactggagctcctcctggacaggggcaccgagccggacagatacttcaaggccaaatccgactacgtccaagaacccatcccacgccacgcctgggagagcacatggccatggctggaggagcacgacgccgggctgctcatcctcgacccctacggcggcgagatggcccgcgtctcgccggcggcgacgccgttcccgcaccggaagggcaacctgtacaacctccagtactactcgttctggttcgagcacggagcagagacattggagaggcatctgagctgggtcagggggctgtatggcgagatggagccgtacgtgtccaagaacccaagaactgggtatgtcaactacagggacatggatcttgggaggaatgagatcgaggggaatgtgacgagctacacgaagggtaaggtttggggggagaagtatttcaggggcaatttcgagaggttggcggcggtgaaggccatggttgatcctgatgatttcttcaggaatgagcagagtattcctcctcttcctgctgcaaaggggtggagctccatttaa

SEQ ID NO: 15021 - DNA, 2904 bp, Oryza sativa
  Clone ID: TFbOSC418806j.C1.o3.gm
atggcgctgtatactgactgtgcctgggacatgcagataccgggggacatggtggtgaacgcgatgatggtggcaatggcggcgcactccggggaacaggcgcagaccatctaccacgtgacgtcgtcgctgagcaacccggcgccgtacgcggtgctgtcggacgccggccaccgctacttcttcgccaacccgccgccgcgcgcggggaagaacgggcggctgcgcaggatgcgcttcttcagcacggtggccagcttccgcgcccacatggccatcaactacaagcttcccctcgagatccttcggctggtgaacattgcgctctgtggcatgttctcccggcgctacgacgagctgagcaggaagtacaagttcgtcatgcatctcgtcgagctctacgcgccctacaccttgttcaaaggctgcttcgacgacatcaacacggagaagctaaggattacgatgaggaagcaggaggacaaaaacgatggaggatattgttttgattttgaccccaagtcgattgattgggatgagtatttctacaaggtccacatccccgactactccatcccgctcgccggcgtgcaccggcgatcgggagagcaggtctccggaacctctgccttcgacgttctgcaccgggagaaggcggcaatcagggtcactctgtggctgacagctatgaaatgcttctgggtgagtactggcaaacctgaaggagttcttactgctgaacagcagaagcaattcgaggaagccactactctctttatgggatgcattctgagcgttcttggcgatcgtctggtcgaggtgtatatgcatatgaccgacgctaaggagttgtgggatgcactgaatactaaattcggtgctacttatgctagcaatgatctgtatatcatggagcagtttcatgactacaaaatggctgacaaccgttctgtagtcgaacaggctcatgagatacaaaccatggctaaggaactcgaactccttaagtgtgtcttacccgacaaatttgtggccgggtgcattattgcaaaactacctccatcttggaggagtttcggtactgcactcaaacacaagagacaggaatactccgttgaggggttgattgcgtctcttgatgttgaggagaaagctcgggaaaaagatgccgcgtctaagggcgatggtgggcagtccagtgccaatgttgtgcacaaggcccagaacaagagcaaggggaaatacaaagctcagcagaccaccaacttcaagaagcagaagaagaacaacaacaatcctaatcaggatgagaggacttgctttgtgtgtggccaagttggtcatctggctaggaagtgtccacagcgcaaggggatgaaggcacctgcagggcagacttctaagtctgctaatgtgaccattggcaacactggagatggaagcgggtatggtaatttacctactgtcgcacggggttccaccgtcctaatggggaatgggtcacatgcttctgttcatggtgttggcacggtagatctgaagtttacttcgggaaagatcgtgcagctgaagaacgtgcagcatgtcccttctatcgacaggaatcttgttagtggctcccgtctgactagagacggatttaagttggtttttgagtctaataaagtagtcgtgtctaaacatggatattttattggtaaaggttatgagtgcggaggcctgttccgcttttccctttctgatttctgcaataagtttgtgaaccatatttgtggcagtgtggatgatgaggctaatgtttggcattcaccctcacatggtcttctcgttcatcaaatggacgttaagacagcttttcttaatggagagctggatgaggagatctatatggatcaacctgatgggtttgtagttgaaggctttgcagtcaatgaggcagataaatgtgtgtactatcgccatggtgggggtgagggagttattttgtgcttgtatgttgacgacatactgatatttgggacaaaccttgaggtgataaatgagtcccattatgtggagaagatcttgaatcgctttggctacattgatagcaagccttctccaacaccttatgatcctagcttgttgcttcgcaataacaagagaattgctaggaatcaactggaatactcccaaatcattggctcgttgatgtacctggctagtgcaactaggcctgatatctcctttgctgtgagcaagttgagccgatttacctctaatccgggagatgatcactggcgtgcgcttgagcgagtaatgcgctatctgaaaggtactgtggaattggggcttcactatactgggtatcctgcggtactggagggttatagtgattctaactggatctctgatgtggatgagatcaaagccactagtggatatgttttcacactgggtggtggtgctgtttcatggaggtcttgcaaacagaccattttgacgaggtcaaccatggaagcagagctaacggcactggatactgctactgttgaggcagaatggctgcgtgatctattaatggatctgcctgttgttgaaaaaccggtgccggctatccttatgaactgtgacaatcaaacgagcattcttgaaagaactcacctttgtgagcttgactgttggtcgcagtctatgaagattttggactactccatcccactcgccggcgtgcaccggcgatcgggagagcaggtctccggaacctctgccttcgacgttctgcaccgggagaaggcggcaataagtgggtatacaatgtcttttatatttatgggccctgaggtggtcttcctgggccgacccattaggtggcgaagggcctccatggaccaccaggtctcctatgcccttagccgaaggtaa

SEQ ID NO: 15022 - DNA, 3459 bp, Oryza sativa
  Clone ID: TFbOSC419888j.C1.o1.fg
atggctggttttgccgatgcactgaggccggataaattcaccggtgtgcattttaagagatggcagatcagggtcactctgtggctgacagctatgaaatgcttctgggtgagtactggcaaacctgaaggagttcttattgctgaacagcagaagcaattcgaggaagccactactctctttgtgggatgcattcttagcgttcttggcaatcgtctggtcgaggtgtatatgcatatgaccgacgctaaggagttgtgggatgcactgaatactaaattcggtgctactgatgctagcaatgatctgtatatcatggagcagtttcatgactacaagatggctgacaaccgttctgtagtcaaacgggctcatgagatacaaaccatggctaaggaactcgaactccttaagtgtgtcttacccgacaaatttgtggccgggtgcattattgcaaaactacctccatcttggagaagtttcggtactgcactcaaacacaagagacaggaatactccgttgaggggttgatagcgtctcttgatgttgaggagaaagctcgggaaaaagatgccgcgtctaagggcgatggtgggcagtccagtgccaatgttgtgcacaaggcccagaacaagagcaaggggaaatacaaagctcagcagaccaccaacttcaagaagcagaagaagaacaacatcaatcctaatcaggatgagaggacttgctttgtgtgtggccaagttggtcatctggctaggaagtgtccacagcgcaaggggatgaaggcacctgcagggcagacttctaagtctgctaatgtgaccattggcaacactggagatggaagcgggtatggtaatttacctactgttttttcagttaatcaatctactaattggtgggttgatactggggccaatatacatgtttgtgctgacatctcattgttttcttcttatcaggtcgcacggggttccaccgtcctaatggggaatgggtcacatgcttctgttcatggtgttggcacggtagatctgaagtttacttcgggaaagatcgtgcagctaaagaacgtgcagcatgtcccttctatcgacaggaatcttgttagtggctcccgtctgactagagacggatttaagttggtttttaagtctaataaagtagtcgtgtctaaacatggatattttattggtaaaggttatgagtgcggaggcctgttccgtttttccctttctgatttctgcaataagtctgtgaaccatatttttggcagtatggatgatgaggctaatgtttggcattcacgtttatgtcatattaattttggcttgatgtctcggctttccagcatgtgtttaattcctaagttttccattgtcaaaggttctaagtgccatagttgtgtgcaatcgaagcaacctcgcaagcctcacaaggctgccgaggagataaacttggcaccactagaactcctacattcagatctttgtgaaatgaatggggtgttgacgaagggtggaaaacgatatttcatgacattgattgatgatgctactagattttgctatgtgtacttgttgaaaacgaaagacgaggctctagactattttaaaatttataaggcagaagttgaaaatcaacttgacagaaagataaaaaggcttaggtctgatcgtggtggagagtttttctcgaacgagtttgacttattctgtgagaaacatggcatcatacatgagaggacgcctccctattctcccgagtctaatgggattggtgaaaggaagaaccgcacactgactgacttggtgaatgccatgttggacaccgcgggactgcctaaggcatggtggggggaggcattgttgacctcaaatcatgtgttaaacagagttcctaacagaaataaggacaaaacaccatatgagatatggattggtagaaaaccatcactttcttatttgcgcacatgggggtgcttggcgaaagtcaatgtaccaataacgaagaagcgcaaacttggacctaagactgtggactgtgtttttctgggatatgctcatcatagcattgcctatagatttttaatagttaaatccgaggtaccggacatgcatgttggtacaattatggagtctcgtgatgctaccttctttgagagttttttcccaatgaaggatacacatagtggttcgaaccaaccctctgaaataattcccaattcaatcacaccaccagaacaaactgaacatacacatgaacttgtctctgaggaggatgtcagtgaagctcctcgaaggagtaagagacaaaggacggctaagtcttttggtgatgatttcactgtgtacctcgtggatgacactcctaagtcaatttcagaagcatatgcatctcctgatgcagactactggaaggaggctgtccgtaatgaaatggattccattatcgctaacgggacttgggaggtgacagagcgaccctatgggtgtaaacctgtggggtgcaagtgggtgtttaagaagaagcttaggcctgacggtactattgaaaagtacaaggctcggcttgttgctaagggctatactcggaaagaaggcgaagatttctttaacacttactcacctgttgctagattgaccacaattcgtgtgctactttccctagcagcctcacatggtcttctcgttcatcaaatggacgttaagacagcttttcttaatggagagctggatgaggagatctatatgtatcaacctgatgggtttgtagttgaaggtcaagaaggcaaagtgtgcaaattgttgaagtctttgtatggtctgaaacaagctcctaagcaatggcatgagaaatttgacaaaacattgacatctgcaggctttgtagtcaatgaggcagataaatgtgtgtactatcgccatggtgggggtgagggagttattttgtgcttgtatgttgatgacatactgatatttgggacaaaccttgaggtgataaatgaggttaaatcattcttgtctcaaaattttgatatgaaggatttgggagtagctgatgttatcttaaacattaagctaattagaggtgagaatgggattacactcttgcagtcccattatgtggagaagatcttgaatcgttttggctacattgatagtaagccttctccaacaccttatgatcctagcttgttgcttcgcaagaacaagagaattgctaggaatcaactggaatactcccaaatcattggctcgctgatgtacctggctagtgcaactaggcctgatatctcctttgctgtgagcaagttgagccggtttacctctaatccaggagatgatcactggcgtgcgcttgagcgagtaatgcgctatctgaaaggtactatggaattggggcttcactatactgggtatcctgcggtactggagggttatagtgattctaactag

SEQ ID NO: 15023 - DNA, 3963 bp, Oryza sativa
  Clone ID: TFbOSC420440j.C1.o14.fg
atggctggttttgtcgatgcactgaggccggataaattcaccggtgtgcattttaagagatggcagatcagggtcactctgtggctgacagctatgaaatgcttctgggtgagtactggcaaacctgaaggagttcttactgctgaacagcagaagcaattcgaggaagccactactctctttgtgggatgcattcttagcgttcttggcgatcgtctggtcgaggtgtatatgcatatgaccgacgctaaggagttgtgggatgcactgaatactaaattcggtgctactgatgctagcaatgatctgtatatcatggagcagtttcatgactacaaaatggctgacaaccgttctgtagtcgaacaggctcatgagatacaaaccatggctaaggaactcgaactccttaagtgtgtcttacccgacaaatttgtggccgggtgcattattgcaaaactacctccatcttggaggagtttcggtactgcactcaaacacaagagacaggaatactccgttgaggggttgattgcgtctcttgatgttgaggagaaagctcgggaaaaagatgccgcgtctaagggcgatggtgggcagtccagtgccaatgttgtgcacaaggcccagaacaagagcaaggggaaatacaaagctcagcagaccaccaacttcaagaagcagaagaagaacaacaacaatcctaatcaggatgagaggacttgctttgtgtgtggccaagttggtcatctggctaggaagtgtccacaacgcaaggggatgaaggcacctgcagggcagacttctaagtctgctaatgtgaccattggcaacactggagatggaagcgggtatggtaatttacctactgttttttcagttaatcaatctactaattggtgggttgatactggggccaatgtacatgtttgtgctgacatctcattgttttcttcttatcaggtcgcacggggttccaccgtcctaatggggaatgggtcacatgcttctgttcatggtgttggcacggtagatctgaagtttacttcgggaaagatcgtgcagctgaagaacgtgcagcatgtcccttctatcgacaggaatcttgttagtggctcccgtctgactagagacggatttaagttggtttttgagtctaataaagtagtcgtgtctaaacatggatattttattggtaaaggttatgagtgcggaggcctgttccgcttttccctttctgatttctgcaataagtctgtgaaccatatttgtggcagtgtggatgatgaggctaatgtttggcattcacgtttatgtcatattaattttggcttgatgtctcggctttccagcatgtgtttaattcctaagttttccattgtcaaaggttctaagtgccatagttgtgtgcaatcgaagcaacctcgcaagcctcacaaggctgccgaggagagaaacttggcaccactagaactcctacattcagatctttgtgaaatgaatggggtgttgacgaagggtggaaaacgatattttatgacattgattgatgatgctactagattttgctatgtgtacttgttgaaaacgaaagacgaggctctagactattttaaaatttataaggcagaggttgaaaatcaacttgacagaaagataaaaaggcttaggtctgatcgtggtggagagtttttctcgaacgagtttgacttattctgtgaggaacatggcatcatacatgagaggacgcctccctattctcccgagtctaatgggattgctgaaaggaagaaccgcacactgactgacttggtgaatgccatgttggacaccgcgggactgcctaaggcatggtggggggaggcattgttgacctcaaatcatgtgttaaacagagttcctaacagaaataaggacaaaacaccatatgagatatggattggtagaaaaccatcactttcttatttgcgcacatgggggtgcttggcgaaagtcaatgtaccaataacgaagaagcgcaaacttggacctaagactgtggactgtgtttttctgggatatgctcatcatagcattgcctatagatttttaatagttaaatccgaggtaccggacatgcatgttggtacaattatggagtctcgtgatgctaccttctttgagagctttttcccaatgaaggatacacatagtggttcgaaccaaccctctgaaataattcccagttcaatcacaccaccagaacaaactgaacatacacatgaacttgtctctgaggaggatgtcagtgaagctcctcgaaggagtaagagacaaaggacggctaagtcttttggtgatgatttcactgtgtacctcgtggatgacactcctaagtcaatttcagaagcatatgcatctcctgatgcagactactggaaggaggctgtccgtagtgaaatggattccattatcgctaacgggacttgggaggtgacagagcgaccctatgggtgtaaacctgtggggtgcaagtgggtgttcaagaagaagcttaggcctgacggtactattgaaaagtacaaggctcggcttgttgctaagggctatactcagaaagaaggcgaagatttctttgacacttactcacctgttgctagattgaccacaattcgtgtgctactttccctagcagcctcacatggtcttctcgttcatcaaatggacgttaagacagcttttcttaatggagagctggatgaggagatctatatggatcaacctgatgggtttgtacttgaaggtcaagaaggcaaagtgtgcaaattgttgaagtctttgtatggtctgaaacaagctcctaagcaatggcatgagaaatttgacaaaacattgacatctgcaggctttgcagtcaatgaggcagataaatgtgtgtactatcgccatggtgggggtgagggagttattttgtgcttgtatgttgacgacatactgatatttgggacaaacattgaggtgataaatgaggttaaatcattcttgtctcaaaattttgatatgaaagatttgggagtagctgatgttattttaaacattaagctaattagaggtgagaatgggattacactcttgcagtctcattatgtggagaagatcttgaatcgctttggctacattgatagtaagccttctccaacaccttatgatcctagcttgtcgcttcgcaagaacaagagaattgctaggaatcaactggaatactcccaaatcattggctcgttgatgtacctggctagtgcaactaggcctgatatctcctttgctgtgagcaagttgagccgatttacctctaatccgggagatgatcactggcgtgcgcttgagcgagtaatgcgctatctgaaaggtactgtggaattggggcttcactatactgggtatcctgcggtactggagggttatagtgattctaactggatctctgatgtggatgagatcaaagccactagtggatatgttttcacactgggtggtggtgctgtttcatggaggtcttgcaaacagacaattttgacgaggtcaaccatggaagcagagctaacggcactggatactgctactgttgaggcagaatggttgcgtgatctattaatggatctgcctgttgttgaaaaaccggtgccggctatccttatgaactgtgacaatcaaacgacatgtgaaaagacgattgaagtctgtcaggaaattaagaaactccggagttataacgttggattacatccaaacagcgagaaacctggcagatcccttcacgaagggactatcacgaaatgtgatagacaatgcatcgaaggagatgggtttgagacccatagcattcttgaaggaactcacctttgtgagcttgactgttggtcgcagtccatgaagattttgggtgaatcttctaggaagcttactaaagacctaggagtatga

SEQ ID NO: 15024 - DNA, 1005 bp, Oryza sativa
  Clone ID: TFbOSC420751j.C1.o1.fg
atggctggttttgccgatgcactgaggccggataaattcaccggtgtgcattttaagagatggcagatcagggtcactctgtggctgacagctatgaaatgcttctgggtgagtactggcaaacctgaaggagttcttactgctgaacagcagaagcaattcgaggaagccactactctctttgtgggatgcattcttagcgttcttggcgatcgtctggtcgaggtgtatatgcatatgaccgacgctaaggagttgtgggatgcactgaatactaaattcggtgctactgatgctagcaatgatctgtatatcatggagcagtttcatgactacaaaatggctgacaaccgttctgtagtcgaacaggctcatgagatacaaaccatggctaaggaactcgaactccttaagtgtgtcttacccgacaaatttgtggccgggtgcattattgcaaaactacctccatcttggaggagtttcggtactgcactcaaacacaagagacaggaatactccgttgaggggttgattgcgtctcttgatgttgaggagaaagctcgggaaaaagatgccgcgtctaagggcgatggtgggcagtccagtgccaatgttgtgcacaaggcccagaacaagagcaaggggaaatacaaagctcagcagaccaccaacttcaagaagcagaagaagaacaacaacaatcctaatcaggatgagaggacttgctttgtgtgtggccaagttggtcatctggctaggaagtgtccacaacgcaaggggatgaaggcacctgcagggcagacttctaagtctgctaatgtgaccattggcaacactggagatggaagcgggtatggtcgcacggggttccaccgtcctaatggggaatgggtcacatgcttctgttcatggtgttggcacggtagatctgaagtttacttcgggaaagatcgtgcagctgaagaacgtgcagcatgtcccttctatcgacaggaatcttgttag

SEQ ID NO: 15025 - DNA, 3963 bp, Oryza sativa
  Clone ID: TFbOSC422154j.C1.o1.fg
atggctggttttgccgatgcactgaggccggataaattcaccggtgtgcattttaagagatggcagatcagggtcactctgtggctgacagctatgaaatgcttctgggtgagtactggcaaacctgaaggagttcttactgctgaacagcagaagcaattcgaggaagccactactctctttgtgggatgcattcttagcgttcttggcgatcgtctggtcgaggtgtatatgcatatgaccgacgctaaggagttgtgggatgcactgaatactaaattcggtgctactgatgctagcaatgatctgtatatcatggagcagtttcatgactacaaaatggctgacaaccgttctgtagtcgaacaggctcatgagatacaaaccatggctaaggaactcgaactccttaagtgtgtcttacccgacaaatttgtggccgggtgcattattgcaaaactacctccatcttggaggagtttcggtactgcactcaaacacaagagacaggaatactccgttgaggggttgattgcgtctcttgatgttgaggagaaagctcgggaaaaagatgccgcgtctaagggcgatggtgggcagtccagtgccaatgttgtgcacaaggcccagaacaagagcaaggggaaatacaaagctcagcagaccaccaacttcaagaagcagaagaagaacaacaacaatcctaatcaggatgagaggacttgctttgtgtgtggccaagttggtcatctggctaggaagtgtccacaacgcaaggggatgaaggcacctgcagggcagacttctaagtctgctaatgtgaccattggcaacactggagatggaagcgggtatggtaatttacctactgttttttcagttaatcaatctactaattggtgggttgatactggggccaatgtacatgtttgtgctgacatctcattgttttcttcttatcaggtcgcacggggttccaccgtcctaatggggaatgggtcacatgcttctgttcatggtgttggcacggtagatctgaagtttacttcgggaaagatcgtgcagctgaagaacgtgcagcatgtcccttctatcgacaggaatcttgttagtggctcccgtctgactagagacggatttaagttggtttttgagtctaataaagtagtcgtgtctaaacatggatattttattggtaaaggttatgagtgcggaggcctgttccgcttttccctttctgatttctgcaataagtctgtgaaccatatttgtggcagtgtggatgatgaggctaatgtttggcattcacgtttatgtcatattaattttggcttgatgtctcggctttccagcatgtgtttaattcctaagttttccattgtcaaaggttctaagtgccatagttgtgtgcaatcgaagcaacctcgcaagcctcacaaggctgccgaggagagaaacttggcaccactagaactcctacattcagatctttgtgaaatgaatggggtgttgacgaagggtggaaaacgatatttcatgacattgattgatgatgctactagattttgctatgtgtacttgttgaaaacgaaagacgaggctctagactattttaaaatttataaggcagaggttgaaaatcaacttgacagaaagataaaaaggcttaggtctgatcgtggtggagagtttttctcgaacgagtttgacttattctgtgaggaacatggcatcatacatgagaggacgcctccctattctcccgagtctaatgggattgctgaaaggaagaaccgcacactgactgacttggtgaatgccatgttggacaccgcgggactgcctaaggcatggtggggggaggcattgttgacctcaaatcatgtgttaaacagagttcctaacagaaataaggacaaaacaccatatgagatatggattggtagaaaaccatcactttcttatttgcgcacatgggggtgcttggcgaaagtcaatgtaccaataacgaagaagcgcaaacttggacctaagactgtggactgtgtttttctgggatatgctcatcatagcattgcctatagatttttaatagttaaatccgaggtaccggacatgcatgttggtacaattatggagtctcgtgatgctaccttctttgagagctttttcccaatgaaggatacacatagtggttcgaaccaaccctctgaaataattcccagttcaatcacaccaccagaacaaactgaacatacacatgaacttgtctctgaggaggatgtcagtgaagctcctcgaaggagtaagagacaaaggacggctaagtcttttggtgatgatttcactgtgtacctcgtggatgacactcctaagtcaatttcagaagcatatgcatctcctgatgcagactactggaaggaggctgtccgtagtgaaatggattccattatcgctaacgggacttgggaggtgacagagcgaccctatgggtgtaaacctgtggggtgcaagtgggtgttcaagaagaagcttaggcctgacggtactattgaaaagtacaaggctcggcttgttgctaagggctatactcagaaagaaggcgaagatttctttgacacttactcacctgttgctagattgaccacaattcgtgtgctactttccctagcagcctcacatggtcttctcgttcatcaaatggacgttaagacagcttttcttaatggagagctggatgaggagatctatatggatcaacctgatgggtttgtacttgaaggtcaagaaggcaaagtgtgcaaattgttgaagtctttgtatggtctgaaacaagctcctaagcaatggcatgagaaatttgacaaaacattgacatctgcaggctttgcagtcaatgaggcagataaatgtgtgtactatcgccatggtgggggtgagggagttattttgtgcttgtatgttgacgacatactgatatttgggacaaacattgaggtgataaatgaggttaaatcattcttgtctcaaaattttgatatgaaagatttgggagtagctgatgttattttaaacattaagctaattagaggtgagaatgggattacactcttgcagtctcattatgtggagaagatcttgaatcgctttggctacattgatagtaagccttctccaacaccttatgatcctagcttgtcgcttcgcaagaacaagagaattgctaggaatcaactggaatactcccaaatcattggctcgttgatgtacctggctagtgcaactaggcctgatatctcctttgctgtgagcaagttgagccgatttacctctaatccgggagatgatcactggcgtgcgcttgagcgagtaatgcgctatctgaaaggtactgtggaattggggcttcactatactggatatcctgcggtactggagggttatagtgattctaactggatctctgatgtggatgagatcaaagccactagtggatatgttttcacactgggtggtggtgctgtttcatggaggtcttgcaaacagacaattttgacgaggtcaaccatggaagcagagctaacggcactggatactgctactgttgaggcagaatggttgcgtgatctattaatggatctgcctgttgttgaaaaaccggtgccggctatccttatgaactgtgacaatcaaacgacatgtgaaaagacgattgaagtctgtcaggaaattaagaaactccggagttataacgttggattacatccaaacagcgagaaacctggcagatcccttcacgaagggactatcacgaaatgtgatagacaatgcatcgaaggagatgggtttgagacccatagcattcttgaaggaactcacctttgtgagcttgactgttggtcgcagtccatgaagattttgggtgaatcttctaggaagcttactaaagacctaggagtatga

SEQ ID NO: 15026 - DNA, 2638 bp, Oryza sativa
  Clone ID: TFbOSC4254j.C1.o16.gm
ggtcactctgtggttgacagctatgaaatgcttctgggtgagtactggcaaacctgaaggagttcttactgctgaacagcagaagcaattcgaggaagccactactctctttgtgggatgcattcttagcgttcttggcgatcgtctggtcgaggtgtatatgcatatgaccgacgctaaggagttgtgggatgcactgaatactaaattcggtgctactgatgctagcaatgatctgtatatcatggagcagtttcatgactacaaaatggctgacaaccgttctgtagtcgaacaggctcatgagatacaaaccatggctaaggaactcgaactccttaagtgtgtcttacccgacaaatttgtggccgggtgcattattgcaaaactacctccatcttggaggagtttcggtactgcactcaaacacaagagacaggaatactccgttgaggggttgattgcgtctcttgatgttgaggagaaagctcgggaaaaagatgccgcgtctaagggcgatggtgggcagtccagtgccaatgttgtgcacaaggcccagaacaagagcaaggggaaatacaaagctcagcagaccaccaacttcaagaagcagaagaagaacaacaacaatcctaatcaggatgagaggacttgctttgtgtgtggccaagttggtcatctggctaggaagtgtccacagcgcaaggggatgaaggcacctgcagggcagacttctaagtctgctaatgtgaccattggcaacactggagatggaagcgggtatggtaatttacctactgtcgcacggggttccaccgtcctaatggggaatgggtcacatgcttctgttcatggtgttggcacggtagatctgaagtttacttcgggaaagatcgtgcagctgaagaacgtgcagcatgtcccttctatcgacaggaatcttgttagtggctcccgtctgactagagacggatttaagttggtttttgagtctaataaagtagtcgtgtctaaacatggatattttattggtaaaggttatgagtgcggaggcctgttccgcttttccctttctgatttctgcaataacatgtgtttaattcctaagttttccattgtcaaaggttctaagtgccatagttgtgtgcaatcgaagcaacctcgcaagcctcacaaggctgccgaggagagaaacttggcaccactagaactcctacattcagatctttgtgaaatgaatggggtgttgacgaaggaagttgaaaatcaacttgacagaaagataaaaaggcttaggtctaatcgtggtggagagtttttctcgaacgagtttgacttattctgtgaggaacatggcatcatacatgagaggacgcctccctattctcccgagtctaatgggattgctgaaaggaagaaccgcacactgactgacttggtgaatgccatgttggacaccgcgggactgcctaaggcatgtgaagctcctcgaaggagtaagagacaaaggacggctaagtcttttggtgatgatttcactgtgtacctcgtggatgacactcctaagtcaatttcagaagcatatgcatctcctgatgcagactactggaaggaggctgtccgtagtgaaatggattccattatcgctaacgggacttgggaggtgacagagcgaccctatgggtgtaaacctgtggggtgcaagtgggtgttcaagaagaagcttaggcctgacgcctcacatggtcttctcgttcatcaaatggacgttaagacagcttttcttaatggagagctggatgaggagatctatatggatcaacctgatgggtttgtagttgaaggctttgcagtcaatgaggcagataaatgtgtgtactatcgccatggtgggggtgagggagttattttgtgcttgtatgttgacgacatactgatatttgggacaaaccttgaggtgataaatgagtcccattatgtggagaagatcttgaatcgctttggctacattgatagtaagccttctccaacaccttatgatcctagcttgttgcttcgcaagaacaagagaattgctaggaatcaactggaatactcccaaatcattggctcgttgatgtacctggctagtgcaactaggcctgatatctcctttgctgtgagcaagttgagccgatttacctctaatccgggagatgatcactggcgtgcgcttgagcgagtaatgcgctatctgaaaggtactgtggaattggggcttcactatactgggtatcctgcggtactggagggttatagtgattctaactggatctctgatgtggatgagatcaaagccactagtggatatgttttcacactgggtggtggtgctgtttcatggagcaaagatgttgtcctgcagagcattcttgaaagaactcacctttgtgagcttgactgttggtcgcagtctatgaagattttggactactccatcccgctcgccggcgtgcaccggcgatcgggagagcaggtctccggaacctctgccttcgacgttctgcaccgggagaaggcgacacttgcgaaaagtttcgaccaagcagccggtctttccgtcacctcggtacgtgttcaatatgttgcgcatatttga

SEQ ID NO: 15027 - DNA, 4071 bp, Oryza sativa
  Clone ID: TFbOSC4267j.C1.o2.fg
atggctggttttgccgatgcactgaggccggataaattcaccggtgtgcattttaagagatggcagatccgggtcactctgtggctgacagctatgaaatgcttccgggtgagtactggcaaacctgaaggagttcttactgctgaacagcagaagcaattcgaggaagccactactctctttgtgggatgcattcttagcgttcttggcgatcgtctggtcgaggtgtatatgcatatgaccgacgctaaggagttgtgggatgcactgaatactaaattcggtgctactgatgctagcaatgatctgtatatcatggagcagtttcatgactacaagatggctgacaaccgttctgtagtcgaacaggctcatgagatacaaaccatggctaaggaactcgaactccttaagtgtgtcttacccgacaaatttgtggctgggtgcattattgcgaaactacctccatcttggagaagtttcggtactgcactcaaacacaagagacaggaatactccgttgaggggttgatagcgtctcttgatgttgaggagaaagctcgggaaaaagatgccgcgtctaagagcgatggtgggcagtccagcgccaatgttgtgcacaaggcccagaacaagagcaaggggaaatacaaagctcagcagaccaccaacttcaagaagcagaagaagaacaacaacaatcctaatcaggatgagaggacttgctttgtgtgtggccaagttggtcatctggctaggaagtgtccacagcgcaaggggatgaaggcacctgcagggcagacttctaagtctgctaatgtgaccattggcaacactggagatggaagcgggtatggtaatttacctactgttttttcagttaatcaatctactaattggtgggttgatactggggccaatgtacatgtttgtgctgacatctcattgttttcttcttatcaggtcgcacggggttccaccgtcctaatggggaatgggtcacatgcttctgttcatggtcttggcacggtagatctgaagtttacttcgggaaagatcgtgcagctgaagaacgtgcagcatgtcccttctatcgataggaatcttgttagtggctcccgtctgactagagacggatttaagttggtttttgagtctaataaagtagtcgtgtctaaacatggatattttattggtaaaggttatgagtgcggaggcctgttccgcttttccctttctgatttctgcaataagtctgtgaaccatatttgtggcagtgtggatgatgaggctaatgtttggtattcacgtttatgtcatattaattttggcttgatgtctcggctttccagcatgtgtttaattcctaagttttccattgtcaaaggttctaagtgccatagttgtgtgcaatcgaagcaacctcgcaagcctcacaaggctgccgagaagagaaacttggcaccactagaactcctacattcagatctttatgaaatgaatggggtgttgacgaagggtggaaaacgatatttcatgacattgattgatgatgctactacattttgctatgtgtacttgttgaaaatgaaagacgaggctctagactattttaaaatttataaggcagaagttgaaaatcaacttgacagaaagataaaaaggcttaggtctgatcgtggtggagagtttttctcgaacgagtttgacttattctgtgaggaacatggcatcatacatgagaggacgcctccctattctcccgagtctaatgggattgctgaaaggaagaaccgcacactgactgacttggtgaatgccatgttagacaccgcgggactgcctaaggcatggtggggggaggcattgttgacctcaaatcatgtgttaaacagagttcctaacagaaataaggacaaaacaccatatgagatatggattggtagaaaaccatcactttcttatttgcgcacatgggggtgcttggcgaaagtcaatgtaccaataacgaagaagcgcaaacttggacctaagactgtggactgtgtctttctgggatatgctcatcatagcattgcctatagatttttaatagttaaatccgaagtactggacatgcatgttggtacaattatggagtctcgtgatgctaccttctttgagagctttttcccaatgaaggatacacatagtggttcgaaccaaccctctgaaataattcccagttcaatcacaccaccagaacaaactgaacatacacatgaacttgtctctgaggaggatgtcagtgaagctcctcgaaggagtaagagacaaaggacggctaaatcttttggtgatgatttcactgtgtacctcgtggatgacactcctaagtcaatttcagaagcatatgcatctcctgatgcagactactggaaggaggctgtccgtagtgaaatggattccattatcgctaacgggatttgggaggtgacagagcgaccctatgggtgtaaacctgtggggtgcaagtgggtgttcaagaagaagcttaggcctgacggtactattgaaaagtacaaggctcggcttgttgctaagggctatactcagaaagaaggcgaagatttctttgacacttactcacctattgctagattgaccacaattcgtgtgctactttccctagcagcctcacatggtcttctcgttcatcaaatggacgttaagacagcttttcttaatggagagctggatgaggagatctatatggatcaacctgatgggtttgtagttgaaggtcaagaaggcaaagtgtgcaaattgttgaagtctttgtatggtctgaaacaagctcctaagcaatggcatgagaaatttgacaaaacattgacatctgcaggctttgcagtcaatgaggcagataaatgtgtgtactatcgccatggtgggggtaagggagttattttgtgcttgtatgttgacgacatactgatatttgggacaaaccttgaggtgataaatgaggttaaatcattcttgtctcaaaattttgatatgaaggatttgggagtagctgatgttatcataaacattaagctaattagaggtgagaatgggattacactcttgcagtcccattatgtggagaagatcttgaatcgctttggctacattgatagtaagccttctccaacaccttatgatcctagcttgttgcttcgcaagaacaatagaattgctaggaatcaactggaatactcccaaattattggctcgttgatgtacctggctagtgcaactaggcctgatatctcctttgctgtgagcaagttgagccgatttacctctaatccgggagatgatcactggcgtgcgcttgagcgaataatgcgctatctgaaaggtactgtggaattggggcttcactatactgggtatcctgcggtactggagggttatagtgattctaactggatctctgatgtggatgagatcaaagccactagtggatatgttttcacactgggtggtggtgctgtttcatggaggtcttgcaaacagaccattttgacgaggtcaaccatggaagcagagctaacggcactggatactgctactgttgaggcagaatggctgcgtgatctattaatggatctgcctgttgttgaaaaaccggtgccggctatccttatgaactgtgacaatcaaacgacatgtgaaaagacgattgaagtctgtcaggaaattaagaaactccggagttataacgttggattacatccaaacagcgagaaacctggcagatcccttcacgaagggactatcacgaaatgtgatagacaatgcatcgaaggagatgggtttgagacccatattcaaaatggatactatagcattagtttggtggaaacaacaatagaaccaaacaaggttggttatgatctttgtgttggaatcacgagcctgggttacacgcagaaagacatgtattctcaaaaggttacaacatgtgttgtttttacttttggctccaccacttctcctatagcaaaaattccaccaccatttgtggaatcaaggcaatga

SEQ ID NO: 15028 - DNA, 4299 bp, Oryza sativa
  Clone ID: TFbOSC4900j.C1.o8.fg
atggcgaagactatggagcaagaatggcgtgaggcgaagagtcgtgcgagtgccttgccaggccagaggcgtctcaggcgaagggtgcaaggcgaagactatctgccgaaggaagacgacttcgccttggcaagttcgcccccgcgagggccgaagaagcctttccggcccatcaagcctaggggcaatagggccggcgatcgccagatggcccatcaagggcccatgagcccctatatcatcatgtacccttgtaaatgtccctttcataaggactactctatcccgctcgccggcgtgcaccggcgatcgggagagcaggtctccggaacctctgccttcgacgttctgcaccgggagaaggcggcaataaggcactgtgattttactatggctggttttgccgatgcactgaggccggataaattcaccggtgtgcattttaagagatggcagatcagggtcactctgtggctgacagctatgaaatgcttctgggtgagtactggcaaacctgaaggagttcttactgctgaacagcagaagcaattcgaggaagccactactctctttgtgggatgcattcttagcgttcttggcgatcgtctggtcgaggtgtatatgcatatgatcgacgctaaggagttgtgggatgcactgaatactaaattcggtgctactgatgctagcaatgatctgtatatcatggagcagtttcatgactacaaaatggctgacaaccattctgtagtcgaacaggctcatgagatacaaaccatggctaaggaactcgaactccttaagtgtgtcttacccgacaaatttgtggccgggtgcattattgcaaaactacctccatcttggaggagtttcggtactgcactcaaacacaagagacaggaatactccgttgaggggttgattgcgtctcttgatgttgaggagaaagctcgggaaaaagatgccgcgtctaagggcgatggtgggcagtccagtgccaatgttgtgcacaaggcccagaacaagagcaaggggaaatacaaagctcagcagaccaccaacttcaagaagcagaagaagaacaacaacaatcctaatcaggatgagaggacttgctttgtgtgtggccaagttggtcatctagctaggaagtgtccacagcgcaaggggatgaaggcacctgcagagcagacttctaagtctgctaatgtgaccattggcaacactggagatggaagcgggtatggtaatttacctactgttttttcagttaatcaatctactaattggtgggttgatactggggccaatgtacatgtttgtgctgacatctcattgttttcttcttatcaggtcgcacggggttccaccgtcctaatggggaatgggtcacatgcttctgttcatggtgttggcacggtagatctgaagtttacttcgggaaagatcgtacagctgaagaacgtgcagcatgtcccttctatcgacaggaatcttattagtggctcccgtctgactagagacggatttaagttggtttttgagtctaataaagtagtcgtgtctaaacatggatattttattggtaaaggttatgagtgcggaggcctgttccgcttttccctttctgatttctgcaataagtctgtgaaccatacttgtggcagtgtggatgatgaggctaatgtttggcattcacgtttatgtcatattaattttggcttgatgtctcggctttccagcatgtgtttaattcctaagttttccattgtcaaaggttctaagtgccatagttgtgtgcaatcgaagcaacctcgcaagcctcacaaggctgccgaggagagaaacttggcaccactagaactcctacattcagatctttgtgaaatgaatggggtgttgacgaagggtggaaaacgatatttcatgacattgattgatgatgctactagattttgctatgtgtacttgttgaaaacgaaagacgaggctctagactattttaaaatttataaggcagaagttgaaaatcaacttgacagaaagataaaaaggcttaggtctgatcgtggtggagagtttttctcgaacgagtttgacttattctgtgaggaacatggcatcatacatgagaggacgcctccctattctcccgagtctaatgggattgctgaaaggaagaaccgcacactgactgacttggtgaatgccatgttggacactgcgggactgcctaaggcatggtggggggaggcattgttgacctcaaatcatgtgttaaacagagttcctaacagaaataaggacaaaacaccatatgagatatggattggtagaaaaccatcactttcttatttgcgcacatgggggtgcttggtgaaagtcaatgtaccaataacgaagaagcgcaaacttggacctaagactgtggactgtgtttttctgggatatgctcatcatagcattgcctatagatttttaatagttaaatccgaggtaccggacatgcatgttggtacaattatggagtctcgtgatgctaccttctttgagagctttttcccaatgaaggatacacatagtggttcgaaccaaccctctgaaataattcccagttcaatcacaccaccagaacaaactgaatatacacatgaacttgtctctgaggaggatgtcagtgaagctcctcgaaggagtaagagacaaaggacggctaagtcttttggtgatgatttcactgtgtacctcgtggatgacactcctaagtcaatttcagaagcatatgcatctcctgatgcagactactggaaggaggctgtccgtagtgaaatggattccattatcgctaacgggacttgggaggtgacagagcgaccctatgggtgtaaacctgtggggtgcaagtgggtgttcaagaagaagcttaggcctgacggtactattgaaaagtacaaggctcggcttgttgctaagggctatactcagaaagaaggcgaagatttctttgacacttactcacctgttgctagattgaccacaattcgtgtgctactttccctagcagcctcacatggtcttctcgttcatcaaatggacgttaagacagcttttcttaatggagagctggatgaggagatctatatggatcaacctgatgggtttgtagttgaaggtcaagaaggcaaagtgtgcaaattgttgaagtctttgtatggtctgaaacaagctcctaagcaatggcatgagaaatttgacaaaacattgacatctgcaggctttggagtcaatgaggcagataaatgtgtgtactatcgccatggtgggggtgagggagttattttgtgcttgtatgttgacgacatactgatatttgggacaaaccttgaggtgataaatgaggttaaatcattcttgtctcaaaattttgatatgaaagatttgggagtagctgatgttatcttaaacattaagctaattagaggtgagaatgggattacactcttgcagtcccattatatggagaagatcttgaatcgctttggctacattgatagtaagccttctccaacaccttatgatcctagattgttgcttcgcaagaacaagagaattgctaggaatcaactggaatactcccaaatcattggctcgttgatgtacctggctagtgcaactaggcctgatatatcctttgctgtgagcaagttgagccgatttacctctaatccgggagatgatcactggcgtgcgcttgagcgagtaatgcgctatctgaaaggtactgtggaattggggcttcactatactgggtatcctgcggtactggagggttatagtgattctaactggatctctgatgtggatgagatcaaagccactagtggatatgttttcacactgggtggtggtgctgtttcatggaggtcttgcaaacagacaattttgacgaggtcaaccatggaagcagagctaacggcactggatactgctactgttgaggcagaatggctgcgtgatctattaatggatctgcctgttgttgaaaaaccggtgccggctatccttatgaactgtgacaatcaaacgataattgtcaaagtgaatagttctaaggataatatgaaatcttctagacatgtgaaaagacgattgaagtctgtcaggaaattaagaaactccggacttataacgttggattacatccaaacagcgagaaacctggcagatcccttcacgaagggactatcacgaaatgtgatagacaatgcatcgaaggagatgggtttgagacccatgtga

SEQ ID NO: 15029 - DNA, 3894 bp, Oryza sativa
  Clone ID: TFbOSC549j.C1.o1.fg
atggctggttttgccgatgcactgaggccggataaattcaccggtgtgcattttaagagatggcagatcagggtcactctgtggctgacagctatgaaatgcttctgggtgagtactggcaaacctgaaggagttcttactgctgaacagcagaagcaattcgaggaagccactactctctttgtgggatgcattcttagcgttcttggcgatcgtctggtcgaggtgtatatgcatatgaccgacgctaaggagttgtgggatgcactgaatactaaattcggtgctactgatgctagcaatgatctgtatatcatggagcagtttcatgactacaagatggctgacaaccgttctgtagtcgaacaggctcatgagatacaaaccatggctaaggaactcgaactccttaagtgtgtcttacccgacaaatttgtggccgggtgcattattgcaaaactacctccatcttggagaagtttcggtactgcactcaaacacaagagacaggaatactccgttgaggggttgatagcgtctcttgatgttgaggagaaagctcgggaaaaagatgccgcgtctaagggcgatggtgggcagtccagtgccaatgttgtgcacaaggcccagaacaagagcaaggggaaatacaaagctcagcagaccaccaacttcaagaagcagaagaagaacaacaacaatcctaatcaggatgagaggacttgctttgtgtgtggccaagttggtcatctggctaggaagtgtccacagcacaaggggatgaaggcacctgcagggcagacttttaagtctgctaatgtgaccattggcaacactggagatggaagcgggtatggtaatttacctactgttttttcagttaatcaatctactaattggtgggttgatactggggccaatgtatatgtttgtgctgacatcttattgttttcttcttatcaggtcgcacggggttccaccgtcctaatggggaatgggtcacatgcttctgttcatggtgttggcacggtagatctgaagtttacttcgggaaagatcgtgcagctgaagaacgtgcagcatgtcccttctatcgacaagaatcttgttagtggctcccgtctgactagagacggatttaagttggtttttgagtctaataaagtagtcgtgtctaaacatggatattttattggtaaaggttatgagtgcggaggcctgttccgcttttccctttctgatttctgcaataagtctgtgaaccatatttgtggcagtgtggatgatgaggctaatgtttggcattcacgtttatatcatattaattttggcttgatgtctcggctttccagcatgtgtttaattcctaagttttccattgtcaaaggttctaagtgccatagttgtgtgcaatcgaagcaacctcgcaagcctcacaaggctgccgaggagagaaacttggcaccactagaactcctacattcagatctttgtgaaatgaatggggtgttgacgaagggtggaaaacgatatttcatgacattgattgatgatgctactagattttgctatatgtacttgttgaaaacgaaagacgaggctctagactattttaaaatttataaggcagaagttgaaaatcaacttgacagaaagataaaaaggcttaggtctgatcgtggtggagagtttttctcgaacaagtttgacttattctgtgaggaacatggcatcatacatgagaggacgcctccctattctcccgagtctaatgggattgctgaaaggaagaaccgcacactgactgacttggtgaatgccatgttggacaccgcgggactgcctaaggcatggtggggggaggcattgttgacctcaaatcatgtgttaaacagagttcctaacagaaataaggacaaaacaccatatgagatatggattggtagaaaaccatcactttcttatttgcgcacatgggggtgcttggcgaaagtcaatgtaccaataacgaagaagcgcaaacttggacctaagactgtggactgtgtttttctgggatatgctcatcatagcattgcctatagatttttaatagttaaatccgaggtaccggacatgcatgttggtacaattatggagtctcgtgatgctaccttctttgagagctttttcccaatgaaggatacacatagtggttcgaaccaaccctctgaaataattcccagttcaatcacaccaccagaacaaactgaacatacacatgaacttgtctctgaggaggatgtcagtgaagctcctcgaaggagtaagagacaaaggacggctaagtcttttggtgatgatttcactgtgtacctcgtggatgacactcctaagtcaatttcagaagcatatgcatctcctgatgcagactactggaaggaggctgtccgtagtgaaatggattccattatcgctaacgggacttgggaggtgacagagcgaccctatgggtgtaaacctgtggggtgcaagtgggtgttcaagaagaagcttaggcctgacggtactattgaaaagtacaaggctcggcttgttgctaagggctatactcagaaagaaggcgaagatttctttgacacttactcacctgttgctagattgaccacaattcgtgtgctactttccctagcagtctcacatggtcttctcgttcatcaaatggacgttaagacagcttttcttaatggagagctggatgaggagatctatatggatcaacctgatgggtttgtagttgaaggtcaagaaggcaaagtgtgcaaattgttgaagtctttgtatggtctgaaacaagctcctaagcaatgtcatgagaaatttgacaaaccattgacatctgcaggctttgcagtcaatgaggcagataaatgtgtgtactatcgccatggtgggggtgagggagttattttgtgcttgtatgttgacgacatactgatatttgggacaaaccttgaggtgataaatgaggttaaatcattcttgtctcaaaattttgatatgaaggatttgggagtagctgatgttatcttaaacattaagctaattagaggtgagaatgggattacactcttgcagtcccattatgtggagaagatcttgaatcgctttggctacattgatagtaagccttctccaacaccttatgatcctagcttgttgcttcacaagaacaaaagaattgctaggaatcaactggaatactcccaaatcattggctcgttgatgtacctggctagtgcaactaggcctgatatctcctttgctgtgagcaagttgagccgatttacctctaatccgggagatgatcactggcgtgcgcttgagcgagtaatgcgctatctgaaaggtactgtggaattggggcttcactatactgggtatcctgcggtactggagggttatagtgattctaactggatctctgatgtggatgagatcaaagccactagtggatatgttttcacactgggtggtggtgctgtttcatggaggtcttgcaaacagaccattttgacgaggtcaaccatggaagcagagctaacggcactggatactgctactgttgaggcagaatggctgcgtgatctattaatggatctgcctattgttgaaaaaccggtgccggctatccttatgaactgtgacaatcaaacgacatgtgaaaagacgattgaagtctgtcaggaaattaagaaactccggagttataacgttggattacatacaaacagcgagaaacctggcagatcccttcacgaagggactatcacgaaatgtgatagacaatgcatcgaaggagatgggtttgagacccatgtgagttatactatggtggtaacccagtctatgtga

SEQ ID NO: 15030 - DNA, 56 bp, Oryza sativa
  Clone ID: TFbOSC549j.C1.o1.gm
atggcggcggcggcggctctcacgtccagcatccgtgacggtcctccgccgtcgag

SEQ ID NO: 15031 - DNA, 3657 bp, Oryza sativa
  Clone ID: TFbOSC5516j.C1.o2.gm
atggctgacctcctcggcgacccgacgtggccgcagctccaccggcgtccctgcacggacacgccatggccgggactccagtgcgagctcgcccccgacgacgcccgccacctgcgcgccaccaggctccacttcggccccgacgtcgccaccccgccgtgcaggcccggcgccaggctcgccgcgcccgtgctcctgggactcccccacctcaagacgctctccctcttcggctgcttcgtcgtcgccgacttgagtagtgagccaataaaaagccaggagatgagagcacatgccgccgccgccgccgccgccgtcgagctcccgccggcgctcttcaccaacgcctcctccctcgagcagctcgtgctcaagtctaaccccggcctcaccggccggatcccggcgacgctgagcgacctgaggagcctgcgcgtgcttagcctgtcccagaacggcttccgcggcgagatcccgccggagctcggccgcctcgccccgctgcagcagctcgacctcagctacaacaacctcaccggcgagattccggaggagatcggaggcatggagagcctgtccatcctggacctgagctggaacagcctcgccggcggcttgccggcggcgctggggagcctgaggatgctggagaaggccgacctgagccacaacgagctcgccgggagggtgccggcggaggtcgggtcgctgcgggagctggtgttcctggacctgagccacaacgagctcgccgggccgctgccggcgtcgatggccgggctggggaagctgcagtacctgctcctgcaggagaaccccatcggcacggcggtgccggcggcggtggtcgggtcgctccggcggctgcaggtggtgggcatgtccgggtgcggcctgacggggccgatcccgcgcggcgcgttcgccgcgctggccagcctggcggcgctgtcgctcgaccggaacaggctcgacgggccgatcccggcgagcctcgccgcgctgccgcggctggggcggctcaacctgagccagaaccggctggccggggagatcgcgctgccggcggagttcgtggcgcggctgggcaggcgcctcgacgtgcggggcaacgacaagctgtgcgtcggccgggaaaggtacggcggcgcgcaggcgagctacctgggcgcgccgccgtgcgctgcggctggcggtggctcgggggcagccgtaggagggacgtcgtcgtctccggtggagagctccgccggcgccgcggcgacggccggccgtggcttccgggtttacgggatcgctgggatgttcggcggcatgttttgttttgctgcaaatgcgccgtcgctcgtagactactccatcccgctcgccggcgtgcaccagcgatcgggagagcaggtcttccttttgcagttttgttttgctgcaaatgcgccgtcgctcgtagactactccatcccgctcgccggcgtgcaccaacgatcgggagagcaggtctccggaacctctgcctttgacgtcctgcaccgggagaaggcggcaataagggtcactctgtcgctgacagctatgaaatgcttctgggtgagtactggcaaacctgaacgagttcttactgctgaacagcagaagcaattcgaggaagccactactctctttgtgggatgcattcttagcgttcttggcgatcgtctggtcgagatgtatatgcatatgaccgacgctaaggagttgtgggatgcactgaatactaaattcggtgctactgatgctagcaataatctgtatatcatggagcagtttcatgactacaaaatggctgacaaccgttctgtagtcgaacaggctcatgagatacaaaccatggctaaggaactcgaactccttaagtgtgtcttacccgacaaatttgtggccgggtgcattattgcaaaactacctccatcttggaggagtttcggtactgcactcaaacacaagagacaggaatactccgttgaggggttgattgcgtctcttgatgttgaggagaaagctcgggaaaaagatgccgcgtctaagggcgatggtgggcagtccagtgccaatgttgtgcacaaggcccagaacaagagcaaggggaaatacaaagctcagcagaccaccaacttcaagaagcagaagaagaacaacaacaatcctaatcaggatgagaggacttgctttgtgtgtggccaagttggtcatctggctaggaagtgtccacagcgcaaggggatgaaggcacctgcagggcagacttctaagtctgctaatgtgaccattggcaacactggagatggaagcgggtcgcacgggctgaagaacgtgcagcatgtcccttctatcgacaggaatcttgttagtggctcccgtctgactagagacggatttaagttggtttttgagtctaataaagtagtcgtgtctaaacatggatattttattggtaaaggttatgagtgcggaggcctgttccgcttttccctttctgatttctgcaataagtctgtgaaccatatttgtggcagtgtggatgatgaggctaatgtttggcattcacactactggaaggaggctgtccgtagtgaaatggattccattatcgctaacgggacttgggaggtgacagagcgaccctatgggtgtaaacctgtggggtgcaagtgggtgttcaagaagaagcttaggcctgacgcctcacatggtcttctcgttcatcaaatggacgttaagacagcttttcttaatggagagctggatgaggagatctatatggatcaacctgatgggtttgtagttgaaggctttgcagtcaatgaggcagataaatgtgtgtactatcgccatggtgggggtgagggagttattttgtgcttgtatgttgacgacatactgatatttgggacaaaccttgaggtgataaatgagtcccattatgtggagaagatcttgaatcgctttggctacattgatagtaagccttctccaacaccttatgatcctagcttgttgcttcgcaagaacaagagaattgctaggaatcaactggaatactcccaaatcattggctcgttgatgtacctggctagtgcaactaggcctgatatctcctttgctgtgagcaagttgagccgatttacctctaatccgggagatgatcactggcgtgcgcttgagcgagtaatgcgctatctgaaaggtactgtggaattggggcttcactatactgggtatcctgcggtactggagggttatagtgattctaactggatctctgatgtggatgagatcaaagccactagtggatatgttttcacactgggtggtggtgctgtttcatggagcaaagatgttgtcctgcagagcattcttgaaggaactcacctttgtgagcttgactgttggtcgcagtctatgaagattttgggtgaatcttctaggaagctgacggagcttggggctcctcaccgggagaccgcgcaggcccccctttgccggttcggccgggggccctgggttcgggccgctgagaagcgtaataccctactcctgtgttttggtggatctgtgtatgaagaagctacaaagtgcgagccagcccccgatcgttctgggatcgtttcctcccgtctctaa

SEQ ID NO: 15032 - DNA, 1941 bp, Oryza sativa
  Clone ID: TFbOSC6238j.C1.o1.gm
gaatactccgttgaggggttgattgcgtctcttgatgttgaggagaaagctcgggaaaaagatgccgcgtctaagggcgatggtgggcagtccagtgccaatgttgtgcacaaggcccagaacaagagcaaggggaaatacaaagctcagcagaccaccaacttcaagaagcagaagaagaacaacaacaatcctaatcaggatgagaggacttgctttgtgtgtggccaagttggtcatctggctaggaagtgtccacagcgcaaggggatgaaggcacctgcagggcagacttctaagtctgctgatgtgaccattggcaacattggagatggaagcgggtatggtaatttacctactgtcgcacggggttccaccgtcctaatggggaatgggtcacatgcttctgttcatggtgttggcacggtagatctgaagtttacttcgggaaagatcgtgcagctgaagaacgtgcagcatgtcccttctatcgacaggaatcttgttagtgactcccgtctgattagagacggatttaagttggtttttgagtctaataaagtagtcgtgtctaaacatggatattttattggtaaaggttatgagtgcggaggcctgtttcgcttttccctttctgatttctgcaataagtctgtgaaccatatttgtggcagtgtggatgatgaggctaatgtttggcattcacaagttgaaaatcaacttgacagaaagataaaaaggcttaggtctgatcgtggtggagagtttttctcgaacgagtttgacttattctttgaggaacatggcatcatacatgagaggacgcctccctattctcccgagtctaatgggattgctgaaaggaagaaccgcacactgactgacttggtgaatgccatgttggacaccgcgggactgcctaaggcatgtgaagctcctcgaaggagtaagagacaaaggacggctaagtcttttggtgatgatttcactgtgtacctcgtggatgacactcctaagtcaatttcagaagcatatgcatctcctgatgcagactactggaaggaggctgtccgtagtgaaatggattccattatcgctaacgggacttgggaggtgacggagcgaccctatgggtgtaaacctgtggggtgcaagtgggtgttcaagaagaagcttaggcctgacgcctcacatggtcttctcgttcatcaaatggacgttaagacagcttttcttaatggagagctggatgaggagatctatatggatcaacctgatgggtttgtagttgaaggctttgcagtcaatgaggcagataaatgtgtgtactatcgccatggtgggggtgagggagttattttgtgcttgtatgttgacgacatactgatatttgggacaaaccttgaggtgataaatgagtcccattatgtggagaagatcttgaatcgctttggctacattgatagtaagccttctccaacaccttatgatcctagcttgttgcttcgcaagaacaagagaattgctaggaatcaactggaatactcccaaatcattggctcgttgatgtacctggctagtgcaactaggcctgatatctcctttgctagcattcttgaaagaactcacctttgtgagcttgactgttggtcgcagtctatgaagattttggactactccatcccgctcgccggcgtgcaccagcgatcgggagagcaggtctccggaacctctgcctttgacgtcctgcaccgggagaaggcggcaataagaggtgtcatcggtatcattatcgacatccacctgatcaccacccaatggggaagcgacaagcatatcttcgtgtccttcctcgttcacaaggctgctcgcttcattgccttccattattcagtgcctattgctcttcgtgctttgtccaacatgtgtaacccttcatga

SEQ ID NO: 15033 - DNA, 7872 bp, Oryza sativa
  Clone ID: TFbOSC8778j.C1.o2.fg
atgtcgaacgaaaaggttccatcgaacgcaccaatagcgcctcaagaaggtaacgctcctcaaaattccggtagcaataagcatccaggcgcttctagtgaagaaacgtggcgcacaccaagtgacccgtttccaatggaaataacacaagtcgccccccgcgatgatgatccggactacatacctatcgaacaggccatggtagtccgacgccgctcgaaacgtaaagccgggaggaacaggacagagcaagaagttgagatggacaccgctacgtctgcacctgaacgtacggagacatctacaagtgcaggcgggagtgggaaaaaaagacgtggtgagagaagcaagaataaattacccaaggaaacttacaacgtgattgctctcgatcaggatgggaagcccatcgagccaccgatagtgcggtccaagttcagcaacgcctgtggcactctagtcaggacgcgttgtcccattaatgtcaagttgtgggaaacagtggacgacaacatcaagacacttctctggaatgagttgcagaagtattttgtgttccctcctggatcagaggttagggggagagattacgcacttaaaaagatgggagatcgatggcgacagtggaagtccgatctaaatcgggattatgttcagaagaatctcccaccgtttacggattatggacatatatcgcaggctgactgggacacgtttgttgcggatcgtacaacagctgaagcattggctttgaggaaaaaaatgtccgagctcgcgaagaagaacaaatatccccatagattggggtcgagcggatacgctggtcacgtcgatcaatggcgggagatcgagcaaagatttgccgcggccggtaagcccctgctggtagaccccatggttgaacgtagcaagaactgggtttgggcgcgcagcacaggtcaagtctcggatgagggagacatactattcgagactccagacatagaagaagtgactactaatttgcagcagatagtcgagaaagaaagatcaggacagttcgtcccacggagggagagagatcagcttactgcggcgttggggacggctgaacactctggacgtgtaaggggtttgtcctcaaagacaagttggaaggtcgggtttccacaagacgcaccaagttataagaagagagacaaatacaaagaacaactatcggacaagatctatgcgcaagtgaaggaacacttctactcgttggcagctgaaaacccgacagcatttccaaggttattccctgatagccagcaacccacacaatccgcacagcaaacaactaatgtacccagcagtgtaggctcagtgcagacaagtaccttccctgtggatagtataactggaccaactccgtgcagtctcgtcgtaccaatcggccgcgctggaaagactaaggaggttgcaacgggtttagcgatacccggacgtcaattccacaacacggcaatccctgaggattacgcaagggtacaggtcgccaaggtccatagcgaccacgtttccttggaactagacatacctgcacctgaggggattgaacttctcggtgatgcagtgaatcagtttatcttgtggcaccgcagagacataatcctgagcgcggccgttcttgcagcaggatcttcaaccccatcctcatcgcaggcaatgactgctgccgctcctgcaccaccgtcgcctcctgaaccaccgtcacctcgacatccgccgtcaccaccaccgcttaggtcaccggctcgccaacctacaccaccaccctccccttctcaacaaccgcctctcccgaccccgcaaccagttcaagcctctcccacctccccaactaaacagcatgctcccccggctccgccctcagttcaaacctctccacctacaccccaatctgctctggtagaagaagtgcacataccagatggtactacatccgaaccaaagtctaatactttggaacctcgtcgtataattccaaagttgatatcgacatacgacccaaaggagattgacaaggataaggagaagttcatgttttcagctttcaggaattctgagaagagaaaagaacttgctcacgtcttgtcagactcccagaagtcagtactagcggcccaagatgaagtgcaatcctggttatctgccgatgtgcctgaaacttatgagtatggcaagccattcttgccaacttatcttatgaacaagctaccatgggaaatgagggtaatgcacgaatggtatatgaaggcatctaggaaaggtctcggtttcataagcgtcgccgtcccggaaggcgctttcatgagtggtcctaatgggatattttttatctctttccaagacctttacgccctctacaagctagataaaatggacgttaatctcgttgcggctttctgtcttatgcaattccacgaagctgatagaactggagcaaaggttggatacgtcgatccaacaagaatatgcaaaacacaacacaccatagagctgagacaggactgcgagcaattggttggcaagaccccggaagaaaaggaagaatatgtgaagacattgcacaagaggaagaagctagaagtagcaacatacttggcaatagcaatgttggcgcacgccgacaaagatgtcttaatggtcccctaccagttcacagaccactacatattattccttgtatatccgaaagaccaattgatcatatcattggaccccgcacactatgacaaggagacatttatggaattcctcactattttgaatttagcacacaagtactaccgcaaaagaggtggaccagtacatattccatcccagaagaagttatccgtcaggactggctggccgtgctacaaacaaccaccaggaaccaacttgtgtggttattacgtgtgcgagatgctcagagtaaatgggaggtacaaaacaaccagtaaccgaatccccgaaatcccatatattgcacaacgattcaaccacactactatcttgaacgtggccgctgacctctgccgattcatccgtcgcgatgtctgcaacgcaagaggtgtcacgcctgagtcagcaagctttgccgatactggatatgaccccccgccaaaaaaatggaaagggatttgccaggttggcccatcgtttgaggccataagttgcaaccggaagtttatcggtgcacggtggtacatcgatgacgagattctaagtagcatatccgataacgaggttctttctcctagggatgtcgaaggccacggcacgcacacagcctcaacggctggcggcaacatcatccacaatgttagctttctggggctagctgcagggacagttcggggtggagcgccccgtgcacgattagccatatacaaggcctgttggtccggttatggctgctccggtgccaccgtgttgaaagccatggacgacgctgtctatgatggtgttgatgtcttatcactttctataggtggtacaaaagaagatgtgggaaccctacatgtcgtcgctaatggtatctcggttgtctacgctggtggaaacgatggtcccattgctcagacggtggagaaccaatcaccatggctagtaacggtcgctgcaaccaccattgatcggtccttgcctgtggttatcaccttgggaaacggcgaaaagttggtggcgcaatcctttgtcctcctggaaactgcaagtcagttcagtgagatacagaagtacacagacgaggaatgcaatgccaacaatattatgaacagcacggtgaaggggaaaatagccttctgcttcatgggagagatgttgaataataagcagcagacatcataccctgatgtcaccacggcagtggcagccaaaggaggcagagcaccggacattgctgcaccaggggtttcgattttagccgctgctcagattccatattacaaaggtgtttcctaccatttcgattctggaacatctatggcttgcccccatgtagctgggatcattgcggtgctcaagtccattcatccaaaatggtcacctgcggctctcaaatccgcaatcatgacaacagactactccatcccgctcgctggcgtgcaccagcgatcgggagagcaggtctccggaacctctgcctttgacgtcctgcaccgggagaaggcggcaataaggcactgtgattttactatggctgattttgccgatgcactgaggccggataaattcaccggtgtgcattttaagagatggcagatcagggtcactctgtggctgacagctatgaaatgcttctgggtgagtactggcaaacctgaaggagttcttactgctgaacagcagaagcaattcgaggaagccactactctatttgtgggatgcattcttagcgttcttggcgatcgtctggtcgaggtgtatatgcatatgaccgatgctaaggagttgtgggatgcactgaatactaaattcggtgctactgatgctagcaatgatctgtatatcatggagcagtttcatgactacaagatggctgacaaccgttctgtagtcgaacaggctcatgagatacaaaccatggctaaaagtttcggtactgcactcaaacacaagagacaggaatactccgttgaggggttgatagcgtctcttgatgttgaggagaaagctcgggaaaaagatgccgcgtctaagggcgatggtgggcagtccagcgccaatgttgtgcacaaggcccagaacaagagtaaggggaaatacaaagctcagcagaccaccaacttcaagaagcagaagaagaacaacaacaatcctaatcaggatgagaggacttgctttgtgtgtggccaagttggtcatctggctaggaagtgtccacagcgcaaggggatgaaggcacctgcagggcagacttctaagtctgctaatgtgaccattggcaacactggagatggaagcgggtatggtaatttacctactgttttttcagttaatcaatctactaattggtgggttgatactggggccaatgtcgcacggggttccaccgtcctaatggggaatgggtcacatgcttctgttcatggtgttggcacggtagatctgaagtttacttcgggaaagatcgtgcagctgaagaacgtgcagcatgtcccttctatcgacaggaatcttgttagtggctcccgtctgactagagacggatttaagttggtttttgagtctaataaagtagtcgtgtctaaacatggatattttattggtaaaggttatgagtgcggaggcctgttccgcttttccctttctgatttctgcaataagtctgtgaaccatatttgtggcagtgtggatgatgaggctaatgtttggcattcacgtttatgtcatattaattttggcttgatgtctcggctttccagcatgtgtttaattcctaagttttccattgtcaaaggttctaagtgccatagttgtgtgcaatcgaagcaacctcgcaagcctcacaaggctgccgaggagagaaacttggcaccactagaactcctacattcagatctttgtgaaatgaatggggtgttgacgaagggtggaaaacgatatttcatgacattcattgatgatgctactagattttgctatgtgtacttgttgaaaaagaaagacgaggctctagactattttaaaatttataaggcagaagttgaaaatcaacttgacagaaagataaaaaggcttaggtctgatcgtggtggagagtttttctcgaacgagtttgacttattctgtgaggaacatggcatcatacatgagaggacgcctccctattctcccgagtctaatgggattgctgaaaggaagaactgcacactgactgacttggtgaatgccatgttggacaccgcgggactgcctaaggcatggtggggggaggtattgttgacctcaaatcatgtgttaaacagagttcctaacagaaataaggacaaaacaccatatgagatatggattggtagaaaaccatcactttcttatttgcgcacatgggggtgcttggcgaaagtcaatgtaccaataacgaagaagcgcaaacttggacctaagactgtggactgtgtctttctgggatatgctcatcatagcattgcctatagatttttaatagttaaatccgaggtactggacatgcatgttggtataattatggagtctcgtgatgctaccttctttgagagctttttcccaatgaaggatacacatagtggttcgaaccaaccctctgaaataattcccagttcaatcataccaccagaacaaactgaacatacacatgaacttgtctctgaggaggatgtcagtgaagctcctcgaaggagtaagagacaaaggacggctaagtcttttggtgatgattttactgtgtacctcgtggatgacactcctaagtcaatttcagaagcatatgcatctcctgatgcagactactggaaggaggctgtccgtagtgaaatggattccattatcgctaacgggacttgggaggtgacagagcaaccctatgggtgtaaacctgtggggtgcaagtgggtgttcaagaagaagcttaggcctgacggtactattgaaaagtacaaggctcggcttgttgctaagggctatactcagaaagaaggcgaagatttctttgacacttactcacctgttgctagattgaccacaattcgtgtgctactttccctagcagcctcacatggtcttctcgttcatcaaatggacgttaagacagcttttcttaatggagagctggatgaggagatctatatggatcaacctgatgggtttgtagttgaaggctttggagtcaattatgcgtatccatgtgtgtattatcgccatggtgggggtcagggagttattttgtgcttgtatgttgacgacatactgatatttgggacaaaccttgaggtgataaatgaggttaaatcattcttgtctcaaaattttgatatgaaagatttgggagtagctgatgttatcttaaacattaagctaattagaggtgagaatgggattacactcttgcagtcccattatgtggaaaagatcttgaatcgctttggctacattgatagtaagccttttccaacaccttatgatcctagcttgttgcttcgcaagaacaagagaattgctaggaatcaactggaatactcccaaatcattggctcgttgatgtacctggctagtgcaactaggcctgatatctcctttgctgtgagcaagttgagccgatttacctctaatccgggagatgatcactggcgtgcgcttgagcgagtaatgcgctatctgaaaggtactgtggaattggggcttcactatactgggtatcctgcggtactggagggttatagtgattctaactggatctctgatgtggatgagatcaaagccactagtggatatgttttcacactgggtggtggtgctgtttcatggaggtcttgcaaacagacaattttgacgaggtcaaccatggaagcagagctaacggcactggatactgctactgttgaggcagaatggctgcgtgatctattaatggatctgcctgttgttgaaaaaccggtgccggctatccttatgaactgtgacaatcaaacgacatgtgaaaagacgattgaagtctgtcaggaaattaagaaactccggagttataacgttggattacatccaaacagcgagaaacctggcagatcccttcacgaagggactatcacgaaatgtgatagacaatgcatcgaaggagatgggtttgagacccatgtgagttatactatggtggtaacccagtctatgtga

SEQ ID NO: 15034 - DNA, 4542 bp, Oryza sativa
  Clone ID: TFbOSC900007j.C1.o16.fg
atggctggttttgccgatgcactgaggccggataaattcaccggtgtgcattttaagagatggcagatcagagtcactctgtggctgacagctatgaaatgcttctgggtgagtactggcaaacctgaaggagttcttactgctgaacagcagaagcaattcgaggaagccactactctctttgtgggatgcattcttagcgttcttggcgatcgtctggtcgaggtgtatatgcatatgaccgacgctaaggagttgtgggatgcactgaatactaaattcggtgctactgatgctagcaatgatctgtatatcatggagcagtttcatgactacaagatggctgacaaccgttctgtagtcgaacaggctcatgagatacaaaccatggctaaggaactcgaactccttaagtgtgtcttacccgacaaatttgtggctgggtgcattattgcgaaacaacctccatcttggagaagtttcggtactgcactcaaacacaagagacaagaatactccgttgaggggttgatagcgtctcttgatgttgaggagaaagctcgggaaaaagatgccgcgtctaagggcgatggtgggcagtccagcgccaatgttgtgcacaaggcccagaacaagagcaaggggaaatacaaagctcagcagaccaccaacttcaagaagcagaagaagaacaacaacaatcctaatcaggatgagaggacttgctttgtgtgtggccaagttggtcatctggctaggaagtgtccacagcgcaaggggatgaaggcacctgcagggcagacttctaaatggaagcgggtcgcacggggttccaccgtcctaatggggaatgggtcacatgcttctgttcatggtgttggcacggtagatctgaagtttacttcgggaaagatcgtgcagctgaagaacgtgcagcatgtcccttctatcgacaggaatcttgttagtggctcccgtctgactagagacggatttaagttggtttttgagtctaataaagtagtcgtgtctaaacatggatattttattggtaaaggttatgaatgcggaggcctgttccgcttttccctttctgatttctgcaataagtctgtgaaccatatttgtggcagtgtggatgatgaggctaatgtttggcattcacgtttatgtcatattaattttggcttgatgtctcggctttccagcatgtgtttaattcctaagttttccattgtcaaaggttctaagtgccatagttgtgtgcaatcgaagcaacctcgcaagcctcacaaggctgccgaggagagaaacttggcaccactagaactcctacattcagatctttgtgaaatgaatggggtgttgacgaagggtggaaaacgatatttcatgacattcattgatgatgctactagattttgctatgtgtacttgttgaaaacgaaagacgaggctctagactattttaaaatttataaggcagaagttgaaaatcaacttgacagaaagataaaaaggcttaggtctgatcgtggtggagagtttttctcgaacgagtttgacttattctgtgaggaacatggcatcatacatgagaggacgcctccctattctcccgagtctaatgggattgctgaaaggaagaaccgcacactgactgacttggtgaatgccatgttggacaccgcgggactgcctaaggcatggtggggggaggcattgttgacctcaaatcatgtgttaaacagagttcctaacagaaataaggacaaaacaccatatgagatatggattggtagaaaaccatcactttcttatttgcgcacatgggggtgcttggcgaaagtcaatgtaccaataacgaagaagcgcaaacttggacctaagactgtggactgtgtctttttgggatatgctcatcatagcattgcctatagatttttaatagttaaatccgaggtactggacatgcatgttggtacaattatggagtctcgtgatgctaccttctttgagagctttttcccaatgaaggatacacatagtggttcgaaccaaccctctgaaataattcccagttcaatcacaccaccagaacaaactgaacatacacatgaacttgtctctgaggaggatgtcagtgaagctcctcgaaggagtaagagacaaaggacggctaagtcttttggtgatgattttactgtgtacctcgtggatgacactcctaagtcaatttcagaagcatatgcatctcctgatgcagactactggaaggaggctgtgacagagcaaccctatgggtgtaaacctgtggggtgcaagtgggtgttcaagaagaagcttaggcctgacggtactattgaaaagtacaaggctcggcttgttgctaagggctatactcagaaagaaggcgaagatttctttgacacttactcacctgttgctagattgaccacaattcgtgtgctactttccctagcagcctcacatggtcttctcgttcatcaaatggacgttaagacagcttttcttaatggagagctggatgaggagatctatatggatcaacctgatgggtttgtagttgaaggtcaagaaggcaaagtgtgcaaattgttgaagtctttgtatggtctgaaacaagctcctaagcaatggcatgagaaatttgacaaaacattgacatctgcaggctttggagtcaatgaggcaaataaatgtgtgtactatcgccatggtgggggtgagggagttattttgtgcttgtatgttgacgacatactgatatttgggacaaaccttgaggtgataaatgaggttaaatcattcttgtctcaaaattttgatatgaaagatttgggagtagctgatgttatcttaaacattaaactaattagaggtgagaatgggattacactcttgcagtcccattatgtggagaagatcttgaatcgctttggctacattgatagtaagccttctccaacaccttatgatcctagcttgttgcttcgcaagaacaagagaattgctaggaatcaactggaatactcccaaatcattggctcgttgatgtacctggctagtgcaactaggcctgatatctcctttgctgtgagcaagttgagccgatttacctctaatccgggagatgatcactggcgtgcgcttgagcgagtaatgcgctatctgaaaggtactgtggaattggggcttcactatactgggtatcctgcggtactggagggttatagtgattctaactggatctctgatgtggatgagatcaaagccactagtggatatgttttcacactgggtggtggtgctgtttcatggaggtcttgcaaacagacaattttgacgaggtcaaccatggaagcagagctaacggcactggatactgctactgttgaggcagaatggctgcgtgatctattaatggatctgcctgttgttgaaaaaccggtgccggctatccttatgaactgtgacaatcaaacgacatgtgaaaagacgattgaagtctgtcaggaaattaagaaactccggagttataacgttggattacatccaaacagcgagaaacctggcagatcccttcacgaagggactatcacgaaatgtgatagacaatgcatcgaaagagatgggtttgagacccatatgcagcctccttttgcagttttgttttgctgcaaattcggattcgtttttgttttggaaacgttccgaaaaatccggatatgcgaaaatcaatctagggtttgcctcctactctgtactgcgccgtcgctcgtagactactccatcccgctcgccggcgtgcaccagcgatcgggagagcaggtctccggaacctctgcctttgacgtcctgcaccgggagaaggcggcaataaggtgttcgcggagaacccagagcactgagaacgtcgaggaagcggacgacgccaaccagctcgccgtcgtcggcgtccaccacccacacctgcgtcacgcggataaggcgacggaggcaacaccgtcgaccaccgcgagcgcgcgcccgaacgggtgcgccgccgccggcagcgaggatgacgccgacgatggctcgccttcaccgtcagactccgtgccggtagaagaatcggatgttgccgacttgtggtcgacggtgaccggcttcgcgcttccagagtcgggcggcttggtgtggtcgacagtgacttgctccaacgacgcccttgcgccgctgtcgtgcagaggctcgggcttcgcgctttcggcgtcgggcgacgacagtgaatggccagagaacgacgggccgccgccaccgctactgtcaaccataggcttcatgccaccggcgacgggcggcgaaggggaagagccagagaacgaggcctcctcctacggtgaatgcccagagaacacctacggcggccgcctcctcctctccgcggtgcttccccactacagccgccgccgacaacgccggctgccgtcggcgccccagcggcctcctccccaaccgccggacggcttgcacagataa

SEQ ID NO: 15035 - DNA, 3087 bp, Oryza sativa
  Clone ID: TFbOSC900144j.C1.o23.gm
atgggcacaaaaaccaaccctgaccggtggaatggttcactgtcacagggtctgggggagggagggttattttttgaagatgagagcggttatgacgacaaagtgggggtcggctcggccggtcagacagggcgccaggccagtcaggcctctggcactcctgcggtcagaccgacgcatgacgtgggtcagaccggcctgggtcgtcggctgagggttctgttgatgctgctcgagatggtcctccagaaattactacttcggccaatactgatacagaacgtggatcaacttcagaagttactgctcctttgcacattcaccgccgacatccgccggaacacaattattggtaatataggtgagcggactgcaagacttgtctggttgttgcctgtcacaagaccaaattgtggcaagggcgagacatcagtcaaagggaacactggtggcaagacctacatccgcgtcttgggcaaccatgttgaacacggcggtggcgtgctggagctcatcagcaagcctcatattttgaaagctcaagtatcggtgctgtactactactccatcccgctcgccggcgtgcaccagcgatcgggagagcaggtctccggaacctctgcctttgacgtcctgcaccgggagaaggcagcaataagggtcactctgtggctgacagctatgaaatgcttctgggtgagtactggcaaacctgaaggagttcttaccgctgaacagcagaagcaattcgaggaagccactactctctttgtgggatgcattcttagcgttcttggcgatcgtctggtcgaggtgtatatgcatatgaccgacgctaaggagttgtgggatgcactgaatactaaattcggtgctactgatgctagcaatgatctgtatatcatggagcagtttcatgactacaaaatggctgacaaccgttctgtagtcgaacaggctcatgagatacaaaccatggctaaggaactcgaactccttaagtgtgtcttacccgacaaatttgtggccgggtgcattattgcaaaactacctccatcttggaggagtttcggtactgcactcaaacacaagagacaggaatactccgttgaggggttgattgcgtctcttgatgttgaggagaaagctcgggaaaaagatgccgcgtctaagggcgatggtgggcagtccagtgccaatgttgtgcacaaggcccagaacaagagcaaggggaaatacaaagctcagcagaccaccaacttcaagaagcagaagaagaacaacaacaatcctaatcaggatgagaggacttgctttgtgtgtggccaagttggtcatctggctaggaagtgtccacaacgcaaggggatgaaagcacctgcagggcagacttctaagtctgctaatgtgaccattggcaacactggagatggaagctggtatggtaatttacctactgtcgcacggggttccaccgtcctaatggggaatgggtcacatgcttctgttcatggtgttggcacggtagatctgaagtttacttcgggaaagatcgtgcagctgaagaacgtgcagcatgtcccttctatcgacaggaatcttgttagtggctcccgtctgactagagacggatttaagttggtttttgagtctaataaagtagtcgtgtctaaacatggatattttattggtaaaggttatgagtacggaggcctgttccgcttttccctttctgatttctgcaataacatgtgtttaattcctaagttttccattgtcaaaggttctaagtgccatagttgtgtgcaatcgaagcaacctcgcaagcctcacaaggctgccgaggagagaaacttggcaccactagaactcctacattcagatctttgtgaaatgaatggggtgttgacgaaggaagttgaaaatcaacttgacagaaagataaaaaggcttaggtctgatcgtggtggagagtttttctcgaacgagtttgacttattctgtgaggaacatggcatcatacatgagaggacgcctccctattctcccgagtctaatgggattgctgaaaggaagaaccgcacactgactgacttggtgaatgccatgttggacaccgcgggactgcctaaggcatgtgaagctcctcgaaggagtaagagacaaaggacagctaagtcttttggtgatgatttcattgtgtacctcgtggatgacactcctaagtcaatttcagaagcatatgcatctcctgatgcagactactggaaggaggctgtccgtagtgaaatggattccattatcgctaacgggacttgggaggtgacagagcgaccctatgggtgtaaacctgtggggtgcaagtgggtgttcaagaagaagcttaggcctgacgcctcacatggtcttctcgttcatcaaatggacgttaagacagcttttcttaatggagagctggatgaggagatctatatggatcaacctgatgggtttgtagttgaaggctttgcagtcaatgaggcagataaatgtgtgtactatcgccatggtgggggtgagggagttattttgtgcttgtatgttgacgacatactgatatttgggacaaatcttgaggtgataaatgagtcccattatgtggagaagatcttgaatcgctttggctacattgatagtaagccttctccaacaccttatgatcctagcttgttgcttcgcaagaacaagagaattgctaggaatcaactggaatactcccaaatcattggctcgttgatgtacctggctagtgcaactaggcctgatatctcctttgctgtgagcaagttgagccgatttacttctaatccgggagatgatcactggcgtgcgcttgagcgagtaatgcgctatctgaaagactactccatcccgctcgccggcgtgcaccagcgatcgggagagcaggtctccggaacctctgcctttgacgtcctgcaccgggagaaggcagcaataaggtttttgggaagcgcttcgcgcgactgctccctgttcgttcgcgacggctcgccttcctcttcgctcgcgtgtttcgtgccttcgtag

SEQ ID NO: 15036 - DNA, 3744 bp, Oryza sativa
  Clone ID: TFbOSC900152j.C1.o4.fg
atggctggttttgccgatgcactgagaccggataaattcaccggtgtgcattttaagagatggcagatcagggtcactctgtggttgacagctatgaaatgcttctgggtgagtactggcaaacctgaaggagttcttactgctgaacagcagaagcaattcgaggaagccactactctctttgtgggatgcattcttagcgttcttggcgatcgtctggtcgaggtgtatatgcatatgaccgacgctaaggagttgtgggatgcactgaatactaaattcggtgctactgatgctagcaatgatctgtatatcatggagcagtttcatgactacaaaatggctgacaaccgttctgtagtcgaacaggctcatgagatacaaaccatggctaaggaactcgaactccttaagtgtgtcttacccgacaaatttgtggccgggtgcattattgcaaaactacctccatcttggaggagtttcggtactgcactcaaacacaagagacaggaatactccgttgaggggttgattgcgtctcttgatgttgaggagaaagctcgggaaaaagatgccgcgtctaagggcgatggtgggcagtccagtgccaatgttgtgcacaaggcccagaacaagagcaaggggaaatacaaagctcagcagaccaccaacttcaagaagcagaagaagaacaacaacaatcctaatcaggatgagaggacttgctttgtgtgtggccaagttggtcatctggctaggaagtgtccacagcgcaaggggatgaaggcacctgcagggcagacttctaagtctgctaatgtgaccattggcaacactggagatggaagcgggtatggtaatttacctactgttttttcagttaatcaatctactaattggtgggttgatactggggccaatgtacatgtttgtgctgacatctcattgttttcttcttatcaggtcgcacggggttccaccgtcctaatggggaatgggtcacatgcttctgttcatggtgttggcacggtagatctgaagtttacttcgggaaagatcgtgcagctgaagaacgtgcagcatgtcccttctatcgacaggaatcttgttagtggctcccgtctgactagagacggatttaagttggtttttgagtctaataaagtagtcgtgtctaaacatggatattttattggtaaaggttatgagtgcggaggcctgttccgcttttccctttctgatttctgcaataagtctgtgaaccatatttgtggcagtgtggatgatgaggctaatgtttggcattcacgtttatgtcatattaattttggcttgatgtctcggctttccagcatgtgtttaattcctaagttttccattgtcaaaggttctaagtgccatagttgtgtgcaatcgaagcaacctcgcaagcctcacaaggctgccgaggagagaaacttggcaccactagaactcctacattcagatctttgtgaaatgaatggggtgttgacgaagggtggaaaacgatatttcatgacattgattgatgatgctactagattttgctatgtgtacttgttgaaaacgaaagacgaggctctagactattttaaaatttataaggcagaagttgaaaatcaacttgacagaaagataaaaaggcttaggtctaatcgtggtggagagtttttctcgaacgagtttgacttattctgtgaggaacatggcatcatacatgagaggacgcctccctattctcccgagtctaatgggattgctgaaaggaagaaccgcacactgactgacttggtgaatgccatgttggacaccgcgggactgcctaaggcatgcattgcctatagatttttaatagttaaatccgaggtaccggacatgcatgttggtacaattatggagtctcgtgatgctaccttctttgagagctttttcccaatgaaggatacacatagtggttcgaaccaaccctctgaaataattcccagttcaatcacaccaccagaacaaactgaacatacacatgaacttgtctctgaggaggatgtcagtgaagctcctcgaaggagtaagagacaaaggacggctaagtcttttggtgatgatttcactgtgtacctcgtggatgacactcctaagtcaatttcagaagcatatgcatctcctgatgcagactactggaaggaggctgtccgtagtgaaatggattccattatcgctaacgggacttgggaggtgacagagcgaccctatgggtgtaaacctgtggggtgcaagtgggtgttcaagaagaagcttaggcctgacggtactattgaaaagtacaaggctcggcttgttgctaagggctatactcagaaagaaggcgaagatttctttgacacttactcacctgttgctagattgaccacaattcgtgtgctactttccctagcagcctcacatggtcttctcgttcatcaaatggacgttaagacagcttttcttaatggagagctggatgaggagatctatatggatcaacctgatgggtttgtagttgaaggtcaagaaggcaaagtgtgcaaattgttgaagtctttgtatggtctgaaacaagttcctaagcaatggcatgagaaatttgacaaaacattgacatctgcaggctttgcagtcaatgaggcagataaatgtgtgtactatcgccatggtgggggtgagggagttattttgtgcttgtatgttgacgacatactgatatttgggacaaaccttgaggtgataaatgaggttaaatcattcttgtctcaaaattttgatatgaaagatttgggagtagctgatgttatcttaaacattaagctaattagaggtgagaatgggattacactcttgcagtcccattatgtggagaagatcttgaatcgctttggctacattgatagtaagccttctccaacaccttatgatcctagcttgttgcttcgcaagaacaagagaattgctaggaatcaactggaatactcccaaatcattggctcgttgatgtacctggctagtgcaactaggcctgatatctcctttgctgtgagcaagttgagccgatttacctctaatccgggagatgatcactggcgtgcgcttgagcgagtaatgcgctatctgaaaggtactgtggaattggggcttcactatactgggtatcctgcggtactggagggttatagtgattctaactggatctctgatgtggatgagatcaaagccactagtggatatgttttcacactgggtggtggtgctgtttcatggaggtcttgcaaacagacaattttgacgaggtcaaccatggaagcagagctaacggcactggatactgctactgttgaggcagaatggctgcgtgatctattaatggatctgcctgttgttgaaaaaccggtgccggctatccttatgaactgtgacaatcaaacgacatgtgaaaagacgattgaagtctgtcaggaaattaagaaactccggagttataacgttggattacatccaaacagcgagaaacctggcagatcccttcacgaagggactatcacgaaatgtgatagacaatgcatcgaaggagatgggtttgagacccatagcattcttgaaagaactcacctttgtgagcttgactgttggtcgcagtctatgaagattttgggtgaatcttctaggaagcttactaaagacctaggagtatga

SEQ ID NO: 15037 - DNA, 1671 bp, Oryza sativa
  Clone ID: TFbOSC900192j.C1.o20.gm
atgctgctcttgtcggcggtgatccgtggtggccgatgcatcatcgccggtgattgtgacgccgatagggccgggagcgaaatcgacgtccacgaccctgacgccgagatctgggtgacgcgcgacgtgcaacggagttcggaagccgacgtgcagagaaggggttgcgcggtgctgcggatctcggacaggaggcagagccgcggaggaccgacagctggtggaggcgtacgacgcgccggcggatggggtggcgcgatctggatgggaaggacggagcggtggtgctcacggacggggacggggacagcgacggaggatcgcgacgaggaggcggaggcggaggcggagggggagagaaggcggcggcggccgccgatcccgtcgccgagctcctaccgctgtgggttctcccacaaaggataccctttttactgcccatgggctgaaccccattctgagcacagtgtccagcccatcgagaaggaggccagctcgcgcatcaagctcacgagcaggtcgcaccttcgccgcacctgggctctgccagcgagcacggtgcggtggcctccgctgccgtcgtggagacaagctccggggttgccaaggttcataaagtttgatttcaatattgcacaaacttatcctgaggccgactactccatctcgctcgccggcgtgcaccggcgatcgggagagcaggtctccggaacctctgccttcgacgttctgcaccgggagaaggcggcaataagggtcactctgtggctaacagctatgaaatgcttctgggtgagtactggcaaacctgaaggagttcttactgctgaacagcagaagcaattcgaggaagccactactctctttgtgggatgcattcttagcgttcttggcgatcgtctggtcgaggtgtatatgcatatgaccgacgctaaggagttgtgggatgcactgaatactaaattcggtgctactgatgctagcaatgatctgtatatcatggagcagtttcatgactacaagatggctgacaaccgttctgtagtcgaacaggctcatgagatacaaaccatggctaaggaactcgaactccttaagtgtgtcttactcgataaatttgtggccgggtgcattattgcaaaactacctccatcttggagaagtttcggtactgcactcaaacacaagagacaggaatactccgttgaggggttgatagcgtctcttgatgttgaggagaaagctcgggaaaaagatgccgcgtctaagggcgatggtgggcagtccagttccaatgttgtgcacaaggcccagaacaagagcaaggggaaatacaaagctcagcagaccaccaactttaagaagcagaagaagaacaacaacaatcctaatcaggatgagaggacttgctttgtgtgtggccaagttggtcatctggctaggaagtgtccacagcgcaaggggatgaaggcacctgcagggcagacttctaagtctgctaatgtgaccattggcaacactggagatggaagcgggtatggtaatttacctactgtcgcacggggttccaccgtcctaatggggaatgggtcacatgcttctgttcatggtgttggcacggtagatctgaagtttacttcgggaaagatcgtgcagctgaagaacgtgtag

SEQ ID NO: 15038 - DNA, 3963 bp, Oryza sativa
  Clone ID: TFbOSC900225j.C1.o25.fg
atggctggttttgccgatgcactgaggccggataaattcaccggtgtgcattttaagagatggcagatcagggtcactctgtggctgacagctatgaaatgcttctgggtgagtactggcaaacctgaaggagttcttactgctgaacagcagaagcaattcgaggaagccactactctctttgtgggatgcattcttagcgttcttggcgatcgtctggtcgaggtgtatatgcatatgaccgacgctaaggagttgtgggatgcactgaatactaaattcggtgctactgatgctagcaatgatctgtatatcatggagcagtttcatgactacaagatggctgacaaccgttctgtagtcgaacaggctcatgagatacaaaccatggctaaggaactcgaactccttaagtgtgtcttacccgacaaatttgtggccgggtgcattattgcaaaactacctccatcttggagaagtttcggtactgcactcaaacacaagagacaggaatactccgttgaggggttgatagcgtctcttgatgttgaggagaaagctcgggaaaaagatgccgcgtctaagggcgatggtgggcagtccagtgccaatgttgtgcacaaggcccagaacaagagcaaggagaaatacaaagctcagcagaccaccaacttcaagaagcagaagaagaacaacaacaatcctaatcaggatgagaggacttgctttgtgtgtggccaagttggtcatctggctaggaagtgtccacagcacaaggggatgaaggcacctgcagggcagacttctaagtctgctaatgtgaccattggcaacactggagatggaagcgggtatggtaatttacctactgttttttcagttaatcaatctactaattggtgggttgatactggggccaatgtacatgtttgtgctgacatctcattgttttcttcttatcaggtcgcacggggttccaccgtcctaatggggaatgggtcacatgcttctgttcatggtgttggcacggtagatctgaagtttacttcgggaaagatcgtgcagctgaagaacgtgcagcatgtcccttctatcgacaggaatcttgttagtggctcccgtctgactagagacggatttaagttggtttttgagtctaataaagtagtcgtgtctaaacatggatattttattggtaaaggttatgagtgcggaggcctgttccgcttttccctttctgatttctgcaataagtctgtgaaccatatttgtggcagtgtggatgatgaggctaatgtttggcattcacgtttatgtcatattaattttggcttgatgtctcggctttccagcatgtgtttaatttctaagttttccattgtcaaaggttctaagtgccatagttgtgtgcaatcgaagcaacctcgcaagcctcacaaggctgccgaggagagaaacttggcaccactagaactcctacattcagatctttgtgaaatgaatggggtgttgacgaagggtggaaaacgatatttcatgacattgattgatgatgttactagattttgctatgtgtacttgttgaaaacgaaagacgaggctctagactattttaaaatttataaggcagaagttgaaaatcaacttgacagaaagataaaaaggcttaggtctgatcgtggtggagagtttttctcgaacgagtttgacttattctgtgaggaacatggcatcatacatgagaggacgcctccctattctcccgagtctaatgggattgctgaaaggaagaatcgcacactgactgacttggtgaatgccatgttggacaccgcgggactgcctaaggcatggtggggggaggcattgttgaccttaaatcatgtgttaaacagagttcctaacagaaataagaacaaaacaccatatgagatatggattggtagaaaaccatcactttcttatttgcgcacatgggggtgcttggcgaaagtcaatgtaccaataacgaagaagcgcaaacttggacctaagactgtggactgtgtttttctgggatatgctcatcatagcattgcctatagatttttaatagttaaatccgaggtaccggacatgcatgttggtacaattatggagtctcgtgatggtaccttctttgagagcttttgcccaatgaaggatacacatagtggttcgaaccaaccctctgaaataattcccagttcaatcacaccaccagaacaaactgaacatacacatgaacttgtctctgaggaggatgtcagtgaagctcctcgaaggagtaagagacaaaggacggctaagtcttttggtgatgatttcactgtgtacctcgtggatgacactcctaagtcaatttcagaagcatatgcatctcctgatgcagactactggaaggaggctgtccgtagcgaaatggattccattatcgctaacgggacttgggaggtgacagagcggccctatgggtgtaaacctgtggggtgcaagtgggtgttcaagaagaagcttaggcctgacggtactattgaaaagtacaaggctcggcttgttgctaagggctatactcagaaagaaggcgaagatttctttgacacttactcacctgttgctagattgaccacaattcgtgtgctactttccctagtagcctcacatggtcttctcgttcatcaaatgaacgttaagacagcttttcttaatggagagctggatgaggagatctatatggatcaacctgatgggtttgtagttgaaggtcaagaaggcaaagtgtgcaaattgttgaagtctttgtatggtctgaaacaagctcctaagcaatggcatgagaaatttgacaaaacattgacatctgcaggctttgcagtcaatgaagcagataaatgtgtgtactatcgccatggtgggggtgagggagttattttgtgcttgtatgttgacgacatactgatatttgggacaaaccttgaggtgataaatgaggttaaatcattcttgtctcaaaattttgatatgaaggatttgggagtagctgatgttatcttaaacattaagttaattagaggtgagaatgggattacactcttgcagtcccattatgtggagaagatcttgaatcgctttggctacattgatagtaagccttctccaacaccttatgatcctagcttgttgcttcacaagaacaagagaattgctaggagtcaactggaatactcccaaatcattggctcgttgatgtacctggctagtgcaactaggcctgatatctcctttgctgtgagcaagttgagccgatttacctctaatccgggagatgatcactggcgtgcgcttgagcgagtaatgcgctatctgaaaggtactgtggaattggggcttcactatactgggtatcctgcggtactggagggttatagtgattctaactggatctctgatgtggatgagatcaaagccactagtggatatgttttcacactgggtggtggtgctgtttcatggaggtcttgcaaacagaccattttgacgaggtcaaccatggaagcagagctaacggcactggatactgctactgttgaggcagaatggctgcgtgatctattaatggatctgcctgttgttgaaaaaccggtgccggctatccttatgaactgtgacaatcaaacgacatgtgaaaagacgattgaagtctgtcaggaaattaagaaactccggagttataatgttggattacattcaaacagcgagaaatctggcagatcccttcacgaagggactatcacgaaatgtgatagacaatgcatcgaaggagatgggtttgagacccatagcattcttgaaagaactcacctttgtgagcttgactgttggtcgcagtctatgaagattttgggtgaatcttctaggaagcttactaaagacctaggagtatga

SEQ ID NO: 15039 - DNA, 3981 bp, Oryza sativa
  Clone ID: TFbOSC900345j.C1.o2.fg
atggctggttttgccgatgcactgaggccggataaattcaccggtgtgcattttaagagatggcagatcagggtcactctgtggctgacagctatgaaatgcttctgggtgagtactggcaaacctgaaggagttcttactgctgaacagcagaagcaattcgaggaagccactactctctttgtgggatgcattcttagcgttcttggcgatcgtctggtcgaggtgtatatgcatatgaccgacgctaaggagttgtgggatgcactgaatagtaaattcggtgctactgatgctagcaatgatctgtatatcatggagcagtttcatgactacaaaatggctgacaaccgttctgtagtcgaacaggctcatgagatacaagccatggctaaggaactcgaactccttaagtgtgtcttacccgacaaatttgtggccgggtgcattattgcaaaactacctccatcttggaggagtttcggtactgcactcaaacacaagagacaggaatactccgttgaggggttgattgcgtctcttgatgttgaggagaaagctcgggaaaaagatgccgcgtctaagggcgatggtgggcagtccagtgccaatgttgtgcacaaggcccagaacaagagcaaggggaaatacaaagctcagcagaccaccaacttcaagaagcagaagaagaacaacaacaatcctaatcaggatgagaggacttgctttgtgtgtggccaagttggtcatctggctaggaagtgtccacagcgcaaggggatgaaggcacctgcagggcagacttctaagtctgctaatgtgaccattggcaacactggagatggaagcgggtatggtaatttacctactgttttttcagttaatcaatctactaattggtgggttgatactggggccaatgtacatgtttgtgctgacatctcattgttttcttcttatcaggtcgcacggggttccaccgtcctaatggggaatgggtcacatgcttctgttcatggtgttggcacggtagatctgaagtttacttcggaaaagatcgtgcagctgaagaatgtgcagcatgtcccttctatcgacaggaatcttgttagtggctcccgtctgactagagacggatttaagttggtttttgagtctaataaagtagtcgtgtctaaacatggatattttattggtaaaggttatgagtgcgtaggtctgttccgcttttccctttctgatttctgcaataagtctgtgaaccatatttgtggcagtgtggatgatgaggctaatgtttggcattcacgtttatgtcatattaattttggcttgatgtctcggctttccagcatgtgtttaattcctaagttttccattgtcaaaggttctaagtgccatagttgtgtgcaatcaaagcaacctcgcaagcctcacaaggctgccgaggagagaaacttggcaccactagaactcctacattcagatctttgtgaaatgaatggggtgttgacgaagggtggaaaacgatatttcatgacattcattgatgatgctactagattttgctatgtgtacttgttgaaaacgaaagacgaggctctagactattttaaaatttataaggcagaagttgaaaatcaacttgacagaaagataaaaaggcttaggtctgatcgtggtggagagtttttctcgaacgagtttgacttattctgtgaggaacatggcatcatacatgagatgacgcctccctattctcccgagtctaatgggattgctgaaaggaagaatcgcacactgactgacttggtgaatgccatgttggacaccgcgggactgcctaaggcatggtggggggaggcattgttgacctcaaatcatgtgttaaacagagttcctaacagaaataaggacaaaacaccatatgagatatggattggtagaaaaccatcactttcttatttgcgcacatgggggtgcttggcgaaagtcaatgtaccaataacgaagaagcgcaaacttggacctaagactgtggactgtgtttttctgggatatgctcatcatagcattgcctatagatttttaatagttaaatccgaggtaccggacatgcatgttggtacaattatagagtctcgtgatgctatcttctttgagagctttttcccaatgaaggatacacatagtggttcgaaccaaccatctgaaataattcctagttcaatcacaccaccagaacaaactgaacatacacatgaacttgtctctgaggaggatgtcagtgaagctcctcgaaggagtaagagacaaaggacggctaagtcttttggtgatgatttcactgtgtacctcgtggatgacactcctaagtcaatttcagaagcatatgcatctcctgatgcagattactggaaggaggctgtccgtagtgaaatggattccattatcgctaacgggacttgggaggtgacagagcgaccctatgggtgtaaacctgtggggtgcaagtgggtgttcaagaagaagcttaggcctgacggtactattgaaaagtacaaggctcgacttgttgctaagggctatactcagaaagaaggcgaagatttctttgacacttactcacctgttgctagattgaccacaattcgtgtgctactttccctagcagcctcacatggtcttctcgttcatcaaatggacgttaagacagcttttcttaatggagagctggatgaggagatctatatggatcaacctgatgggtttgtagttgaaggtcaagaaggcaaagtgtgcaaattgttgaagtctttgtatggtctaaaacaagctcctaagcaatggcatgagaaatttgacaaaacattgacatctgcaggctttgcagtcaatgaggcagataaatgtgtgtactatcgccatggtgggggtgagggagttattttgtgcttgtatgttgacgacatactgatatttgggacaaaccttgaggtgataaatgaggttaaatcattcttgtctcaaaattttgatatgaaggatttgggagtagctgatgttatcttaaacattaagctaattagaggtgagaatgggattacactcttgcagtcccattatgtggagaagatcttgaatcgctttggctacattgatagtaagccttctccaacaccttatgatcctagcttgttgcttcgcaagaacaagagaattgctaggaatcaactggaatactcccaaatcattggctcgttgatgtacctggctagtgcaactaggcctgatatctcctttgctgtgagcaagttgagccgatttacctctaatccgggagatgatcactggcgtgcgcttgagcgagtaatgcgctatctgaaaggtactgtggaattggggcttcactatactgggtatcctgcggtactggagggttatagtgattctaactggatctctgatgtggatgagatcaaagccactagtggatatgttttcacactgggtggtggtgctgtttcatggaggtcttgcaaacagaccattttgacgaggtcaaccatggaagcagagctaacggcactggatactgctactgttgaggcagaatggctgcgtgatctattaatggatctgcctgttgttgaaaaaccggtgccggctatccttatgaactgtgacaatcaaacgacatgtgaaaagacgattgaagtctgtcagaaaattaagaaactctggagttataacgttggattacatccaaacagcgagaaacctggcagatcccttcacgaagggactatcacgaaatgtgatagacaatgcattgaaggagatgggtttgagacccatatgagttatactatggtgagcattcttgaaagaactcacctttgtgagcttgactgttggtcgcagtctatgaagattttgggtgaatcttctaggaagcttactaaagacctaggagtatga

SEQ ID NO: 15040 - DNA, 4194 bp, Oryza sativa
  Clone ID: TFbOSC900387j.C1.o13.fg
atggcgaaggctgctggccagccacccaacgaccaacctgcaagcagcggcagcggcagcggtgcagcagcctgcttccatctaccaccacacgattactggccaatactggtaagctggcctgcttcatgtactatgcgttactcatcggttgtattacgcacattaaatcattatatgtctataatctcaacaatccaaaaaccttattataggcactgtgattttactatggctggttttgccgatgcactgaggccggataaattcaccggtgtgcattttaagagatggcagatcagggtcactctgtggctgacagctatgaaatgcttctgggtgagtactggcaaacctgaaggagttcttactgctgaacagcagaagcaattcgaggaagccactactctctttgtgggatgcattcttagcgttcttggcgatcgtctggtcgaggtgtatatgcatatgaccgacgctaaggagttgtgggatgcactgaatactaaattcggtgctactgatgctagcaatgatctgtatatcatggagcagtttcatgactacaaaatggctgacaaccgttctgtagtcgaacatgctcatgagatacaaaccatggctaaggaactcgaactccttaagtgtgtcttacccgacaaatttgtggccgggtgcattattgcaaaactacctccatcttggaggagttttggtactgcactcaaacgcaagagacaggaatactccgttgaggggttgattgcgtctcttgatgttgaggagaaagctcgggaaaaagatgccgcgtctaagggcgatggtgggcagtccagtgccaatgttgtgcacaaggcccagaacaagagcaaggggaaatacaaagctcagcagaccaccaacttcaagaagcagaagaagaacaacaacaatcctaatcaggatgagaggacttgctttgtgtgtggccaagttggtcatctggctaggaagtgtccacagcgcaaggggatgaaggcacctgcagggcagacttttaagtctgctaatgtgaccattggcaacactggagatggaagcgggtatggtaatttacctactgttttttcagttaatcaatctactaattggtgggttgatactggggccaatgtacatgtttgtgctgacatctcattgttttcttcttatcaggtcgcacggggttccaccgtcctaatggggaatgggtcacatgcttctgttcatggtgttggcacggtagatctgaagtttacttcggaaaagatcgtgcagctgaagaacgtgcagcatgtcccttctatcgacaggaatcttgttagtggctcccgtctgactagagacggatttaagttggtttttgagtctaataaagtagtcgtgtctaaacatggatattttattggtaaaggttatgagtgcggaggcctgttccgcttttccctttctgatttctgcaataagtctgtgaaccatatttgtggcagtgtggatgatgaggctaatgtttggcattcacgtttatgtcatattaattttggcttgatgtctcggctttccagcatgtgtttaattcctaagttttccattgtcaaaggttctaagtgccatagttgtgtgcaatcgaagcaacctcgcaagcctcacaaggctgccgaggagagaaacttggcaccactagaactcctacattcagatctttgtgaaatgaatggggtgttgacgaagggtggaaaacgatatttcatgacattgattgatgatgctactagattttgctatgtgtacttgttgaaaacgaaagacgaggctctagactattttaaaatttataaggcagaagttgaaaatcaacttgacagaaagataaaaaggcttaggtctgatcgtggtggagagtttttctcgaacgagtttgacttattctgtgaggaacatggcatcatacatgagaggacgcctccctattctcccgagtctaatgggattgctgaaaggaagaaccgcacactgactgacttggtgaatgccatgttggacaccgcgggactgcctaaggcatggtggggggaggcattgttgacctcaaatcatgtgttaaacagagttcctaacagaaataaggataaaacaccatatgagatatggattggtagaaaaccatcactttcttatttgcgcacatgggggtgcttggcgaaagtcaatgtaccaataacgaagaagcgtaaacttggacctaagactgtggactgtgtttttctgggatatgctcatcatagcattgcctatagatttttaatagttaaatccgaggtaccggacatgcatgttggtacaattatggagtctcgtgatgctaccttctttgagagatttttcccaatgaaggatacacatagtggttcgaaccaaccctctgaaataattcccagttcaatcacaccaccagaacaaactgaacatacacatgaacttgtctctgaggaggatgtcagtgaagctcctcgaaggagtaagagacaaaggacggctaagtcttttggtgatgattttactgtgtacctcgtggatgacactcctaagtcaatttcagaagcatatgcatctcctgatgcagactactggaaggaggctgtccgtagtgaaatggattccattatcgctaacgggacttgggaggtgacagagcgaccctatgggtgtaaacctgtggggtgcaagtgggtgttcaagaagaagcttaggcctgacggtactattgaaaagtacaaggctcggtttgttggtaagggctatactcagaaagaaggcgaagatttctttgacacttactcacctgttgctagattgaccacaattcgtgtgctactttccctagcagcctcacatggtcttctcgttcatcaaatggacgttaagacagcttttcttaatggagagctggatgaggagatctatatggatcaacctgatgggtttgtagttgaaggtcaagaaggcaaagtgtgcaaattgttgaagtctttgtatggtctgaaacaagctcctaagcaatggcatgagaaatttgacaaaacattgacatctgcaggctttgcagtcaatgaggcagataaatgtgtatactatcgccatggtgggggtgagggagttattttgtgcttgtatgttgacgacatactgatatttgggacaaaccttgaggtgataaatgaggttaaatcattcttgtctcaaaattttgatatgaaagatttgggagtagctgatgttatcttaaacattaagctaattagaggtgagaatgggattacactcttgcagtcccattatgtggagaagatcttgaatcgctttggctacattgatagtaagccttctccaacaccttatgatcctagcttgttgcttcgcaagaacaagagaattgctaggaatcaactggaatactcccaaatcattggctcgttgatgtacctggctagtgcaactaggcctgatatctcctttgctgtgagcaagttgagccgatttacctctaatccgggagatgatcactggcgtgcgcttgagcgagtaatgcgctatctgaaaggtactgtggaattggggcttcactatactgggtatcctgcggtactggagggttatagtgattctaactggatctctgatgtggatgagatcaaagccactagtggatatgttttcacactgggtggtggtgctgtttcatggaggtcttgcaaacagaccattttgacgaggtcaaccatggaagcagagctaacggcactggatactgctactgttgaggcagaatggctgcgtgatctattaatggatctgcctgttgttgaaaaaccggtgccggctatccttatgaactgtgacaatcaaacgacatgtgaaaagacgattgaagtctgtcaggaaattaagaaactccggagttataacgttggattacatccaaacagcgagaaacctggcagatcccttcacgaagggactatcacgaaatgtgataaacaatgcatcgaaggagatgggtttgagacccatagcattcttgaaagaactcacctttgtgagcttgactgttggtcgcagtctatgaagattttgggtgaatcttctaggaagcttactaaagacctaggagtatga

SEQ ID NO: 15041 - DNA, 2106 bp, Oryza sativa
  Clone ID: TFbOSC9742j.C1.o1.fg
atggctggttttgccgatgcactgaggccggataaattcaccggtgtgcattttaagagatggcagatcagggtcactctgtggctgatagctatgaaatgcttctgggtgagtactggcaaacctgaaggagttcttactgctgaacagcagaagcaattcgaggaagccactactctctttgtgggatgcattcttagcgttcttggcgatcgtctggtccaggtgtatatgcatatgaccgacgctaaggagttgtgggatgcactgaatactaaattcggtgctactgatgctagcaatgatctgtatatcatggagcagtttcatgactacaaaatggctaacaaccgttctgtagtcgaacaggctcatgagatacaaaccatggctaaggaactcgaactccttaagtgtgtcttacccgacaaatttgtggccgggtgcattattgcaaaactagctccatcttggaggagtttcggtactgcactcaaacacaagagacaggaatactccgttgaggggttgattgcgtctcttgatgttgaggagaaagctcgggaaaaagatgccgcgtctaagggcgatggtgggcagtccagtgccaatgttgtgcacaaggcccagaacaagagcaaggggaaatacaaagctcagcagaccaccaacttcaagaagcagaagaagaacaacaacaatcctaatcaggatgagaggacttgctttgtgtgtggccaagttggtcatctggctaggaagtgtccacagcgcaaggggatgaaggcacctgcagggcagacttctaagtctgctaatgtgaccattggcaacactggagatggaagcgggtatggtaatttacctactgttttttcagttaatcaatctactaattggtgggttgatactggggccaatgtacatgtttgtgctgacatctcattgttttcttcttatcaggtcgcacggggttccaccgttctaatggggaatgggtcacatgcttctgttcatggtgttggcacggtagatctgaagtttacttcgggaaagatcgtgcagctgaagaacgtgcagcatgtcccttctatcgacaggaatcttgttagtggctcccgtctgactagagacggatttaagttggtttttgagtctaataaagtagtcgtgtctaaacatggatattttattggtaaaggttatgagtgcggaggcctgttccgcttttccctttctaatttctgcaataagtctgtgaaccatatttgtggcagtgtggatgatgaggctaatgtttggcattcacgtttatgtcatattaattttggcttgatgtctcggctttccagcatgtgtttaattcctaagttttccattgtcaaaggttttaagtgccatagttgtgtgcaatcaaagcaatctcgcaagcctcacaaggctgccgaggagagaaacttggcaccactagaactcctacattcagatctttgtgaaataaatggggtgttgacgaagggtggaaaacgatatttcatgacattgattgatgatgctactagattttgctatgtgtacttgttgaaaacgaaagacgaggctctagactattttaaaatttataaggcagaagttgaaaatcaacttgacagaaagataaaaaggcttaggtctgatcgtggtggagagtttttctcgaacgagtttgacttattctgtgaggaacatggcatcatacatgagaggacgcctccctattctcccgagtctaatgggattgctgaaaggaagaaccgcacactgactgacttggtgaatgccatgttggacaccgcgggactgcctaaggcatggtggggggaggcattgttgacctcaaatcatgtgttaaacagagttcctaacagaaataaggacaaaacaccatatgagatatggattggtagaaaaccatcactttcttatttgcgcacatgggggtgcttggcgaaagtcaatgtaccaataacgaagaagcgcaaacttggacctaagactgtggactgtgtttttctgggatatgctcatcatagcattgcctatagatttttaatagttaaatccgag

SEQ ID NO: 15042 - DNA, 4509 bp, Oryza sativa
  Clone ID: TFbOSC400737j.C1.o9.fg
atggctcagttgagtgccacattaaaggtgagaagggcgacgaacaatgcgacctcgccgcgatcgtggccggcgggctacaccttcgccgacgtgctcactgcggcggcgtgtgctccagagggcaagccacgcggcgtgctcacggcggcggcgtgtgccccagggggcaagccacgcggcggtaatagggctgagggggtcagctttgaccagatcaaggggaaggcgccattggaagcgttcggagaggtcgcctcctcctcggcgacggcgaactcgtcggctcttccggcaacgagccactgccatgagggcccttctccgcaattcccacgagagaaacttgacgcgtgttcgttcaatatccatgccgattttggcgcgattcaagagacacgtggcggttgctatggggataaactcgaggacctctttccccgagtctccagaggcttccgtgagtgggtgtgggtgagaaagggttcgctctctccgcagctagggtttccggcgagaagcgaagaaatccggcgatttggcgactccgcacgccggatctggagagttctggagagaaggtgtgatcaccgcactttcgcgcaagtggtgatgaagcgacgtccccctccaggccgtccggattggcaagcgaacaagaggaaggcgatggagtcgggagacggaggtggtgattggggtcgacaagctggaggcgactgggggaagcaagctggtggaagttgggcgcaccgtgaggaagaggaacttcgcaagcagcttctagcaaaaggaaatcaagttgtgggagatccgcgtcgtcctggtcgccctggccaagagcgtagggattggggagatcgtggagcggggggatccaagccggcgatgaaatgcttcaagtgcggccgtgaaggtcatcaccaagcctcgtgcacaaaccctccgctctgctactcctgccatagctcaggtcatatctctgcaaacttccctatgttacagtcaaagagaggtgtgaagctatgtggttttggtattccgggtcagggtttctacagtttgcaggtagatgtttctgatgttgagatggccaaacaccctgccagtgtggttgaaacaggaatgactgaagatgctattgatgaattggctgttgtttgggttaaaatctttggggttcctaaattggctagatctgaagagcatattaaagctattgtggagcttgttggtgaatttgagatgatagatttgagcactcttagaagggatggtccagtcagagaaagattagcttgtaaggatccaagggaacttcactttgctatccatgtatacattaacaaggtggggtacatgataaggtgggaaccagagggttatcctccttatgataattcacaattccccccggatgatggtgatgataaggacaagaagggtaatggtgataatgatgacatgaatgtggatgaagatcaaaatactcaaagcccagctagaggtagatcagcccatgatagaagatctttcatgggaggttccagaggtgatgttcaatcagcccctcctgcttacaaagggaaaaaggcattggaagagacatgcctgagtgagactcagcagtgtcctactaagagggctgcctgtaaaaaacaaagtctgctggtggtggaaaaggagagtatggtagatcaagagggtgactctaaagcaatgatagtgtgggagggaaacacaacacaagatgtagaatatgaatctcaggagattgatttccctgtcacacaaaaatcgactgaggaaggtgataatgaggatgtgttgactggaatcttagagtttgaaaaatgtgacattccatctttatttgacattgcaatacagagagaggaggaagagttggatgaggaagatagctttcaggaggtttcctacaaaaagaacagacctaaaaaatctgaacctgcgatcacttctagaatgagtttgagaaacagagacatggcctcagtccccattcctaagatagctgagctgcttactcaaaagaagaacctggagactggaggtaactctaacccctttgttgtttttcaaattattgatcctgttgagctgaatagtattgctatagctgctaatatctctctaggaagtaatgaggaagaaattgcaaataccattgagaccattaaggctaaagagttggttcaagctaaattagctgagatgagatggaaaaaagagaaggaaaaggagatgacagatgttgactctttattgagaaatgagaaagagctcccagacaacatgggggaagaggttgacaatttaaataccccttctcaagagatgaataatatggagatatcttctgagagtttagagctgaagaagagaggtttgggaaacattgctaggaaaaaacaattgaaagaggcttggaaatcttctagaggtgcttctggtggcatccttattggtaccaatgatgagttgattgagaagttaggtacccacgctggtgcattcttccttagtgttgagttcagatataaaaaagataatagtgtttgggaggttattgtggtttatggccctgtgttagaatccttgaaacctgattttctgaatgagcttagatgggttggttctgaccattcccctcccattcttaatattggtgaggatattgagagacccccaaagtattttagatttgaatcagcctggctaacaatggaaaattttcatgagttggtaagacaacacatgattccaagagatggttcatatattttagattactcgaataagaagcaatcctttctgagaagatttttgaaaggctgggaattgaatcttagacaggagaagaaccaacagaaagctgttattctaacccagatccaagagttggatgcccaagctgatattagagatttaagccctgatgaatggaataaaagatatgagatggaggctgaccttgaacatatctatgaaatggaggaattgttttggcacaagagatgtggggaaatgactttattacaaggtgacagaaatacagagttctttcacagaatggctaatggcagaaggaggaaatgcttgatcctctccctagaagatgagggtagagagttgacctccaaggaagatctgaaatcccacattattgagtattataagtccttgttcagagctgataatctttctacggtgcatctttctccccaaatttggcaatctgagctgtgccttaatgctgaccaaaaggaggctatcactagacctttttctatggaagaacttgataaagtcattagggaggctaagttgaatattgctcctggtcctgatggccttaatatccatttttacagagctttctggcctgaaatcaaaaatgatctgtttgaaatgttattaatgttgtatgagggtaaactagatttaaagagacttaactttggtgtgatttctttgattcctaagagctctgaccccacaaatatcagacaatttagacccatttgtgtcctcaatgattgttttaaattccttagcaaggtggtgactaacagactttcagaggttgctccctttgtgatttctcagacccaaactgcttttatcccagggagattcattttagaggggtgcataattctccatgaggtgcttcatgaattcaaattgaaaaatcagcagggcattattctgaaaattgattttgaaaaggcttacgatagagtaagctggaattttctttttgaggtcctagagagaaaaggctttcccaagatttggattgattggatcaaggcttgtgtgatgtgggataaagtttgtgtcaacattaatggtgagaggtctgacttctttagaacttataggggcttaagacagggtgaccccctttcccctctcctgtttaacctagttagtgatgctttggcagccatgctagatagtgctaagagagatagtattcttactggccttgtccctggtatcttccctgggggaatcacccatttgcaatatgctgatgatactgtcattttcattccttttgatgtcagacaaatagtggccaccaaatttttgttatattgttttgaagagatggctgggatgaaaattaactaccataagagtgaaatcttcactgtgaggttgatagatgcagaaaatgaagaggttgctaagatgcttaattgtcctagaggcaaatttcccatgaaataccttggtctgcccatcagtcctgacaagattctcaaccaagagtttaattttcttccacataaaatggagaagaggttgtctctttggaatgggggtaacctaacttatgctgggagagctgttcacataaatgcgtgtttatcttccattccttcttatgcaatgggcttttatcagcttcctgagggaattcaccataagtttgattctttaagggggaaatactattgggctggtaatagataa

SEQ ID NO: 15043 - DNA, 892 bp, Oryza sativa
  Clone ID: TFbOSC25199j.C1.o1.np
ctgacaatgagaaaggcaataaggtcagaagtcaggacattggtacctcaagctcccgagtgattgaagcaccagacaccagttgtgtgacactggtccaacacctgattaaccagaaccgattgcttatagagatactacagcagcatcagacgccaattctgaacctgagtcagatacaacctcaagtgcagttggaggcagtccaagcactcacaccacaagtcagcatgccgccagcatcccgaaggacccatggtgacgtgccacatgttgactcaaaagaagcaagtatcatttgttttatgtgtgatgagcaagggcactatgcaagggagtgtcctcagcagaaaagaaaaacaccaatgcgaaccgaagatgaagtccgtaagatgatcattaccagcacagaatggcctccaccaggaatgacaaaacgtcagagaagaaataccttccgaggtgcaccacagttgacagagcatcttttagctaatggaggtagagtgtctgatagtgaagattcagatcaagtctcctcagatgatgaagatgaaatggaacgtaaggcatgctctcgttgtggagaaatcggtcatgttgccagctcgtgtgccactacatgcgttcattgtgaggaagaccatccacccgaccggtgtccaacgagcaggatcaattgtttcttttgtgaaggaactgatcatgtaccaaaagattttcaattcagttttctgctgacgaagaagatggccaaccaacccgccagtttcaacggaaagaagcatcaaggcaacacaaatcctcgccaagattacagtttcagcctaactccagtgccaggacagaggaatcaaaatgagaaaaggaaatgccgagtccggaaagatat

SEQ ID NO: 15044 - DNA, 1467 bp, Oryza sativa
  Clone ID: TFbOSC400610j.C1.o25.fg
atggacatctctaggacaaatgaaggctacacgagctgcggcccggtagtcgagatgtcatggcacagggctggtgtcctgctgctaggggctcaatcctgcctacctgtcccggaggttccggccgtaggtggggttgggtcggtactcttgtttatggctaggatgggttgggaaatatgtcatgtcttccgtccgtataccgtggtgatgtttaacagagaaaaaggaaagaatgtcagcgggtatgcctcaagtaactcaagttttcaactcaatccaccactggcctcaagagagttaaccagggcacacccttggtccattccaagcatgctgcttagttcacagctaccattggttggaagtcaagaccaaaatcagtatgtgtttgatcgagcatttgccacccaggtcaatgagcttccaatgccagaagaggatgtccccttttgtcacgattgtagagaacgaggacactatgccctgaattgtccatgggtatatgccaaagaagccccttcctttggtttagcagggcagacatcgctaaaccagcctcctcgcaccaagtcaagcttgcagcctagtgtgcaaagtagagagcccaatggagagaatccattgaatcccgagaattgctttcctcctagcctttcgtaccacgtggggtcacgtactaagcaagccaaaggcaagaagagtaagaatcagcagagaaaagcaccgatgcgaactgaagaagaagtacgtaagatgactattaccagcaccgaatggcctccagcagggataactattcctagacatcaaagaggaaatacctttcgaggtgcacgacagttgacccagcaccttctaagccatggtggcagagtatctgatagtgaagggtcagatcaagtctcctcggatgatgaagatgagtctccccgacatgtcggcgaggaagagatggaatcaaaggcatgcacccgttgtggagaaattggacacattgctagcatgtgtctcacactctgcccttattgtgaagaagaccatccaccaggggagtgtcccacccgcaaggtcacatgttttctgtgcgaaggtacaaaccatgtgcccaaggattgccaactcagtgtgttgttgaccaagaccgcagaaatccaacgaacaaccctacgattgtctcatcagctagttagctccaacagcaacatcgacgatatcatccacagcaccaatgctcctcctgctgcacctgactctgcaataaatcatagcaataataccttcagcaccaaccattctctgcaccgacagcctcagcaaagaattgtcatcgatggaagaagttgtgtctctccccgacctactccaggccgagcaaagggcaatcaacctcaggagggcgataccaagcagaagactgtcatctgcttcaaacagcaatcagaaggaagcttctcctgtgaatga

SEQ ID NO: 15045 - DNA, 1206 bp, Oryza sativa
  Clone ID: TFbOSC401914j.C1.o17.fg
atgtccagccgcgccgccgcgccgctcctgccgtcgccgccgcttgccgccgccgccaagagcttgtcgtttccgtcgttgcgaagattcatggtgaacactcgcgccagtggaagtggaaacaataacaatgaagagaaccccacccttgctcaagtgctggctcaacagacccaattgattaacatgttagtgcaacaaatgcagaaccagcaagggaacaacaatgtcaatcctccgccgccgcagaacaagttagctgattttcttcgtgtgaggccgcctaccttctctagcactaccaacccagtggaagtaggtgattggttgcacgctgttgagaagaagttggaactgctccagtgtacggatcaggagaaagttgttttcgcttcacatcagttgcaaggatctgcttcagaatggtgggatcatttccggatgaacagagcagaaggacaaccaatcacttgggcggagttcactgaagcattcaagaagacacacatacctgcaggtgttgttgctttgaagaagcgtgagttccgggcacttaagcaaaaggatcgtactgtgacggaatatcttcatgagttcaatcgtctagctcgctatgctccagaagatgtgcgtactgacgaggaaaggcaggagaagttcttggaaggtctgaaggatgaactgtcagttatgttgatctctcatgactatgaggattttcaggagttggttgataaagcaattcgactggaagacaagaagaacaggatggacaatcgtaagagaggaaggattgttttccaggaggcacaggatagtagccagaggcagcgtatcaagccactccaaattggtgaatcttcttccgctggtcaagaacagtcacaacagttgaacatcggtggtgagatcaactcagagactaatgcaagcaatgaagacaatgatgggcaagctactcaatcagtgtcatttcagcaggatcagtctcaagaagataacagtagtggaagggagcagcaggtatgtttcagctgttacaagccaggccactttgcaagagagtgtccgaagtcacagcatcagcagccgcaaggtcagatcaacaacattgtcgtcacaggagccaatgcagtgccagttgcgtcttcaagagttgtgtcttcaagtgttacaactcagccaccagtttcaaagcggcagtag

SEQ ID NO: 15046 - DNA, 2382 bp, Oryza sativa
  Clone ID: TFbOSC900010j.C1.o11.fg
atggctaaggaactcgaactccttaagtttgtcttacccgacaaatttgtggtcgggtgcattattgcgaaactacctccatcttggagaggtttcggtactgcactcgaacacaagagacatgaatactccgttaaggggttgatagcgtctcttgatgttgaggagaaagctcgggaaaaagatgccgcgtctaagggcgatggtgggcagtccagtgccaatgttgtgcacaaggcccagaacaagagtaaggggaaatacaaagctcaacagaccaccaacttcaagaagcagaagaagaacaacaacaatcctaaccaggatgagaggacttgctttgtgtgtgggcaacctggtcatctagctaggaagtgtctacagcgcaaggggatgaaggcacctgcagggcagacttctaagtctgctaatgtgaccattggcaacactggagatggaagcgggtatggtaatttacctactgttttttcagttaatcagtctactaattggtgggttgatactagggccaatgtacatgtttgtgctgacatcttattgttttcttcttatcaggtcgcacggggtttcaccgtcctaatggggaatgggtcacatgcttctgttcatggtgttggcacggtagatctgaagtttacttcgggaaagatcgtgcagctgaagaacgtgcagcatgtcccttctattgacaggaatcttgttagtggctcccgtctgactagagacggatttaagttggtttttgagtctaataaagtagtcgtgtctaaacatggatattttattggtaaaggttatgagtgcggaggcctgttccgcttttccctttttgatttctgcaataagtctgtgaaccatatttgtggcagtgtggatgatgaggctaatgtttggcactcacgtttatgtcatattaattttggcttgatgtctcggctttccagcatgtgtttaattcctaagtttttcattgtcaaaggttctaagtgccatagttgtgtgcaatcgaagcaacctcgcaagcctcacaaggctgccgaggagagaaacttggcaccactagaactcctacattcagatctttgtgaaatgaatggggtgttgacgaagggtggaaaacgatatttcatgacgttgattgatgatgctactagattttgctatgtgtacttattgaaaacgaaagatgaggctctagactattttaaaatttataaggcagatgttgaaaatcaacttgacagaaagataaaaagacttaggtctgatcgtggtggagagtttttctcaaacaagtttgacttattctgtgaggaacatggcattatacatgagaggacgcctccctgttctcccgagtctaatgggattgctgaaaggaagaaccgcacactgactgacttggtgaatgccatgttggacaccgcgggactacctaaggcatggcggggagaggcattgttgacctcgaatcatgtgttaaacagagttcctaacataaataaggacaaaacaccatatgagatatggattggaagaaaaccatcactttcttacttgcgcacatgggggtgcttggcgaaagtcaatgtaccaataacgaaaaagcgcaaacttggacctaagactgtggactgtgtctttctgggatatgctcaccacagcattgcctatagatttttaatagttaaatctgaggtacctgacatgcatgttggtacaattatggagtctcgtgatgctaccttctttgagagctttttcccaatgaaggatacacatagtagttcgagccaaccctttgaagtaattcccagttcaattacactaccagaacaaactgaacatacacatgaacatgtcactgaggaggatgttagtgaagctcctcgaaggagtaagagacaaaggacggctaagtcctttggtgatgatttcactgtgtacctcgtggatgacactcctaagtcaatttcacaagcatatgcatctcttgatgtaaactactggaaggaggctatccgtagtgaaatggattctattatcgctaacgggacttgggaggtgacagagcgaccctatgggtgtaaatctgtggggtgcaagtgggtgttcaagaagaagcttaggcctgacggtactattgaaaagtacaaggctcggcttgttgctaaaggctatactcagaaagaaggcgaagatttctttgacacttactcacctattgctagattgaccacaattcgtgtgctactttccctagcagcctcacatggtcttctcgttcatcaaatggacgttaagacagcttttcttaatggagagctggatgaggagatctatatggatcaaagccactag

SEQ ID NO: 15047 - DNA, 2523 bp, Oryza sativa
  Clone ID: TFbOSC900327j.C1.o13.fg
atgaccgacactaaggagttgtgggatgcactgaatactaaattcggtgctactgatgctagcaatgatctgtatatcatggagcagtttcatgactacaagatggttgacaaccgttctatagtcgaacaggctcatgagatacataccatggctaaggaactcgaactccttaagtgtgtcttacccgataaatttgtggccgggtgcattattgcgaaactacctccatcttggagaggtttcggtactgcactcaaacacaagagacaggaatactccgttgaggggttgatagcgtctcttgatgttaaggagaaagctcgggaaaaagatgccgcgtctaagggcgatggtgggcagtccactgccaatgttgtgcacaaggcccagaacaagagcaaggggaaacacaaagctcaacagaccaccaacttcaagaagcagaagaagaacaacaacaatcctaatctggatgagaggacttgctttgtgtgtggccaacctggtcatctagccaggaagtgtctacaacgcaaggggatgaaggcacctgcagggcagacttctaagtctgctaatgtgagcattggcaacactggagatggaagcgggtatgtcgcacggggttccaccgtcctaatggggaacgggtcacatgcttctgttcatggtgttagcatggcagaagttgaaaatcaacttaacagaaagataaaaaggcttaggactgatcgtggtagagagtttttctcaaatgagtttgacttattccgtgaggaacatggcatcatacataagaggacacctccctattctcacgagtctaatgggattgccgaaaggaagaaccgcacactgactgacttgggactacctaaggcatggtggggggaggcattgttgacctcgaatcatgtgctaaacagagttcctaacagaaataaggacaaaacaccatatgagatatctattgggagaaaaccatcactttcttatttgcgcacatgggggtgcttggcgaaagtcaatgtaccaataacgaagaagcgcaaacttggacctaagactgtagaccgtgtctttctgggatatgctcatcacaacattgcctatagatttttaatagttaaatctgaggtacctgacatgcatgttggtacaattatggagtctcgtgatgctaccttttttgagagcttcttcccaatgaaggatacacatagtagttctagccgaccttctaaaataatttatagttcaatctcaccaccagaacaaactgaacatacacatgaacatgtcactgaggaggatgacagtgaagctcctcgaaggagtaagagacaaaggacggctaagtcttttggtgatgatttcactgtgtacctcgtggatgacactcctatgtcaattttagaagcatatgcatctcctgatgcagactactggaaggaggctgtccgtagtgaaatggatttcattatcgctaacgggacctgggaggtgacagagcgactctatgggtgtaaacttgtggggtgcaagtgggtgttcaagaagaagctcaggcctgacggtactattgaaaagtacaaggctcggcttgttgtgataaatgaggttaaatcattcttgtctcaaaattttgatatgaaggatttgggagtagctgatgttatcttaaacattaagctaattagaggtgagaatgggattacactcttgcagtcccattatgtggagaagatcttgaatcgctttggctacattgatagtaagccttctccaacaccttatgatcctagcttgttgcttcgcaagaacaagagaattgctaggaatcaactggaatactcccaaatcattggctcgctgatgtacctggctagtgcaactaggcttgatatctcctttgctatgagcaagttgagccgttttgcctctaatccgggagatgatcactggcgtgcgcttgagcgagtaatgcactatctgaaaggtactatggaattggggcttcactatactgggtatcctgcggtactggagggttatagtgattctaactggatctctgatgtggatgagatcaaagccactagtggatatgtcttcacactgggtggtggtcctgtttcgtggaggtcttgcaaacagaccattttgacgaggtcaactatggaatcagagctgacggcaccggatactactactgttgaggcagaatggctgcgtgatctattaatgaatctgcctattgttgaaaaaccagtgccgactatccttatgaaatgtgacaatcaaacggtaattgtcaaagtgaatagttctaaggataatatgaaatcgtctagacatgtgaaaagacgattgaagtctgtcaggaaattgagaaactccagagttataacgttggattacatccaaacagctagaaacctggcagatcccttcacgaagggactatcacgaaatgtgatagacaatgcatcgaaggagatgggtttgagacccatgtga

SEQ ID NO: 15048 - DNA, 756 bp, Oryza sativa
  Clone ID: TFbOSC22542j.C1.o4.gm
atggcggcgaggggcggcgcggccgccacgacggcggctgccgaggtggcggccgcggcgccgccggcagcggcgccaccggcggcggcggcctcgccgccggcgcccggggcaggcgcggtgggctccgccgcggcggccgccgcgcccccggcttcggactccgaggcgagcacggcggtggcggacgcggcgaaggcgatggcgaggacggcgaaggcgacggcgatcttcttcatctccatagtatcacagccggcgggtgcggtggcgggaggggatcgacgacgacgacgacgaccggccggcctgctctggattattggggagcgaatcgagaggcgggtggccaatctcttctgcgcgtcgttgttggaggagaagagggagcaggcgtcgctgccagcggcggagggcggagggcggcgggcggctgagacggaggcggagcgggcggccggcagcgggaggcggagctcgcccgggcagccggtggtggaggcggaggcggaaggcgctctccgacctcctcctcatcgaccggtgacgcggccgcagcgggtaggacggcgacgccaacttcctctcctcggacgctttggaggcggtgcggcgtgggtcgacggcgacgcgccgccgcccacgacgacgcgaggcgcgcgggtggaggcggtggtggcgctggcgttcaagacggcggtgaccgacgacccgtcgggggcgctgccgacgacccgtgccggtgggccggcgtga

SEQ ID NO: 15049 - DNA, 3474 bp, Oryza sativa
  Clone ID: TFbOSC33907j.C1.o1.fg
atggctaaggaactcgaacttcttaagtgtgtcttacccgacaaatttgtggccgggtgcattattgcgaaacttcctccatcttggagaagtttcggtactgcactcaaacacaagagacaggaatactctgttgaggggttgatagcgtctcttgatgttgaggagaaagctcggaaaaaagatgatgcgtctaagggcgatggtgggcagtctagtgccaatgttgtgcacaaggcccagaacaagagcaaggggaaatacaaagctcagcagaccaccaacttcaagaagcagaagaagaacaacaacaatcctaatcaggatgagatgacttgctttgtgtgtggccaacctggtcatctggctaggaagtgtccacagcgtaaggggatgaaggcacctgcagggcagacttctaagtctgctaatatgaccattggcaacattggagatggaagcgggtatggtaatttacctactgttttttcagttaatcagtctactaattggtgggttgatactggggccaatgtacatgtttgtgctgacatctcattgttttcttcttatcaggtcgcacggggttccaccgtcctaatggggaatgggtcacatgcttctgttcatggtgttggcacggtagatctgaagtttacttcgggaaagattgtgcagctgaagaacgtgcatcatgtcccttctatcgacaggaatcttgttagtggctcccgtctgactagagacggatttaagttggtttttgagtctaataaagtagtcgtgtctaaacatggatattttattggtaaaggttatgagtgcggaggcttgttccgcttttccctttctgatttctgcaataagtctgtgaaccatatttgtggcagtgtggatgatgaggctaatgtctggcactcacgtttatgtcatattaattttggcttgatgtctcggctttccagcatgtgtttaattcctaagttttccattgtcaaaggttctaagtgccatagttgtgtgcaatcaaagcaaccttgtaagcctcacaaggctgctgaggagagaaacttggcacctctagaactcctacattcagatctttgtgaaatgaatggggtgttgacgaagggtggaaaacgatatttcatgacattgattgatgatgctattagattttgctatgtgtacttgttgaaaacgaaagacgaggctctagactattttaaaatttataaggcagaagttgaaaatcaacttgacagaaagataaaaagacttaggtctgatcgtggtggagagtttttctcaaaagagtttgacttattctgtgaggaatatggcattatacatgagaggacgcctccctattctcccgagtctaatgggattgccgaaaggaagaactgcacactgactgacttggtgaatgctatgttggacaccgcaggactacctaaggcatggtggggggaggcattgttgacctcgagtcatgtgttaaacagagttcctaacagaaataaggacaaaacaccatatgagatatggattgggagaaaaccatcactttcttacttgcgcacatgggggtgcttggcgaaagtcaatgtaccaataacgaagaagcgcaaacttggacctaagactgtggactgtgtctttctgggatatgctcaccacagcattgcctatagattttcaatagttaaatccgaggtacctgacatgcatgttggtacaattatggagtctcgtgatgctaccttctttgagagctttttcccaatgaaggatacacatagtagttctagtcaaccttctgaaataattcccagttcaatcacaccaccagaacaaactgaacatacacatgaacatgtcactgaggaggatgacagtgaagctcctcgaaggagtaaaagacaaaggacggctaagtcctttggtgatgatttcactgtgtacctcgtggacgacactcctaagtcaatttcagaagcatatgcatctcctgatgcagactactggaaggaggctgtccgtagtgaaatggattccattatcgctaacggaacttgggaggtgacagagcgaccctatgggtgtaaacctgtggggtacaagtgggtgttcaaaaagaagctgaggcctgacggtaccattgaaaagtacaaggctcggcttgttgctaagggctatactcagaaagaaggcgaagatttctttgacacttactcacctgttgccagattgaccacaattcgtgtgctactttccctagcagcctcacatggtcttctcgttcatcaaatggacgttaagacagcttttcttaatagagagctggatgaggagatctatatggatcaacctgatgggtttgtagttgaaggtcaagaagacaaggtgtgcaaattgttgaagtatttgtatggtctgaaacaagctcctaagcaatggcatgagaaatttgatagaacattgacatctgcaggcttcgcagtcaatgaggcagataaatgtgtatactatcgccatggtgggggtgagggagttattctgtgcttgtatgttgatgacatactgatatttgggacaaatcttgaggtgataaatgaggttaaatcattcttgtctcaaaaatttgatatgaaggatttgggagtagctgatgttatcctcaacatcaagctaattagaggtgagaatgagattacactcttgcagtcccattatgtggagaagatcttgaatcgctttggctacattgatagtaagccttctccaacgccttatgttcctagcttgttgcttcgcaagaacaagagaattgctaggaatcaactggaatactcccaaatcattggctcgctgatgtacctggctagtgcaactaggcctgatatctcctttgctgtgagcaagttgagctggtttacctctaatccaggagatgatcactggcgtgcgcttgagcgagtaatgcgctatctgaaaggtactatggaattggggcttcactattctgggtaccctgcggtactggaaggatatagtgattctaactggatctctgatgtggatgagatcaaagccactagtggatatgtcttcacactagttggtggtgctgtttcatggaggtcttgcaaacagaccattttgacgaggtcaaccatggaagcagaattgacggcactggatactgctactgttgaggcagaatggctgcgtgatctattaatggatctgcctattgttgaaaaaccagtgccggctatccttatgaactatgacaatcaaacggtaattgtcaaagtgaatagttctaaggataatatgaaatcgtctagacatgtgaaaagacgattgaagtctgtcaggaagttgagaaactccggagttataacgttggattacatccaaacaactagaaacctagcagatcccttcacgaagggactatcatga

SEQ ID NO: 15050 - DNA, 1983 bp, Oryza sativa
  Clone ID: TFbOSC400773j.C1.o145.fg
atggatgaagtcgggggtcgatggacattctccagggcaaatgaaggctacacgagctgcggcccggtagtcgagatgtcgtggcacagggttggtgccctgctgctagggggctcagtcccgcctgcctgtcccggaggttccggccgtagggggattgggtcggtactcttgtctatggctaggatgggttggaaactatgtcacgtcttccgtctgtataccgtggtgatgtttaacagagaaaaaggaaagaatgtcagcgggtatgcctccagtaactcaagttttcaactcaatccaccactagcctcaagagagttaacaagggcacacccttggtccattccaagcatgctgcttagtccacagctaccattggttggaagtcaagaccaaaatcagtatgtgtttgatcgagcatttgccacccaggtcgatgagcttccaataccagaagaggatgtccccttttgtcacgattgtagagagcaaggacactatgccctgaattgtccatgggtatatgccaaagaagctccttcccttggtttaacagtgcagacatcgctaaaccagcctcttcgcaccaagtcaagcttgcagcctagtgtgcaaagcagagagcccaatgaagagaatccattgaatcccgggaattgctttcctcctagcccttcgtaccacgtggggtcacgtactaagcaagccaaaggcaagaagagtaagaatcagaggagaaaagcaccgatgcgaactgaagaagaagtacgtaagatgaccattaccagcacagaatggcctccaccaggaatgacaaaacgtcagagaagaaataccttccggggtgcaccacagttgacagagcatcttttagctaatggaggtagagtgtctgatagtgaagattcagatcaagtctcatcagatgatgaagatcagaagtctccccaaggtttcaaccagaacaaaatggaacgtaaggcatgctctcgttgtggagaaatcggtcatgttgccagctcgtgtgccactacatgcgttcattgtgaggaagaccatccacccgacaggtgtccaatgagcaggatcacttgtttcttttgtcaaggaactgatcatgtaccaaaagattgtcaattcagttttctgctgacgaagaggatggccagccaacccgccagttccaacggagagcagcatcaaggcaacacaaatcctcgccaagattacagtttcagcctaacttcagtgccaggacagaggaatcaaaatgaggaaagaaaatgccgagtccgagaagatatctgttgcttcaattgtcaaggaatgggtcatttcgccgacaagtggccaaaaccgagaaacatagctgccggcacgtcagtccacgcaactccctgcaatcagaagcttgctcctcagcgaattgtcatccatgcatcccgaagcagtcctatagcccccgttgcaacagctccaactccagcgagtacattaccacaaggtgtcaatgctcaatttcagccccagccaccagttgacaagacagcggcattgtacctttggatgttccagcacagcagccaaaaaaaaaatcaagtacaagatgaagaacccgagccaataataccttcagcaccaaccattctctgcgccgacagcctcagcagagaattgtcgtcgatggaagaagttgtttctctccccgacctactccaggccgagcaaagggcaatcaacctccggagggcgataccaagcagaagaccgtcctccgcttcaaacagcaatcagacggaagcttctcctgtgaatgatagcattatgcagtcctatcacatcatcacagaaccaatcaaggatgcagtcactagaacaatgccagctatatctctccagagtcaaaatgagcagccatgtttgtggttttcagttcgctacttatcattgcgtaatcgaaagtttgcagcaatcatgtaa

SEQ ID NO: 15051 - DNA, 1001 bp, Oryza sativa
  Clone ID: TFbOSC25200j.C1.o1.np
aaatggaacgtaaggcatgctctcgttgtggagaaatcggtcatgttgccagctcgtgtgccactacatgcgttcattgtgaggaagaccatccacccgacaggtgtccaacgagcaggatcacttgtttcttttgtgaaggaactgatcatgtaccaaaagattgtcaattcagttttctgctgacgaagaagatggctaaccaacccgccggtttcaacggagagaagcatcaaggcaacaccaatcctcgccaagattacagtttcagcctaactccagtgccaggacagaggaatcaaaatgagaaaagaaaatgccgagtccgggaagatatctgttgcttcaattgtcaaggaatgggtcatttcgccgacaagtgcccaaaaccgagaaacatagctgccggcacgtcagtccacgcaactccctgcaatcagaagcttgctcctcaacgaatggtcatccatgcatcccgaagcagtcctatagcccgcgttgcaacagctccaattccaatgagtgcactaccacaaggtgtcaatgctcaatttcagccccagccaccagctgacaagacagatgccagtatctgcgttgtacctttagaagctccaatacagcagctgagaaatcaagtacaagatgaagaacccgagtgtacaaccattctctgcaacgacagcctcagcaaagaattgtcgtagatggaaggagttgtgtctctccccgacctactccaggccgagccaagggcaatcaacctccggagggcgataccaagcagaagaccgtcatccgctgcaaccaacaatcagaaggaagcttctcctgtgaatgatagcattatgcagtcctatcacatcatcacagaaccaatcaaggatgcagtcactagaacaatgccagctatatctctccagaatcaaaatgagcagccatgtttgtggttttcagtccgctacttatcatggtgtaatcgaaagtttgcagcaatcatg

SEQ ID NO: 15052 - DNA, 1376 bp, Oryza sativa
  Clone ID: TFbOSC29052j.C1.o1.np
aattcgggatgaatttatcaggacgtgacaggagggtcctcagcagaaaagaaaaacaccaatgcgaaccgaagatgaagtccgtaagatgatcattaccagcacagaatggcctccaccaggaatgacaaaacgtcagagaagaaataccttccgaggtgcaccacagttgacagagcatcttttagctaatggaggtagagtgtctgatagtgaagattcagatcaagtctcctcagatgatgaagatgagaagtctccccaaggtttcaaccagaataaaatggaacgtaaggcatgctctcgttgtggagaaatcggtcatgttgccagctcgtgtgccactacatgcgttcattgtgaggaagaccatccacccgacaggtgtccaacgagcaggatcacttgtttcttttgtgaaggaactgatcatgtaccaaaagattgtcaattcagttttctgctgacgaagaagatggccaaccaacccgtcagttccaacggagagaagcatcaaggaaacacaaatcctcgccaagattacagtttcagcctaactccagtgccaggacagaggaaacaaaatgagaaaagaaaatgccgagtccgggaagatatctgttgcttcaattgtcaaggaatgggtcatttcgccgacaagtgcccaaaaccgagaaacgtagctgccagcacgtcagtccacgcaaacccccgcaatcagaagcttgctcctcaacgaattgtcatccatgcatcccgaagcagtcctatagcccgcgttgcaacagctccaattccaatgagtgcactaccacaaggtgtcaatgctcaatttcagccccagccaccagctgacaagacagaggccagtatctgcgttgtacctttggaagttccaatacagcagctgagaaatcaagtacaagatgaagaacccgagaagaagggcattactccaaaaactgtccccaaccaaggcaaaatcgacctccacattaccgccaatttacacgaagcagacattccaatcgtattgtggtcactggagcaaacgccgtaccaaagagtgaaatcttcaactcggtatcagatgctacacggagtgaaaagtgcaagcaccggttaccaggttgacgccaaagatatgaatgataagaagttctagaaccgaagccccatcctcaaccaccgcagcctagtctgggtcagttagaagttcaaccagggacaagtcgggtgaagagaagattccatctgcaacaggagatcgagccaagcgttccagagtggagaagttttgttaggcaagttggttatagaagacggagcggaagaagtcagacaagaagagaagaccgcccaacctatcttcatgc

SEQ ID NO: 15053 - DNA, 3747 bp, Oryza sativa
  Clone ID: TFbOSC401985j.C1.o4.gm
atggagctcacgtcggagcaagaacaactcatccaccgcaatgctcaagcttccaatgcaattctctctgccttgagtccggaggagttcaacaaggttgatggacttgaggaagccaaggagatatgggatactttgcaattggctcatgagggatcacccgccgttcgtgaggccaagattgaattattggaaggaaggcttggaagatttgtgatggatgacaaggagacaccacaagagatgtatgataggatgatgattcttgtcaacaagattaaaggacttgggagtgaggacatgacaaatcactttgtagtcaagagacttctccgtgcatttggtccaagaaatcccactcttgtatcaatgatacgggaaaggaaagacttcaagagactcaccccaaatgacattcttggaagaattgtgtctcatgagatgcaagaagaggaagctcgtgaagtgaggcaaatggtgaagaatgcgcccatgatcaaaaatcaagaagttgctttgaaggcaaaccaagaagaagagtcaagttgtgaagaaagtgaagatgaagaaatggcttttattgtcaagagattcaaacactttcttcgcaagagtggctatggcaaagggaggaaggatgatgacaagggaaagaggcaatcaaagagagcgtgcttcaattgtggcgaatatggccatttcattgccgattgtcccaggtcaaatgaagctaaggctaagggaggcaagaagaagccgaagcgtgctcatgtggcggaggcacacatggcggaagtgtggtactccggagatgaaaaatatcccgaagtcaagcccaagcccaagtcaaaagacaaggttgaaggaaaaggtggtgttgctactatcgccttcaagtcatcctcttcaagcaaggagcgtctcttcaacaacttgagtgatgacgacgacgactcctaccactactcttgcttcatggcccaaggccgcaaggtgatgactcaaaagccctctcacacttctcttgatgttgattctagtgatgaggaaagtgataatgaattagatgatgtgcttaagagccttagcaaacccactatgcaacatttggctaagttaatgagagctttggatagtaaagaacaatcactcgaaaggcaagaagaattgcttattcttgagaagaaaagaaaccttgacttagaggagagcttagctaaagaatgtgctaaaaatgaacaactagctaatgatcttaatttggctaatggttctttagctagccttagagatgtcaatgagactcttcaagagaaatttgcttgtttagacaaaagtcataaagatcttgaagttcaatttgacactctttggaatagtacctctcaaccaaatgtggtttctaattcttctaacccttctactagcaatggttgtgttaggtgttacaatatttatttgaactcttatgctactaatattgatgctatgcaagctcttaagaaagagaatgaaaggttgggcacattagtgaaatatggatgcatgaagacataccattcaaaagatgccctttacaagaccatcaccgctcatcctaacaaggatggacacgggcttgggttttcgggtggaagtcctgtgtctaagcgtgtgatggcatactcctccggtggttcatgttgggttgtggacaatggttgcaccaatcatatgactggagagaggagtatgtttacaagtcttgataaggagaatggaactcgtgagaatattgtgtttggagatgatggtaaagggaagttgggttacaattgcttgtttaccgatgaggatgtgaccgtctttagaagggatgactcctccgtagcattcaaaggcaagttaaagggtgatctctatcttgtcgatttcgatgtggatagagtgaatccggaagcttgtttgattgctaaatcctccatgggttggctatggcatcgtagactagcccatgttggaatgcggaatttggcaactcttctaaagggggaacacatcctcgggctcactaatgtcacatttgagaaagatcgtgtgtgcagtgcttgccaagccgggaaacaagttgggaatccacattctatcaagaacatcatgactacaacatgcccttttgagcttctacatatggatttattcaggcccgtggcttacataagtattggagataacaagtatggttttgtcattgttgatgatttttcacgcttcacttgggtgtatgttctccatgacaagagtgaggctcaagatgtcttcaagcgctttgccaagcaagcccaaaacctctatgatcttaccatcaagagggtgcgaagcgacaatggaggagaattcaagaacactcaagtggaggaattccttgatgaacaagcacaagagggcactttcatctctcaaaccaagtacgtgaaggacattctcaagaagtttgggatggaagatgccaaacccatcaagactcctatgcctactaatggccacctagacctcgacgataatggtaaatgtgtggaccaaaaggtggggaacgcgttcgtgcaccagtactacaacatcctgcaccagtcgccggatctcgtccaccgcttctaccaggacgggagccgcatcggccgccccgcctcccccgccgccgccgagatggacaccgtcaccaccatggaggcgattaacgcgaagatcgtgtccatggacatcgtgcgggcggagatcaaggcggtggacgcgcaggagtcgctgggcgggggcgtcacggtgctcgtcacgggccacctcaccgggagcgacgacgtgcgcagggagttctcgcagtccttcttcctcgcgccgcaggagaagggatacttcgtgctcaacgacatcctgcgctacgtcgggggggagggggatcaggaggtggagccggagccggagctggagctgtcgtttccgccgtcgcagcagccggattcggtgcctgctccttcggcgaatggcactagcgtgccgcgggaacaggaggccttctcgcagccggagcagcatgtggctgatcctgcacccaatgctcaggaggctgatctcaacggcgaggaggtttataacccaccgaacaacacagaggggcctgttgtggaggaaacgccgattcctgaagttatagatgaagtgccaaataacgtagctgtggctatgccgactccgcctgcccctgcccctgcccctgtaccacaagaggaggcccccaagaagtcgccggcaccaccaaaacaagagaagcaagttgctcctgcacctgttgctccggttgctgatgctccaactttcagtcctaatcctgaaagcagcaacattcaagaggctgaagagtttgaagatcccagttcagttcaaagtgcaattgcgggttctcctgtgacgattagtgaccggcaatgttatgtggaggaaaagagaactgctggttcacgtggtggtggcagaggaaggtttgctcctggtagaggtggtaacttccgaggtgaaggcatgagaggccgcgggaattacaccggagggaggggctatggaaggggtgagttcaattatcgatccgactatggaggcagaggcgctggtagaggtggttcatcacgtggtggtgatgttggctaccagcgggttgaccactctgctggtcgtgctgctcgggcgccatcgggcactagtgccgttgcaaagtga

SEQ ID NO: 15054 - DNA, 4368 bp, Oryza sativa
  Clone ID: TFbOSC101306j.C1.o6.fg
atgtctctccactccattcgttccccctctctctcgtcccatgcctcaagcacttccagtggacgaggcagcaggcggtcggcggctgacgctgagggcgacggcgatgcgactgctgctgcgcgggtcgcgcaggaggcgcaagcggctgcgcgggaagcacgcgcggcgtgtgaggaagcggaggcgcggctgcaggcagccacaagggcggcgcgtctcgcggcggcagaagctgaagcagcgcgcaccgcggaggcagccaggcaggctgcagctgctgctgctgttttgcgagctgaggaggaggaggagtggcgtgacctggagcgggcagacgcggcccgcgtgcgacgcgacgcggaccgggatcgacacgcaggtcgacgcgaccgcgacttcagcccccatcgcggaggagcagatctccaccgcggtgaggaggagcggcgcgatccatggcgcgatcctcggatagaccgcgccctggaggcccagcgactccgggagcaggcagcggcgattgaggcacaactggacttcgaccgggagcagggtggacgggacgttggcgcacggagccctcgcaggcagcgcgcctccccttccccggacaggcgccgtggtcgccgtggaccctccggctctcctcccgttgtgcagaccgtcgtcaaggatgttggcggcgcatggcccatgctcaccaagactaactacgtcgagtgggcgatggtgatgaaggtgaaattgcaggcgcgccacatgtgggacgcggtctggtacggcgacgtcgactacggggaagattggcgggcgctggaggcgctccttgcggctgttccgacggagatgcagtcctccattgtgaacaagcggatcgccaaggacgcctgggatgccatcgcttcggcacgcatcggcagcgaccgcgcccgcaggtccacgcttcagaagctgcgtcaggattgggagaacctggccttcaagccgggtgaggacatcgacgacttcgttctccgcttcaactccttgcagcagcggttggcgcagctcgtcgacaccaccatcgacaaggagagagccgtggagaagctccttcgcgtcgtccccgagaagtacacgcagctggctctgtcgatcgagacgctgctggacttcaccgagctcacgatcgaagaggtgacgggtcgcctcaaggccgtcgacaaccgcaagcagctacctccctcagagccgatcaccattggtggcaagcttttcttcaccaaggagcagtggctcgcccgccagcaggagcagaagaagggggaggccacaggctcttcggcttcaggatcgtcgagtagccgcaagcgtcgaccacgcaagtgggagaaggcgcgtagtggcactcttggcggcgccgatggcgagcgcaagggcagccgcgacaacacctgccacaactgcgggaagaccggccactgggccaaggactgccggcaggcgacgcacggcggtcaagcacacgtcgctcaagcgctggagggtgacgaggtggctctgtttttcgtacacagaagcatcgagccgcacttcactcccgcacaggacgctaccacgcccctccaactcgacgagccgcgggcccacgtcttcctcagcaacggatcctgcggcgacaagatcgacggatggtgcctcgacaccggtgccactcaccacatgaccgggcggcgggaattcttctccgagcttgactccagcgttcaaggctccgtcaagtttagggacgcctccgccgtggagatcaagggcgtcggctccatcctcttcaccgccaagaccggcgagcaccggctgctcaccggtgtctactacatccccgcgctgaggaactccaccatcagtttgggacaactggatgagaacggctcgcgcgtggagatagaggacggggtcttgcgggtttgggatcgccatcgtcgccttcttgtcaagcgctttgggcacctcaacttcgaggccctgaagcagctcggcaacaaggagatggtgcagggcatgccgcgagtcgagcacgtggagcagttttgcaacacctgcatcctcaccaagcagcggcgactcccctttccccgccaagcaagtttccgcgccaaggagaagctggagctcgtgcacggcgacctctgcggccccgtgactccggccacacctggaggccggcgcttctttctgctgctcgttgacgacgtgtcctgctacatgtgggtggtcctgctcgactccaaggcagcggctgcagacaccatcaagcgccatcaagttgctgcggagaaggaatgcggccgcaagcttcgggtgctacgcaccgacaacgggatccaacgccacttctccgtgccatacaccccgcagcagaacagcgttgtggagcgccgcaaccagacagtggtggccactgcccgcgccctcctcaagcaaagagggatgccagcaatctactggggggaggcggtgatgactgccgtccatctcctcaaccgctcgcccaccaaggcccttgacggcaagacgccgtacgaggcctggcatgggcgcaagccggtggtgagccacctccgcatctttggctgtctcgccttcgccaaggagctcaaccacatcgggaagctcgacgaccggagctcgccgggagtcttcatcggctatgcggagggcgtcaaggcctaccgcatcctcgaccctgcgacgcagcgcgtccgcatttctcgggacgtcgtgttcgacgaagggcgaggttgggcttgggacaaggcggtggacgacggctcgacttcgacgctcagagacttcgtcgtcgactacgtccactttgggggagccagaggagctagcagctcatcttcaccgagctcatccacctcggcacccggctcgccatcagctccggcgagtcctccaccacctacaccaccagcgactcctccatcaccggctacgccccgctctcctacaccggcgcccacaccaccggtggagttcgccactccgttgtccaacgacgaggatcgtgttgatgcgtaccacgacgacgagcctctgcgctaccgcaccgtggacagcatcttcagtgatcagcctgtccttggactggtgacgcgcgacttcgaggccgagctgcacctagcgcatgaggacggcgagccctgctccttcgcagaggcgaatggagatgtggcatggcgcactgcaatgcagcacgagatgaacgcggtcgagcggaaccggacgtggccgccgggattcgtcatccccggcaaggagaacaaggttctccgcctgcgcaaggccctctacggcttgcggcaggcgccccgagcttggaacgccaagctggactccactctcaagcaactggggttccagcagagctctcacgaagctattgtctaccggcggggcaaggacaacaatgccctgttggtaggcgtctacgtcaacgacttggtgatcaccggcaccaaggaggctgaggtggaggcgttcaaggaggagatgaaggcgacttttcagatgagcgatttgggccttctctctttctacctggggatcgaggttcaccaggacagctctgacatctcccttcgccagactgcctacgccaagcgcatcgtcgagttgggcgggctcaccggctgcaacccagcctacactcccatggaggaaaggttgaagctgagccgcgacaacacggctgaggaggtcgatgccacgcagtaccggcgtattgtgggcagccttcgctacctcgtccacacgcggccagacttggcatttgctgttggctatgtcagccggttcatgcagcgaccgacgacagagcaccagcaggctgtcaagaggatcctccgttacgtcgagggcaccaccgactacggcttgcactacccgaggtgtcccgctagcagtcggtcaagcaacaagtggtggcagtcagtcaagcaacaagtggtggccctgtccagttgcgaggcggagtacatcactaccacaaccgcctcaactcaagctctctggttggctcggctgctgggtgatctcttgggcagagacgctgaagcagtggagctcagggtggatagcaagtccgctttggccatggcaaagaatcccgtcttccatgagcgcagcaagcacatccgcatcaagtatcatttcattcggagctgcttggaggaggggagcatcaaggccagctacattaacacccaggatcagctcgccgatcttctcaccaagtccctcgggcgggtcaagttccaggagtttcgcgccaggattggaatggttcaaattccccaaaaggcgccacacaagacttag

SEQ ID NO: 15055 - DNA, 1608 bp, Oryza sativa
  Clone ID: TFbOSC1821j.C1.o3.fg
atggataacactggtaacaaaggctatgggaatgatggatccgatgactcaagaacccaagccaatgggaatgagaaaagcatcaacgaaacctcaccagagctaatccaaattgtggttaaccaaaccaacatgttggcaaccgcctttcaactattacagaatcggaacaacccagcaggggcaaccaacgttcaagtacctacagtccagcaacagtgcaagttatcagaatttctcaaaacggggcctccaacctttgccatggccgtcgatcctatggaagccagtgattggttgcgcacagtcgagaagaagctagggttgattcagtgcaccgaccaggagcgggttggcttcgcaactcatcagttggttggaccggcttcagagtggtgggatagctacgaagcatcacggccagaaggacataccatcacctggaacgagttttcatctgtattcaagagatcacatgttcccgcaggaatgatcacactaagaaaacgagagttccgctacctgaagcaaggagatttgaccgtcacagagtacctgcacgagttctatcgtttggctcaatatgcaccagaagatgtggaaacggatgaagacaaacaagagaagtttctccaggggttaaaagatgagcttgcagtgcaactacttctagaggattatgaagattttgagaaacttgtggacaaagccatgcaactcgaaagtgagcataatcggatgacgaactgcaagagaaggatggttaacaacccagtatttccaggtggtaaccaaagacagcgcactgagccacttcagatcaccggatcttctgttgtgtatcaagagttcctgccccaagaagatgaacgcaatgcaggcaacaacaatagcaatactaatgctgatgataccaccaacaaccatggttcttgccccattcatgaccacttagatcaagcgtgcaatgtcaacatcattcaccaagatatcgacgatagtatcaatgaaggcacccagaatgacaaccctagcaattttgactctgggaaggactccaatggtgatagcaataatggtaccactgatgccaatgttagcaaggattcccaaccaccaattccaactccaagtcaaaatgatcgtccccagatggacagctcagtaaagaagacgttgatttgttacaactgcaaaggaccaggacatttctctagagattgtccacagccgaagcgtaacctgcgccatcactccggccattatgcaagaagaagacaagtcactcgccttgtggtcactggagcaaacgccgtacctgtgaggcctcatgttaattctaacccatatggtaacttgtctgaggttgactccgaagatatgaagcatgagaagttctggaacggaagcatcactgaactaccgcaacctagtctgagtcagccaaaaggtgcaccctggtccaagtcaggtgaagagaagattccatccgcaacaggaggtcaagccaagcagttccgagtggtaaagttttgctggaagttcgtcaagacgcaacggaagaagtcagacaagaagagaagaccgcccaacctatcttcttgctag

SEQ ID NO: 15056 - DNA, 2176 bp, Oryza sativa
  Clone ID: TFbOSC23989j.C1.o1.np
ttgagaagttgtggcacgttgcaccatttcctagcgccgccgccgccgcgaatcccgccgctcccgtccgtcccgcgtgcaatcaagaggggggaaatattccccgtgattccctccctctttccccccattattctctccctctctccctcggattcgtttggaaaccctcccccaatcccgccggcgccattgatggagcccgagagcgtcacgccggtttcctttccctccggccgctctctccccctcccaaccctatataaacactccccgtgcctccctccaccgtttccgccactcgccgctctctctctccgccagaatcgagcttgcgccgtcgctctctctctccgccgtcaccgccgagctccggtccgccgccgtcgtcgccccggaccttctcccgcctcggcgccgcctccttcagcttcgccgcatcctcgccgacctcgtccacccctccatttcggtcgccgaccgccggaacgccgtcgaccccgtcgacccgagccgcgccgccgctttcctccgctccggtcgccgtttccgtcgtcgccgtcgacccggggtgagccgtggaccgccgcttcatttcccccttccctcccctctctcgggcgccgctccgccgcgccggtggtcgccggcggcgaccatcggggcgcgggcgcgccgcctcccgtcggctgtgccggcgtggccgccttcgggcgcgtcccgcggctgccatgtggggcccggccgtcagccgcccgcgcccccgggtgcggctgacgcgtgggacccacggcgccggccggcgtaagccgcgtgcacccggtccaccgtggaccgtgaggctgccgcgtgggccccactcccgtggacccggacaaatgaaggctacacgagctgcggcccgatggctgacaatgagaaaggcaataaggtcagaagtcaggacattggtacctcaagctccctagtgaatgaagcaccagacaccagttgtgtgacactggtccaacacctgattaaccagaaccgattgcttatagagatactacagcagcatcagacgccaattctgaacctgagtcagatacaagctcaagtgcagttggaggcagtccaatcactcacaccacaagtcagcatgccgccagcatcccaaaagacccatggtggcgtgccacatgttgactcaaaagaagcaagtatcatttgttttatgtgtgatgagcaagggcactatgcaaggaactgtcctcagcagaaaagaaaaacaccaatgcgaaccgaagatgaagtccgtaagatgatcattaccagcacagaatggcctccaccaggaatgaccaaacgtcagagaagaaataccttccgaggtgcaccacagttgacagagcatcttttagctaatggaggtagagtgtctgatagtgaagattcagatcaagtctccccagatgatgaagatgagatggaacgtaaggcatgctctcgttgtggagaaatcggtcatgttgccagctcgtgtgccactacatgcgttcattgtgaggaagaccatccacccgacaggtgtcaaacgagcaggatcacctgtttcttctgtgaaggaactgatcatgtaccaaaagattgtcaattcagttttctgctgacgaagaagatggccaaccaacccgccagttccaacggagagaagcatcaaggcaacacaaatcctcgccaagattacagtttcagcctaactccagtgccaggacagaggaatcaaaatgagaaaagaaaatgccgagttcgggaagatatctgttgcttcaattgtcaaggaaggggtcatttcgccgacaagtgcccaaaaccgagaaacatagctgccagcacgtcagttcaagcaactcccgacaatcagaagcttgctcctcagcgaattgtcatccatgcatcccgaagcagtcctatagtccccgttgcaacagctccaactccagcgagtgcattaccacaaggtgtcaatgctcaatttcagccccagccaccagttgacaagatagaggccagtatcggcattgtacctttggatgttccagcacagcagccaagaaatcaagtacaagatgaagaacccaagccaatgggaatgagaaaagcatcaacgaaacctcgccagagctaatccaaattg

SEQ ID NO: 15057 - DNA, 430 bp, Oryza sativa
  Clone ID: TFbOSC26838j.C1.o3.np
atgcgacaatcaaatgagacaaggaaacaagagatttttcaccgaggttcggaaactcgccggtttcctactccccgttgaggcgagcccaactccaccgctcaaccacgaagccaccgcacgcccccttcgtcaaggggtgggcaagaaaactagccgttgaagtgttgttagagggccccatcggcctggccggtcagaccggcgttgagtgggcggtcagaccggcctcggctcggttagaccgccatcggctcggtctgactgactacggctccgtcggctctgtatcggccatcccgagcagcaccatctcggcctccagggggccggtctgaccgggcatgcgccgccggtcagaccggccttatgcgccggtcagaccggcccattgttacccaggcgagggaggatggtagctctcacaatc

SEQ ID NO: 15058 - DNA, 1035 bp, Oryza sativa
  Clone ID: TFbOSC400501j.C1.o2.fg
atggtgaacactcgcgccagtggaagtggaaacaataacaatgaagggaacccaactcttgctcaagttctggctcaacagactcagttaatgaacatgatgatacagcagatgcagaaccagctcaaccaagggaacaacaatgctccaccgacgcagaacaagttagctgattttcttcgtgtgaggccgcccaccttttctagcactaccaacccagtggaagcgggtgattggctgcacgctgttgagaagaagttggaactgctccagtgcacggatcaggagaaagttgttttcgcttcacatcagttgcaaggacctgcatcagaatggtgggatcatttccggatgaacagagcagaaggtcaaccaatcaattgggaagagtttaccgaaggattcaagaagacacacatacctgtaggagttgttactttgaagaaacgtgagttcagggcattgaagcaaaaggatcgtaccgtggcagagtatcttcatgagttcaaccgtctggcacgttatgctccagaagatgtgcgtactgacgaggaaaggcaggagaagttcttggaaggcttaaaggatgaactgccagttacgttaatctcccatgactatgttgattttcagcagctggttgacaaagaggcacaaggtagtagccagagacagcgtatcaagccactccaaattagtgaacctttttccgctggtcaaggacagtcgcaacagttgaacatcggtggtgagatcaaatcagagactaatgaaagcaatgaagttaacatcgagcaagctaatcagccggtgccagttcagcaggaccagtctcaggagaataacagtagtggaagggagcagcaggtatgtttcaattgttacaaggcaggccactttgcaagagagtgtccgaagccgaagcatcagcagccgcaaggtcaggtctacaacattgtcgtcacaggagccaatgcggtgccagttgtgtcttcaagtgttacaactcagccaccagtttcaaagcggcagtag

SEQ ID NO: 15059 - DNA, 1047 bp, Oryza sativa
  Clone ID: TFbOSC400817j.C1.o15.fg
atggagtttaccacggagcaagagaaagcaatacacctcaatgcacaagccgccaatgccattctctctgccttgagtccggaagagttcaacaaagttgatggacttgaggaagccatggaaatttgggatactttgcaattggctcatgagggttcacccgccgtgcgtgagtccaagattgagttgttggagggaagagttggacggttcgtcatggatgacaaggagacccctcaagaaatgtatgataggatgatgctccttgtcaacaagattagaggacttgggagtgaagatatgacaaatcattttgttaagagactccttcgtgtctttgttccaagaaatcccatacttgtgtcaatgatccgtgagagaaaggactacaagaggctttctccaagtgatatacttggacggatcgtgtcaaatgagatgcttgaagaagaagctcgtgaattgaagcaaatggtcaagaatgccgccatgatcaagaaccaagagataggtttgaaggccaatcaagaagaagattcaagtggtggtgaagaaagtgaagatgaggagatggccctaatcgtcaatagattcaagcacttccttcgcaagagtggatatgggaaaggaagaaaggaagatgacaagggcaagaggcaatccaagcgagcatgcttcaaatgtggcgagtatggccattttatcgcggattgccccaagaccaatgaagcaaagcacaaggtggtcaagaagaagcctgatcgtgctcatgttgcggaggcacacatggcggaagtgtggtactccggagatgaaggctctcccaaggctatggagaagggagatggagatggtggcgtggctactgtcgccatcaagtcctcatcaacaaaggagcgcctcttcaacatcttgagtgacgacgacaacgactcctaccaccactcgtgcttcatggaccatgggcgcaaggtaatgcctatccaaaagccctctcttgatgatgataacactagtgatgaggatagtgacaatgaacttgattag

SEQ ID NO: 15060 - DNA, 2763 bp, Oryza sativa
  Clone ID: TFbOSC401828j.C1.o30.fg
atgtcggctccaacgccacgtgtgtcgcggtcccgtgaaccgcaccagcgacgtatctcccgttcacctccacaccgtcgtggtcgccggcggcctggcgaagaccgtgaacttattccggtccagcgtgtggtgaaggaggtgggcggctcagccaactatccactgctgacgaagactaactacggagattgggctctcatgatgaaggtcatgctgcaagcgcgcggcctgtgggatgccgttgagcatggtgacgccgatttccaggcggatcgaatggcgatggaggccatactccgggcggtgccgccggagatgttagcttcactcgccgtcaagccctcggccaaggaggcgtgggacgcgatcaagatgatgcgagttggcgtcgatcgtgtctgcaagtcgaaggcgcaaatgctgcagaagcagtatgatgcgatggagttcaaggacggggagaccgtcgaggaattctcgttgcgcctcaacggactcgtcaccaacctcgccacgcttggagtccatcttgaagaaggaaaggtggttgaaaaattccttaactctgttccagatcatctctcgcagatcgctttgtccattgagacgttgcttgacctcgatgagctcacgctcgaggaggtcaccggccggctccgaaacgctgaggagaagctgcctgccaagagctctgctgccggtgggaaactgtttctcactgaggagcagtggactgcccggtggaaggagaaacaggccgcggaaagttcctctgggaaggcgaagtccggcggtggcaaccgtcgtcggcgtggtggcaagaagaaagctgaagctgctgcgcacgatggagatcgtgccgggggcgacacgcaggaagggcgggaaccaaaccgcgacaagtgccgcaattgcggccgcacggggcactgggctaaggactgccggaagcccaagcggcctgccgaggcccaccaggccctggcggatgaggacgatgacgagtcggccctcctcatggcccatgtcgtcgacgctgctcctgtgtctgcgtcgtcttcatctgcgccacctgcttcttcgccgccatcgcagcctgacaagacgatcgagctcgtcgagccaaaggtgttcgcgcaccttctcacggagaaacaaaccaacggcggcgtctggcatctcgacaccggagccacaaaccacatgacgggcattcgcgaagttttcgctgagctcgacctgtctatgcggggctcggtgcgattcggcgacggctccgtcgtcggaattgagggtcgtggcaagatcatttttgagtgcaggaatcaggagcaccgagcgttgacgggggtgtattacatccctaaactcaacgccaacttgataagtttgggccagctcgatgaaaatgggtgcgacgtccgtatctaccacggtgtttgcacgatacgggacccagcggcccagctgctcgcacgcgttcggcggacgcggaatcgcctgtacttgatcaagctcaccatcgggcaaccggtgtgcctcgcggccaaggcgcaggagtgcgcctggctgtggcatgcgcgctacggccacctccacttcgacgctctgcgacgactggcgagccgcgacatggtgcgcggcatgcccgacatcgatcatgtcaagcagctgtgcgacagctgcgtcatatctaagcagcgacgcaccccgtttccacgccgctccatgtttcgtgctgaggatcgccttgagctggtgcatggcgatctgtgtggtcccatctcgccggcaacccctggaggcaaaactcatttcctcctgcttgttgatgatgcgagcaggtacatgtggatcactctgctgggacgcaagagcgaggcggctgatgccatcaagcgctttcaggcgcgagccgaggcggaatccaagcagaaattgcgcatcctccgcaccgacaacggtggcgagttcacctcggtggaattcgccacctactgcgccgaacagggagtctcacgccacttctccgcgccctactcgccccaacagaatggcgtggtggagcgccgcaaccaaaccatccttgggatggctcgcagcttgttgaaagccaagaacatgccggcacgctattggggggaggctgtcacgacagcagtttttctgctcaatcgcgcgccgacaaagagcttggccaacatgacaccttatgaggcgtggcatgggaagaagccggcggtgggttacctgcgcacgttcgggtgcctggcctatgtcaaggacgtgcggcctcacctccccaagctctctgaccgcagcaagccgatggttctcatcggatacgccgacggagccaaggcgtacgaggtgttcgatccggtgtctggacgagtgcaggtctcgcgcgacgtgattttcgacgagggcgctgggtgggactgggatgcggcgggcgctgcagccgtccccggcggcggaggttgctcagacttcaccgtcgagtacctgacaacggccacatcactgtcgccttcgacctcggctccatcatctgcatcttcgggcgcttccgcgtcaagggcagtcacgccgtcgtccgcctcgacacccgccaccttggcatcggcctcaacgcccgctacaccgacattcgtctcaccgccaccaggcatcgacgagaacctggacgcggagcaggatgattgtccactgcgttatcgcagtatgggtgatctactgggcgacgcacgatattag

SEQ ID NO: 15061 - DNA, 2123 bp, Oryza sativa
  Clone ID: TFbOSC401861j.C1.o3.np
atgtcgcacttagagggagataaagagttggatgaaaatggtgatggatcaactagcaagggaacgtctacacctaagggagcctctatttcttttgattacaacaaacttaccattccctctcataactttgtctccgtgccttccctgcgttctcctcaatttgatgggacatattacgccgcttggaagcacaagatgaagttgcgtacatctaatctctttgcaccctagcatttggaaagttgtgtgcacatgtgttgatgttccaaatgaagacatggagtttaccacggagcaagagaaagcaatacacctcaatgcacaagccgccaatgccattctctctgccttgagtccggaagagttcaacaaagttgatggacttgaggaagccatggaaatttgggatactttgcaattggctcatgagggttcacccgccgtgcgtgagtccaagattgagttgttggagggaagagttggacggttcgtcatggatgacaaggagacccctcaagaaatgtatgataggatgatgctccttgtcaacaagattagaggacttgggagtgaagatatgacaaatcattttgttaagagactccttcgtgtctttgttccaagaaatcccatacttgtgtcaatgatccgtgagagaaaggactacaagaggctttctccaagtgatatacttggacggatcgtgtcaaatgagatgcttgaagaagaagctcgtgaattgaagcaaatggtcaagaatgccgccatgatcaagaaccaagagataggtttgaaggccaatcaagaagaaatggccctaatcgtcaatagattcaagcacttccttcgcaagagtggatatgggaaaggaagaaaggaagatgacaagggcaagaggcaatccaagcgagcatgcttcaaatgtggcgagtatggccattttatcgcggattgccccaagaccaatgaagcaaagcacaaggtggtcaagaagaagcctgatcgtgctcatgttgcggaggcacacatggcggaagtgtggtactccggagatgaaggctctcccaaggctatggagaagggagatggagatggtggcgtggctactgtcgccatcaagtcctcatcaacaaaggagcgcctcttcaacatcttgagtgacgacgacaacgactcctaccaccactcgtgcttcatggaccatgggcgcaaggtaatgcctatccaaaagccctctcttgatgatgataacactagtgatgaggatagtgacaatgaacttgattagatgtttaagaattttagcaaaccggccatgaaacaattgtcaaaattaatgaaagctttggatagtaaagagagatttcttgagaggcaagaagacttgcttattctagaaaagaaaaaaaaaccttgccttagaagaagatctagctaaggagggtgagaggattgaattactacaatatgagatttctttgcttaatgattccatggctagtttgacgagtgtgaacgaaactcttcaagaggaacttgtggttttggataaaaaaccatataaatcttgaagtggaaattgacactcttcggaatagcgcatcctctctaaatgaaactcctatgacacctatgccttctattagtgttggttgtgctagatgctataattatgatttgagttcatatgctactaaccttgaagctatggaggcccttgaaaagaaaaatgagaggttaggtactttggtaaagtatggatgcatgaagacataccactccaaagacgctctctacaagaccattgctacaaatccaaacaaagatggacatgagcttggtttttctgatgaaagtcctgtgtccaaacgtgttgtggtgaatgggaagattttcttgatgtttgtaagagaaggaaaggctccacaagaaagtgaggtgactctaccctttgttggtcagagacccggagcttccggacaaaatgtccagaacttcctggcacctgtcaggatcatcgtcctcctcgcgccgggcttagctgggccatggccttcggccggcccagcaagggcacgggagggagaaggaaatgggccggcggcccattagggaaaaaa

SEQ ID NO: 15062 - DNA, 975 bp, Oryza sativa
  Clone ID: TFbOSC900065j.C1.o2.fg
atggtgaacactcgcgccagtggaagtggaaacaataacaatgaagggaacccaactcttgctcaagttctggctcaacagactcagttaatgaacatgatgatacagcagatgcagaaccagctcaaccaagggaacaacaatgctccaccgacgcagaacaagttagctgattttcttcgtgtgaggccgcccaccttttctagcactaccaacccagtggaagcgggtgattggctgcacgctgttgagaagaagttggaactgctccagtgcacggatcaggagaaagttgttttcgcttcacatcagttgcaaggacctgcatcagaatggtgggatcatttccggatgaacagagcagaaggagttgttactttgaagaaacgtgagttcagggcattgaagcaaaaggatcgtaccgtggcagagtatcttcatgagttcaaccgtctggcacgttatgctccagaagatgtgcgtactgacgaggaaaggcaggagaagttcttggaaggcttaaaggatgaactgccagttacgttaatctcccatgactatgttgattttcagcagctggttgacaaagaggcacaaggtagtagccagagacagcgtatcaagccactccaaattagtgaacctttttccgctggtcaaggacagtcgcaacagttgaacatcggtggtgagatcaaatcagagactaatgaaagcaatgaagttaacatcgagcaagctaatcagccggtgccagttcagcaggaccagtctcaggagaataacagtagtggaagggagcagcaggtatgtttcaattgttacaaggcaggccactttgcaagagagtgtccgaagccgaagcatcagcagccgcaaggtcaggtctacaacattgtcgtcacaggagccaatgcggtgccagttgtgtcttcaagtgttacaactcagccaccagtttcaaagcggcagtag

SEQ ID NO: 15063 - DNA, 4641 bp, Oryza sativa
  Clone ID: TFbOSC401393j.C1.o1.fg
gaacatgctagacagggtcgacgtccactacctgaacatcatgagtatgatgcggaggatgagagtctaggcttgtgttctgatgaaggtgatcatcatcgtcgtcctcgacatcctcctcgccgaggtcctgcttttatggatagggttgttgatgatattcaccgtgacaatcggaatcgtcgtgctgctcgtgttccgttggatgaagggcttgatccggaggattatttgcagtgggagatgcgttgtgatcagatctttaatagtcacaactatttagaggataagaaggcacgtcttgcatctattgaattcactggttatgctttatcttggtggaatcaattgcaactcaaacaaggtgatcttagtgtggatgcttattataaggagatggaattgttaatgagccatacaggggtaacagagaatgatgaagctactatcgctagatttcttactggtctcaacgatgatgtgaaagaacgtgttgagatatcatattattatgatatacaaaatatggtgcacattgctcaaagggtggagcagcaactaacaagtcgccacactagccgttcatgttcttttcagcgagatggtgatggaagtgccgctagtaagtcgatgtctttcaagctgactactccttctagagatgggtctaaacctgctgctagttcggtgagtaaatccaaatctaaagttgaatctactgctacatctagttctaaatcacgaagtgtacagtgttatacttgtggagggagaggacattatatgagagattgtcctaatcagaagaaggtgttgatgactaaagaaggctatgtttctgagagtatattagaaaattcagaaggtgtacaacttgatcatactcttactacgggctatcgagatattgatgattcatctatggatgatggtgctgaaaagaataatggtttatctatgcttgcatatgcagttcagcgagatggctctaatgttgatgcaaaggggcagcgctgtaatatttttcagtcagagtgcaaaattcaagagaagttgttgttggggaggccatggcagtttgatcgtaatgctacccatgagggcagatccaactgttattcttgggctaatggacaagccgagtctagtaataagacattgttaaagttagtcaaaaagaagattgaggaagacccaaataagtggcatgaagtgctttctgaagcattgtgggcacataggatatctaaacatggtaccactaaagtcactccttctgagctagtgtatggtcaagaagccgttttaccggttgaggctttggaagagatagagaaagagaagaagagggtggccaaagcatacaacaaaagagtgaaagcaaagttgtttcaagtgggagacttggttcggaagacaattttgcctttgggtactcgatccagggagttcggtgttgcgatcgtgcttgtcgacttgtcaaaaaagttaccaacagtatgcattgctgcaaactgcccaacatcatttggtatggcttcttggatcaattccgcatggcttcttgatgttgtttgcaccaaaaactttgaaagtccacttgacaagcttgggtttaaggaggatgctgctttggtcaagagatcatggcagcctgcaccatccagttttaacttgcggtctattcttgagaaagagaagttgactggaacaaacttcatggattggaccaagcaagagctgagaggtttaatacctcaaagtccttgtttgcgtgcaagcttgcagaagtcgctccctcccagctttgagccgttcataatgaatttcaacatgaacaacctgaacaagaccttggcagaattgcatgaaatgcaaaagactgccgaggaaagcattaagaaaaactccaaccatgtgatggttatgcataagcgcaagcccaacaacaagaaaagtggtcaaaaaagaaagctaaactatgatgggatcacgagtactagcaactctaagaccaaggttcaaaagacagggcccgctaaggatgcagagtgcttcttttgcaagaagacaggtcattggaagagaaactgcaagaaatacctagagcagctcaagcagaagcagcaggatggaaagagttccacctcagctttgtgtaagaacgttatctctgcttcttgtctgcaagcagagggttatggttttagatctgtggacaatggttgttcagtctattataatgacattttctatttccatgcacccatgatgagtggcttatatattgtgaatcttgatggatgttcaatctataacattaatgcaaaaaggcaaggtcctaatgatttgaatcccacttttatatggcattgtcgcttgggtcatataaatgagaaacgcatggagaagcttcatagagatggacttctacactcgttagattttgaatcatttgagacatgtgaatcttgtttacttggcaaaatgacaaaggcacctttcacgggtcaaagtgaaaggacaagtgaactattggtactagtacatactgatgtatgtggaccaatgagctcaactgccagatgtggttttgggtactttattacctttaccgatgactttagtagatatggttatgtctacttaatgaggcataagtctgagtcctttgaaaagttcaaggaatttcagaatgagctttggggttacgctctagagacagctgcgttcacactaacaagggttccatcaaaatcagtggataagacaccatatgagatatggacagggaagcgtcccagcttgtctttcctaaagatttggggctgtgaggtctatgtaaaacgtttgcaatcggacaaactcacacctaaatcaaataaatgcttctttgtggggtatcctaaggaaacgaaaggatattatttatataatcgggaagaaggcaaagtgtttgtcgcccgacacggtgttttcttgaaaaaagagtttatttcaagaaaggatagtgggagcatagtgcgacttgaagaaattcaggaaacaccggaaaatgcttcaacgtccacacaaccacaacaagctgagcaagatgttgttcaacaggttgaacaagttgttgttgaaccagttgtggaagcaccggcttcacgaaggtccgaaaggatacggcgtacacctgcgaggtatgcgttgttaactataggacaacgtgatatattgttgttagacaacgatgaacctactacctacgaggaagcaatggtgggaccagactctgagaaatggcctggagccatgaaatccgaaatagaatccatgcatgtcaatcaagtttggaacttggttgatccacctgatggtgtaaaagccattgagtgcaaatgggtctttaagaaaaagacatatgtagatggaaatgttcacatctacaaggcacgattggtggcgaaaggtttcagacaaattcaaggtgttgattatgatgaaactttttcgccagtcgccatgctaaaatctattcagattgttttagcgattgctgcctatttcgactatgagatatggcaaatggatgtcaaaacagctttcctcaacggaaatctcgatgaggataaatccatttatgggttgaagcaagcatctcggagttggaatattcgttttgacgaagtagtcaaggcgttgggctttgtcaaaaatgaagaagagccttgtgtatacaagaagattagtgggagcgcactggtgtttctaatcctatatgtagatgacatattattgattgggaacgatattcctatgcttgaatccgttaagacatcgttgaaaaatagtttttcaatgaaggacttaggagaagcagcatatattatgggcataaggatctatagagatagatcaaagaggctaattggattaagccagagtacatacattgacaaggtgttgaagaggttcaacatgcaagattctaagaaaggcttcttaccgatgtcacatggcattaatcatggcaagaatcagtgtcctcaaacgactgatgagcgaaacaagatgagtgtgattccatatgcctgggcaatcggatccattatgtatgctatgctatgtacacgtatagatgtttcatatgcacttagtgcaacaagccgataccaatcagatccaggtgagagtcactggatagctgtaaagaatatccttaagtacttgagaagaactaaggatatgttcctagtctatggaggacaggaagagctcgtggtaaatggttacattgacgcaagctttcaaaccgacaaagatgattttagattgcagtctggatttgtgttctgcctgaatggacgcgctgtgagttggaaaagtgtgatgactagtgcttctagccctatgaacctctattgcgataatagtggtgccattgtgcaagccaaggagcatagatcgcatcaaaagtccaaacacattttacggcggtatcacctcattcacgagatagtgggtagaggagatgtgaagatatgcaaaatacatacggatttgaatgttgcagatctattgacaaagccactccctcagcctaaacatgaggcacacactagggcaatgggtataagatacgttcatgattga

SEQ ID NO: 15064 - DNA, 1461 bp, Oryza sativa
  Clone ID: TFbOSC18140j.C1.o1.fg
atggctgacaatgagaaaggcaataaggtcagaagtcaggacattggtacctcaagctcccgagtgaatgaagcaccagacaccagttgtgtggcagtggtccaacacctgattaaccagaacaaattgcttatagagatactacagcagcatcggatgccaattttgaacccgagtcagatgcaacctcaagtgcagttggaggcagtccaagcactcacaccacaagtcagcgcaccgccaacatcccagaaggcccctcatgccatgccgcatgttgacccaaaagaagcaagtatcatctgttttatgtgtgatgagcaagggcactacgcaaggaactgtcctcagcagaaaagaaaagcaccaatgcgaatcgaagatgaagtccgtaagatgatcattaccagcacagaatggcctccaccaggaatgacaaaacatcagagaagaaattccttccgaggtgcacaacagttgacagagcatcttttagctaatggaggtagagtgtctgatagcgaagattccgatcaagtctcctcagatgatgaagatgagaagtctccccaaggttttaaccagaataaaatggaacgtaaggcatgctctcgttgtggagaaatcggtcatgttgccagctcgtgtgccactacctgctttcattgtgaggaagaccgtccacccggtgaatgccccatgagcaggatcacttgtttcttttgtgaaggaactgatcatgtaccaaaagattgtcaattcagttttctgctgacgaagaagatggccaaccaacccaccagttccaacggagagaagcatcaaggcaacacaaatccccgccaagattaccgtttcagcctaactccagtgccaggacagaggaatcgaaatgagaaaagaaaatgccgagtccgggaagacatctgttgcttcaattgtcaaggaatgggtcatttcgccgacaagtgcccaaaaccgagaaacatagctgccagcacgtcagtccacgcaactccctgcaatcagaagcttgctcctcagcgaattgtcatccatgcatcccaaagcagtcctatagcccgcgttgcaacagctccaactccagcgagtgcattaccacaaggtgtcaatgctcaatttcagccccagccatcagttgacaagacagaggccagtatcggcattgtacctttggatgttccagcacagcagccaagaaatcaagtacaggatgaagaacccaagcagaaacatgagataatgaatgagcttgataagtttattgagggatccatgttagggttgcaagtgctttctggaactgaagccccatcttcaagtgccgcaacccagtcgaagtcagctaaaggttcaaccagggacaagtcaggtgaagagaagattccatttgcaacaggagatcgagccaagcagttcggagtggagaagttgtcctag

SEQ ID NO: 15065 - DNA, 2146 bp, Oryza sativa
  Clone ID: TFbOSC7923j.C1.o2.np
ccctagcgccgccgccgccgcgaatcccgccgctcccgtccaccccgcgtgcaatcaagaggggggaattaatccccgcgttcccctcccccgtttccccctctttcccctctctctctccctcggattcgttcgaatcaagcccgtaatcatcgccggcgcaatcaatggcggccgaaatctccgcggccggtttccttcctccccggccgccttctctcccttccgacgctataaaaacgttgcccgagctccgctctttcgtttccgccgctcgccgctcactctcgccgtcgaaatcgtgctcgcgccgtgctcctccctctccgccatcgccgccgagctccgttccgccgccgccgccgctccggacttcctcctactcggcgacccctccgtccgcttcgccgcgacgccgtcgatcccgtccgccgctccgcttcgcccgtcgaccgccggagcaccgtcgtcatcgtcatcccgagccgcgccgccgtcttcctccgctccgtccgccgtttccaccgccttcgccgtcttggggtgagccgtggaccgctccgttcgtttcccccttccctcctctctcttgggtgccgctccgccgcgccgttggtcgccggcggcgaccatcggggcgcgggcgcgctcctcccgtcggccgcgccggcgaggccgccctcgggcgcgccctcgcggctgccaagtgggcccggccgtcagccgcccgcgcccgcgggtgcggctgacgcgcgggacccacggcgccgaccgccgccagccgcgtgcgcccggtccaccgtggaccgagcggctgacgcgtgggccccacttcccgtggacccgggcaaatgaaggctacacgagctgcggcccgatggctgacaatgagaagggcaataaggtcagaagtcaggacattggtacctcaagctcccgagtgaatgaagcaccagacaccagttgtgtagcagtggtccaacacctgattaaccagaacaaattgcttatagagatactacagcagcatcggatgccaattttgaacccgagtcggatgcaacctcaagtacagttggaggcagtccaagcactcacaccacaagtcagcgcaccgccaacatcccagaaggcccctcatgccatgccacatgttgacccaaaagaagcaagtatcatctgttttatgtgtgatgagcaagggcactacgcaaggaactgtcctcagcagaaaagaaaagcaccaatgcgaaccgaagatgaagtccgtaagatgatcattaccagcacagaatggcctccaccaggaatgaccagacgtcagagaagaaataccttccgaggtgcaccacagttgacagaacatcttttagctaatggaggtagagtgtctgatagtgaagattcagatcaagtctcctcagatgatgaagatgaaatggaacgtaaggcatgctctcgttgtggagaaatcggtcatgtcgccagctcatgtgccactatatgcgttcattgcgaggaagaccatccacccgacaggtgtccaacgagcaggatcacttgtttcttttgtgaaggaactgatcatgtaccaaaagattgtcaattcagttttctgctgacgaagaagatggctaaccaacccgccagttccaacggagagaagcatcaaggcaacaccaatcctcgccaagattacagttccagcctaactccagtgccaggacagaggaatcgaaatgagaaaagaaaatgccgagtccgggaagacatctgttgcttcaattgtcaaggaatgggtcatttcgccgacaagtgcccaaaaccgagaaacatagctgccggcacgacagtccacgcaactccctgcaatcagaagcttgctcctcaacgaattgtcatccatgcatcccgaagcagtcctatagcccgcgttgcaacagctccaattccaatgaatgcactaccacaaggtgtcaatgctcaatttcagccccagcaaagaattgtcgtagatggaagaagttgtgtctctccccgacctactccaggccgagccaagggcaatcaacctccggagggcgatacccagcagaagaccgtcatccgcttcaaccagcaatcagaaggaagcttctcctgtgaa

SEQ ID NO: 15066 - DNA, 1404 bp, Oryza sativa
  Clone ID: TFbOSC400948j.C1.o2.fg
atggctgacaatgagaaaggcaataaggtcagaagtcaggatattggtacctcaagctcccgagtgaatgaagcaccagacaccagtcgtgtgacactggtccaacacctgattaaccagaaccgattgcttatagagatactacagcagcatcagacgccaatgctgaacctgaatcaaatacaacctcaagtgcagttggaggcagtccaagcactcaccccacaagtcagcatgccgccagcatcccgaaggacccatgatgacgtgccacctgttgacccaaaagaagcaagtaacatttgctttacgtgtgatgagcaagtgcactatgcaagggagcgtcctcagcagaaaagaaaaacaccaatgcgaaccgaagatgaagtccgtaagatgatcattaccagcacagaatggcctccaccaggaatgacaagacgtcagagaagaaataccttccgaggtgcaccacagttgacagagcatcttttagctaatggaggtagagtatctgatagtgaagattcagatcaagtctcctcagatgatgaagatgaaatggaacgtaaggcatgctctcgttgtggagaaatcggtcatgtcgccagctcgtgtgccactatatgcgttcattgcgaggaagaccatccacccgacaggtgtccaacgagcaggatcacttgtttcttttgtgaaggaactgatcatgtaccaaaagattgtcaattcagttttctgctgacgaagaagatggctaaccaacccgccagttccaacggagagaagcatcaaggcaacaccaatcctcgccaagattacagtttcagcctaactccagtgccaggacagaggaatcgaaatgagaaaagaaaatgccgagtccgggaagacatctgttgcttcaattgtcaaggaatgggtcatttcgccgacaagtgcccaaaaccgagaaacatagctgccggcacgtcagtccacgcaactccctgcaatcagaagcttgctcctcaacgaattgtcatccatgcatcccgaagcagtcctatagcccgcgttgcaacagctccaattccaatgaatgcactaccacaaggtgtcaatgctcaatttcagccccagccaccagctgacaagacagaggccagtatctgcgttgtacctttggaaattccaatacagcagctgagaaatcaagtacaagatgaagaacccgagtgtaagaaagttattgtttgttacaactgcagtgaagaagggcattactccgaaaactgtccccaaccaaggcaaaatcgacctccacattaccgccaatttacacgaagcagacattccaatcgtattgtggtcactggagcaaacgccgtacccgtaaggcctcgtgataatcagaacccatag

SEQ ID NO: 15067 - DNA, 1199 bp, Oryza sativa
  Clone ID: TFbOSC1772j.C1.o2.np
tgccagcgatctagagatggcaagacaaccaaccaaacaatggcacctcagtcacctcacggctttcctctgacagatgccaagagctgtggtacaaaaggattttggacccatcaagtgacttcatcttgacatggaaccacattttccttttttcgtgcttcgttgctctatttatagaccctctgtacttctacgtgccaaaaatctcctatggcaccccaaattcgtgtattgggacagacaggcatttagccatcactgttacattcttccgatcaatctctgatttactatatttcactcacattataataaagtttagaccggcatatattaatccgagctcaaccatgagggtatttggaagaggagaccttatcacggatccaaaggaaattgcgtggcaatatttgagatctgacttcgtagtcgatgcagtggctgcattgcctttaccacagatcttaatctggtttgtgataccagctattaagtattccactgatgagcataacaacaatattctggtgctgatagttcttgctcagtattttccaagactatacctcatattccccttgacttatgaaattgtcaaaactactggagttgtcgcaaagactgcttggcaaggggctggatacaaaatgttgctttacatgatagccagtcatccattcatcttctttcaggtactaggtgctctatggtatttgctatctgtcgatcgccaaactgcctgctggaagagcaattgcaagaatgaaactggctgtgatattaaatttctagattgtgatgtgataccaaatcaaaactgggcaagcaaaactgctatcttcaatacctgtgacgcaactaacacttcaatcagttttgattatggcatgtttcagcctgcattgtttaatcaagccccagggcaacgtttcttgatgaagtatttctattccctttggtggggtttgcagaatctgagttgctatggccagactattactgtgagtacctatattggtgagactctatactgtatattcttggcagtacttggtctcgtcttgtttgcacatttgattggaaatgtacagacctacttgcaatctatcactgtgaggggtgaggaatggagattaaaacaaagagatacagaggagtggatgaggcatcgtcaactcccacatgaactacgagaa

SEQ ID NO: 15068 - DNA, 3342 bp, Oryza sativa
  Clone ID: TFbOSC19101j.C1.o1.fg
atgtcgcctttctctggagcatcgctggctaggtctctaagcccagacactcacccccgtcaccataggcttcgcccttctccaaatccaccgcttcttcccctacccccagatccaccagcttccctagcctctccaaccctcgagttcttccctcctgttggtccttcccgtcagccccctactcttcctagcctgggcgtccctgcttcagatccagctttcgtcagcagaagatatcgggttccggggacgggctgccctttccggtctgcggtatcctcgccagatctgcagaatccgatgctggattcgagttctgctccaaatcctcgcctgtcttctcgatgtcaaggttcgccgaaaggtgaactgccgggattcaagcgtctttactccgatgtagttactgctcctcctcaacctccagctgccaagtcttcagatttcattgcagtgcagcctccctcaagattttcaggggcagtagcaaaggacataaggatcctgcagagtggacgtctgctcgatttgtctacccaaaatctctctgcatcagcgcaaggtacaggagacattcaagttggagagaatccttggaaagaggtcaaaggaaaacgcaggtggagaaaccactccgcattcactacaccaaacaacctggagcaaatgcattcaagaaaagcaagatttcttcaacacatggaaggcaagtgtttccgttgtttgagtacaaagcataagatcgtcgactgcagggagccgtttcgatgttggcgctgcttaaaatttggtcatctggcttccagctgtagcaagaagtttgcctataagtccaccttgcctcctctgaagactcacactgaagcttttcctgctcttgctcctctttgttttcccccacgatcgtttccatcccctcccaagtccccgatcatggacgacctcacagctcgtcccctcctcgactcggtggtgatctcggccacaggggagatcgagaggaaccgggaacgcttctcggcccattccttggtggcatggcaagtgggtgcccaagaaggaagggtcgagctcaacacgtttgcagatgacgtcccctcagccttcaacatcagaagagctgacatccaattcaccaagttccacccagaagacttcttcatcacttgctccaaccaggcggctaaggtgataggccggaagtgctccattcactatgttgaagagtactctcgccgccgcaactacaaccggaccttcgatttgtggatttggacggatgagccgagagctatcccgcgtggaggtaccttcgctattacctctgctgatgaagaaggactggccacagacattcctctgccagaccttgaaccactccgcaacccgccgccgtctgagccgaagaaagggtggacatacaatgtcttggttcatgttgacaccttggaagatctcctctctcgcaaagctcgagcttacaagtgggattatgatgttcaagacgatggcactctctacaaagaatatccactgccctgcagggcagaacctgacccaacaagaggaccggcagatgatgatgaagacaaggacagagacaatcattccaggagtcgccacaggagccgctcgctgtgggaccggttgaggaggcgatcttcaagccgcagtagggagccggacagaagagacggccactgccaagacaatgaaaacagggggcgtccgcgcaaccgggaacgctccgagcatagaagcagaagctgtcgttctcgtgatcctagcgaggggagcgaggaggttcttaccctcctggagagccatctcgaccctatgcttcatgaggcaaccgtacagcactccatctattcgccagacacatcctctccgcgtgctgtttcccctgtttttgtgccttcttttgcagtacagggaacctcgcaagaggagttggcggcaacccaggcaagccctgtccaggagttcattgctgctctgtcaacaccagtgcagccgcctctcctgcctgctccggaaacacaagctcgccgtccgggaagagcaaaggtgacaatcccggcgctttcttcagctcagcgtcacagcgaacgcctgcttcgcaagcgacgagcaggggcaaagcttgaatcttttgctcaggaaatcctatctaaaaattttggtataatggacgaaagatcttcctttgatcataacatcaaaaagatttatttgcagcgctacaagaagcctctgtctccagcgtccctgaagacaattgcagaattggtggagaagggaggctgcaaaagcattcgcctgaaggcttccaagaaggcgacggtggcgcccctaggtttaaattccaaagcaaagcaggattctgtgagatgtattttacaacagcatggtgcaaccatcgtatgtctacaggaaactaagttgtcttctatcagtgatcgcattattctcaatactctgggccagagatttcttcggcactgtgtttctctaccggccaccggcacaaggggtggcgttctgcttgcttgtgatgagaattacttctccatttcagatgtactccttggcacctactctgtatctgcagtgttaacaatgaggggagaggggcttcaatggtctatcacggtggtttataggccacagttagagccagataaaatcaattttctttctgaacttgaagctctgcagacctctatgaaatctgcttggctcattattggagatttcaacctaatatataaagcttcagacaagaacaacgaccgacataatagaaggatgatgcaacgttttcgtggcctcattgacaaattgcaggtgaaagaactgtacctcccagggcgtaggtttagctgggcgggagagggcataaacccaactcaaacaaaaattgatcgcgcctttgttacaactgattgggacatgatgtttgactgctcgaatctttaccctctgtcatccgcatgctctgatcatgctccccttcttctggttggaaatgagaaaatgaatagatttccaagtttcagatttgaagctttttggctgaaaattcctggctttcttgacattgtgacagattcctggacaaatccaatcttgtcaaccaacagattagccatcatccgtttaaagctccggcgtctagctcaagatctcaaaagatggagtcgcaatcacgtgggtgacatcaagctgcaactcgctgttgcaacagaagtgatctttcaattagaggattggctgatggagagcgggctttattgtcaaaccttaaaaatagaattcttgctctgtcagtgttaa

SEQ ID NO: 15069 - DNA, 525 bp, Oryza sativa
  Clone ID: TFbOSC900378j.C1.o23.fg
atggcccgcttgtatgttggcaacttggatccccgagtgacttccggggaacttgaagatgagtttcgtgtgtttggagttctgcgaagtgtctgggttgcccgtaaaccacctggttttgcatttatcgattttgatgacaagagggatgctgaggatgcactccgtgatttagatggcaagaatggatggagagttgagctctcacggaactcaagtagccgcggaggtcgtgatcgacatggtgggtctgagatgaagtgctatgagtgtggtgaaactgggcactttgctcgtgaatgtcgtttgcgtattggtcctggaggtctgggtagtggaaagcgtcgtagcaggagtcgcagccgcagtcgcagccctcaataccgcaagagcccgacctatggtagaagaagctacagtcctcgtgatcgctctccaaggcgccgcagtgtttcaccagttcgtgggcgcagctacagcaggtcaccacgtggccgaggtggttctccttatgctgatgggtaa

SEQ ID NO: 15070 - DNA, 741 bp, Oryza sativa
  Clone ID: TFbOSC401508j.C1.o1.fg
atggaccaatcgacatcgaaaaacaagaattcctccaatctacaagacccccaaaatatgggaataaaccagcccatgctactctttgaagatcctccccaagcttccaggaacaaaggacgagtccaagcctcactaaagcctgaagactacaccatcaatctgaatcacctaaagcaatattcttcgaatgaaaggtgccacctgactccagcaaaacgaaggataaatgccacgtgttatagatgtggcgaggaaggacattgtgccttggattgccctaagaaaaagctaggaaatggacaagtaaggaatataccccgacacccaaaaaggaaaatgagggcaggaataccaccaaaaccgatgccacattcactctatccaaaacctatgtatcagcaatttcgtagacaaggaactacaccacattggtggaaaggaaaacgggaaagaaaagcgtcatcactaataacatatgctgaacttgatatcagtaaaatgggaatagaaatcggtgatttgcctgaagaagttgaagagctacaactatggcaacgaaagagagatggatgttgtttttcttgtggacaatttggacattatgcgataggctgtactcaagacaccaatgaagaacaagaaacactgccttcacagatcagcccggaagagcatagagttttagacccatccaaagaaattcgaagattaaggcatgtagtcgttgcggagagatag

SEQ ID NO: 15071 - DNA, 808 bp, Oryza sativa
  Clone ID: TFbOSC15242j.C1.o1.np
atgaagacatggaccaatcgacatcgaaaaaaaaacaagaattcctccaatctacaagacccccaaaatgtgggaataaaccagcccatgctaccctttgaagatcctccccaagcttccaggaacaaaggacgagttcaagcctcactaaagcctgaagactacaccatcaatctaaatcacctaaatcaataccctgcaaatggaagctgccatctgactacggcaagacggaagacaaatgtcacatctttcggttgtggtgagaaaggacattatgccaataaatgcccccaaagaaggttgagagttggaccaagaaggaatttgccttggcacccaatatgcaatataagaccaggaatattaccaacgccaatgccctgttcagggaatccaaaacttccgtatcaaccatttcctagacaaagaactacacagcattggtggaaaggagaacagaaaagaaaagcgtcatcactaataacatatgctgaacttgatctcagtaaaatgggaatagaaatcggtaatttacctgaagaagttgaagagctacaactatggcaacgaaagagagatggctgttgtttttcttgtggacaatttggacattatgcgataggctgtactcaagacaccaatgaagaacaagaaacactgccttcacagatcaacccggaagaggatagagttccagacccatccaaagaagtttcgaagattaaggcatgtagtcgttgcggagagataggacactacggtagtaattgcgttactcaatgcccctactgtgacgaagaccatc

SEQ ID NO: 15072 - DNA, 3933 bp, Oryza sativa
  Clone ID: TFbOSC402160j.C1.o18.fg
atggtcgatggcgctgagcttgaacacctcagcaccgaccgcatcagcgctgagtacgtaacggccctaagacgaggatggacggaacggcacaatgtcagcgccgaccgcattggcgctgtgtttcaggacctcagcgccatcgggtctggcgctgaggtcctacatcccttggccgagccgcgcccagcagcccggcccttctttcttcctcctcagtggctctcggctgaggcgcagcggcgccgaaccatctctctcctcccctccaaaaaatcgaaaaaatctccactaaatcgtcgcattttggaggggaaattgttggaggacatagtggcaagagatgattcttttgacctcaatcgcacactgttttatgatgaaccaaactatgaagcatttgatgatgaaggagctatgaaaagtcagtcggttaagtctttgacagttgaggaagtcatagaatctcaagggatgggggttgatgttaacatgcaaaagaagaaagcagttgatgcaaatgagggaaggaatcaggaatctgatagggtggagataaatgtggagttgcagaaggaggaagcagttgaagcgaataaggcaaggaggcttgaatctgaaggggtggaggtaaatgtggaattgcagaaggaggaagcaacagaggtgaatgaggcaaggagtcaggtagttccgatagttggaaatcatgttgatgatgataatgaagtggcagatggatcaatggggggaggtggagaagagcgtacaacggatgctcaattagcatccttggtgcggttctgttttcgagacaaaatatatactcggagggagtgtgaggagactttgttgatgaatggattgagtgttgatttgttgcaccaacattcaaaggagtatgatgacacacatgaggaggagggatatgaggttgagtatgccgtagactcagatgacgatcatctagtagccaagatgtctcaggaagaaagggaggtgtttgagaaattagttggacgcaatccagaggttgttcagttcgaggatgttagcgattatgagctagcagttgttgatggaggagtaacatacaatggcatcatcgatgcaatgggtgaggagccaaagaatggtttggaatttaaatctcttgagctattacagatatggctgcagagttactcgatcagtgtgcatcgtccattccatgtgaagcactccaacgcttctaaaaagtacacggtggcttgcatcgaagaatcatgcgaatggcaggttcgtgcaaggaagactaaggatgggaggtggagagttaccggtgtaggcaaagagcacacatgttgtagtgctgaggcttctggcaatcacttgcaactaacttctaagttcatcggtaataggttgcaaccatttgtccgagctgagccgacattgactcatgttgctatagttgaggctgtggaggccatatggcactatcgtccttcgtacggtaaagcttggcgtgcaaagcaggtggccatgaagaacatatggggagattgggatgaggcatatgttcggctcccaacgcttctaaatgctattaaggctaagaaccccacaatgcattatgttgttgagcctcacccagagaggtcgaggccagtggatggggtaatgagacgtgtatttgggcgtgccgcatggatctttcggccggcatggactctagctggcatagctacagatcccgaggatgttgaggagatgaacgagtatgacacccacactcgagcaagagcgacggtcaagtacgggcctatacgtgaccgagtgacacgtgagctgatgaggtccgtgaacgacgtgggtgttgcccttggcacacccgctgggtcagagaatgaagttgggatacttcggagcgcacttcaaaggctaaaacaacgaagtcggatgttagcggcaagacttggttgtaggtccacagacgcagttgacccacaaccaagactaatgtggacacaggccggagaaacaagtcaacaaagagctgaagaggaaggggaggaagaatatgatgaaggggaagaagaagatggacagagtgacgaagaggaagaggaacaacccgaagaaatcgggtcatctcagcttgcaggtgccccgcagccatcgcaaccttcccagggtcgcccgcaaagaaagagggcaccggtggaccggtacacaccttccactagtggccggagagctcacccggcgactcagcatccctcgggtggcaatctcagcgccaaatcggctagcactgagatggccgacctcagcgccaggttctttggcgctgagatgcggctcagaatccctcgggtggcaatctcagcgccaaatcagatggcgctgagatggccaacctcagtgccagattttccccaatgtgaactagttgaactaagcatggctaagcaatccctagtcctaactctaatcatgttagcaccccaagttgacaaagaaacaagggctgacgtcatcaaggcggggcgcggcgccggcaagcgggacccgcatggcagtgactcggggagggcggtccacggcggatcgggtccacggaccggggaggagcggcgcaccacgcggcggccacgcgacggccgaaccgatggccccgatctacccaagggtagatcggacggcggcgggagctcgcggccgatgtttaacagagaaaaaggaaagaatgtcagcgggtatgcctcaagtaactcaagttttcaactcaatccaccactggcctcaagagagttaacaagggcacacccttggtccattccgagcatgctgcttggttcacagctaccattggttggaagtcaagaccaaaatcagtatgtgtttgatcgaacatttgccacccaggtcaatgagcttccaatgccagaagaggatgtccccttttgtcatgattgtagagaacaaggacactatgccctgaattgtccatgggtatatgtcaaagaagccccttcctttggtttagcagggcagacatcgctaaaccagcctcctcacaccaagtcaagcttgcagcctagtgtgcaaagtagagagcccaatggagagaatccatggaatcccgggaaatgctttcctcctagcctttcgtatcacgtggggtcacgtactaagcaagccaaagtcaagaagagtaagaatcagaagagaaaagcaccgatgcgaactgaagaagaagtacgtaagatgactattaccagcaccgaatggcctccagcagggataactattcctagacgtcaaagaggaaatacctttcgaggtgcccgacagttgacccagcaccttctaagccatggtggcagagtatctgatagtgaagggtcagatcaagtctcctcggatgatgaagatgagtctccccgacatgtcggcgaggaagagatggaatcaaaggcatgcacccgttgcggagaaattggacacattgctagcatgtgtctcacactctgccctcattgtgaagaagaccatccaccaggggagtgtcccacccgcaaggtcacatgttttctgtgcgaaggtacaaaccatgtgcccaaggattgccaacttagtgtgttgttgaccaagaccgcagaaatccaacgaacaactctacggttgtctcatcagctagtcagctccaacagcaacatcgacgatatcatccacaacaccaatgctcctcctgctgcacctgactctgcaataaatcatagcaataataccttcagcaccaaccattctctgcaccgacagcctcagcaaagaattgtcgttgatggaagaagttgtgtctctccccgacctactctaggccgagcaaagggcaatcaacctcaggagggcgatacgaagcagaagaccattatccgcttcaactag

SEQ ID NO: 15073 - DNA, 1410 bp, Oryza sativa
  Clone ID: TFbOSC419186j.C1.o1.np
atgtcatggcacagggctggtgtcctgctgctaggggctcaatcctgcctacctgtcccggaggttccggccgtaggtggggttgggtcggtactcttgtttatggctaggatgggttgggaactatgtcacgtcttccgtccgtataccgtggtgatgtttaatagagaaaaaggaaagaatgtcagcgggtatacctcaagtaactcaagttttcaactcaatccaccactggcctccagagagttaacaagggcacacccttggtccattccgagcatgctgcttagttcacagctaccattggttcgaagtcaagaccagaatcagtatgtgtttgatcgagcatttgccccccaggtcaatgagcttccaatgccagaagaggatgtccccttttgtcatgattgtagagaacaaggacactatgccctgaattgtccatgggtatatgccaaagaagccccttcctttggtttagcagtgcagacatcgctaaaccagcctcctcacaccaagtcaagcttgcagcctagtgtgcaaagtagagagcccaatggagagaatccattgaatcccgggaaatgctttcctcctagcctttcgtaccacgtggggtcacgtactaagcaagccaaaggcaagaagagtaagaatcagaagagaaaagcaccgatgcgaactgaagaagaagtacgtaagatgactattaccagcaccgaatggcctccagcagggataactattcctagacgtcaaagaggaaataccttccgaggtgcacgacagttgacccagcacctcctaagccatggcggcagagtatctgatagtgaagggtcagatcaagtctcctcggatgatgaagatgagtctccccgacatctcgacgaggaagagatggaatcaaaggcatgcacccgttgtggagaaattggacacattgctagcatgtgtctcacactctgcccttattgtgaagaagaccatccaccaggggagtgtcccacccgcaaggtcacatgttttctgtgcgaaggtacaaaccatgtgcccaaggattgccaactcagtgtgttgttgaccaagaccgcagaaatccaacgaacaaccctacgattgtctcatcagctagttagctccaacagcaacatcgacgatatcatccacagcaccaatgctcctcctgctgcacctgactctgcaataaatcatagcaataataccttcagcaccaaccattctctgcaccgacagcctcagcaaagaattgtcgtcgatggaagaagttgtgtctctccccgacctactccaggccgagcaaagggcaatcaacctcaggagggcgataccaagcagaagaccgttattcgcttcaaccagcaatcagaaggaagcttctcctgtgaa

SEQ ID NO: 15074 - DNA, 5577 bp, Oryza sativa
  Clone ID: TFbOSC400902j.C1.o24.fg
atggctaataagactctccgcgagttcgctgctccctctgctgacaatgtggccattgggccgcaggtcaacataggggacgtggatttcgacttgaagtccagcctcatcacgattgcgcaggcaaacccgttctgtggtgagcctaatgaggggtccaatgctgatctgcaacagttcctggagatctgtagcacgtacaacatcaagggcgtcaatcccgacaccgtcaggctgcgactgtttccgttctcccttctcgggagagcgaagcagtggttctatgtgatgaggacatcaacaccaacgatacatccacacttccacaattacaacttcatgttgcttgttcatcttgttcttgctggttctcgattgcttgcaggaacaaataccctcgtagttgggctgatcgtgcatccgtcgagattcacgaccacctctggagttggggtaacgattgctaaggcgcaacatccccggatagttgtagtcggatcgccaacgtcactccatccaatcgacttatccctctcatcgaaagatcgagacaccctcgagcacatcaggtggtatcagagcccaagttgctcgtttttctttgactcattacacagcccacccatagctccaccggttcgactaacacttgacagggattcagctaccaaggcatcaatacaccttctccagaggttcgtccaagtccgacggttgccatcacctcctgtttggcatgatgagaattggttagtgagggaccgcacacaagggctcgaggaggatgtttgtatcaccaatgaaaagcttggtcatgttgaacgcacgcaaattgattccaacaccaagcttaccaccttggaagcttctgttgcgacggtgaacaccagtcttgatggtattgtgtggcgtcttgatgagatggcccgagcatcccaccatggtagtgagatggatgaccatgactacgttggtgattctgaggatgatgcggaccagcgacgacatcgcttcaatcgccgtggtgtggctcatcgtcggccacgccgtgaggtacgaaataatgatgattcatttggtaagattaaattcactattcctgcttttgatggtaagtatgaccctgatgcctatctttcatgggagttagtagtagatcaaaagtttgcttgccatgatgttcctgaggataagagggttagggctgccaccagtgaatttactgattttgcttctgtttggtggtgtgaataccgtcgtactcatataaatgctttgccacctacttgggatgatttgaaacaaattatgcgtgctagatttgtaccttcatattatgcacgtgacatgttaaataagctgcagcaattgaaacatggtggtactagtgtggaagaatattaccaagcgctgcaaatgggtagaactccatggacggctcggagtggcgctgcccccaccgatcgttcatcagtttcgacatcgacatctgcaccctccaacagcaacagcaacaaagcgtggccaacaccttctacggcccgctctcgtgcttcagaggttgcagaaaagcccaccaagagtgcctcctctgttgcttccacgggtagaacaagagatgttcagtgccaccgatgcaagggctttaggcacatgcaacgtgactgccctagcaagcatgttttggtagtcaaggctgatggtgagtactcgtctgctagtgatttcgatgaagatacacttacattgcttgtagctaacaacatagctagcgaggatgagaaacacatcggggctgatgtagcggaccaatatgagagccttattgtgcaacgtgtcttgagtgcacaaatgggcaaagcggagcagaaccagcggcataacctttttcagacgaagtgtgtcgtccacaagcgttcctgctgcacaatcatcgatggggccagttgtaggaatttggtgagtacggagatggtcacgaagctagctttgcagatgaaaccacatccccacccatactacattcagtggttcaacaacagtggccgcattaaggtaacacaattggtgagattaaattttgcaattggttcttactgtgattttgttgattgtgatgtcgtacctatgcatgcttgctctttgctgttgggtaggccttggcaatatgataaagacacattgcatcatggtagaaccaatcaatactcctttatgcataatggaaagaaaattgtgttgcatcctttgactcctgaagctgtttttgagaataatgttgctagagctgagaaagagaaaaatgttgagcatgctaaaagtgaaaatcagattgtagcaaaagaacaagtgcaccataatttgaaaggttctcaatctaaccgtcgcaaggatagtgtgattaaattgaatggtccttgtttgcttaccactaaatctgatattgtcaatttggacacaagtgatattgtttgctatgctttcatttgcaaggatgctttgttttcttttgaaaatattcctctctcttttcctcctgcggtcactaaccttttgcaggagtatgaggatgtgttccccaaggacgtgccaccggggctgccaccggtgcgtggaattgagcatcaaaacgacttgatcccaggagcatcgttacccaaccgtgcgccataccaaaccaaccctgaggaaaccaaggagattcagcgtcaggttcaggacttgcttgacaaagggaacgggattgaggttgatcaagctaaggttgaggcaattcagagttggccgattcctaaaacgatctcacaggaagcacatggaggtggtttgatggggcattttggtgccaagaagatggtggacatccttgctgaagttgttcgcttgcatggtgtgtcaaatacaattgtttctgatcgtgacactaaatttcttagccatttttggagaactttgtgggctaaattggggactaagcttttgttttctactatttgtcatccccaaactgatggacaaactgaagtggtgaatagaaccttgtctactatggttagggctgttttgaagaaaaatatcaagatgtgggaagaatgcttgcctcatattgaatttgcttataatcgttccttgcattctactacaaagatgtgcccatttcagattgtgtatggtttgttgcctcgtgctcccattgatttgatgcctttgccatcttctgaaaaaatgaattttgatgctaagcttttgttttctactacttgtcatccccaaactgatggacaaactgaactggtgaatagaaccttgtctactatggttagggctgtttcgaagaaaaatatcaagatgtgggaagaatgcttgcctcatattgaatttgcttataatcgttccttgcattctactacaaagatgtgcccatttcagattgtgtatggtttgttgcctcgtgctcccattgatttgatgcctttgccatcttctgaaaaaatgaattttgatgctaagcaacatgctgagttgatgttaaaactgcatgagacaactaaagaaaacatcgagcgcatgaatgctaagtataagtttgctggtgacaaaggtagaagggaattgaattttgaacctggagatttggtttggttgcatttgcgaaaagaacggtttcctgacttgagaaaatcaaaattgacgcctagagctgatggtcgatttaaagtgttagccaaaattaatgagaatgcatataagcttgatttgcttgcagattatggggttagtctcacaattaacgttgcagatttgaagccatatttgggcgcagaagatgaacttgagtcgaggacgattcaaatgcaagaaagggaggatgatgaggacatcaacaccaacggtacatccacgcttccacaagtacaacttcatggtcctattacccgcgatcatgcacgtcaactcaactatcaggaacaatggagattatcaaatggggagaggaatcgcacgggatggattcggactgcagcacagcacaaacttctgacggccgccacgacctcatgcgaactccgatttgggcgtgcaagaacaaataccctcgtgcttgggctgatcgtgcatccgtcgagattcacgactgcctctagagttcgtgtaacgattgttaaggcgcagcatccctggatagttgtagtcggatcgccaatgtcactccgtccaatcgacttatccctctcatcgaaagatcgggacatcctcgagcacatcactatgcaaaccgtgctgctgtcaatacctaggacaaatgctctacgacattcctctcaaaattcttcccgatgggcaaaaaccaatgcccttcgtggaaggattttaagtttccagcagacaagggatgagtctattccggaagcatgggaacgactgcaggaactcaccccgatgtcccacgatcacctggacgcggaagctggaggagctttcttctctaaaacggttcaaggagctgttgatctaatagagaagatggtctccaatatgggttggagcgaggaacgacaccagacccgtcagcgaggcatgcacaccgtcaaggagacggagttacttgctgccaagctggacctcctcatgaagcgattggacgaccacgagaaatggccacaaggtaccatcaaggccttggactctcacgtcacatgtgaggtctgtggcggcacgggtcattctgggaatgactgcccggaaacccgtgaggaggcgatatacatgggcaacaacaacaacgggtatcgtccacaaggaggtcatgggtggaaccaaccacgcccatattatcaaggaggtaacaacaacggtaatttttctaaccagccctccttgagggatctcatttttgcacaagctaaaaccaccgatgcactaagcagaaaacttgcggccaatgacaaggtcctagaaaacataaatgtcaagttagatggctttgcttctgcttttcaaaatcagctgagctttaataaaatgatagaaacccagctagctcagttggcatccttagtccctgcaaatgaaactgggaggatcccggggcaaccctactcctccattgaaaatgtcaaggcggtcatgacgaggggaggtaagtccactcgtgatccgccatatcctaaccatgcaggaactaatgggatatcaaaagaagtgccatctaatgattcggctgacaaggaagttccgctagaaaagacagtgccgcaagagtactgcgacacacggttgctgttgttccctcaacgaagtaggaaaccgtcagtggacgagcaattcgctcgttttgttgaagtaatccagaagatccacatcaacgtgccgttgttggacgccatgcaagtgccaacatacgcccattatctcaataatatactcaacaacaagagaccgctcccaacaatggaggtggtcaagccgacggaacaatgcagcaacgtaatactccacaagctcccgggaaagtatgatccacagtcagactatccgaaaatatcagatagtctaatgttggatcagactgtctga

SEQ ID NO: 15075 - DNA, 1665 bp, Oryza sativa
  Clone ID: TFbOSC2463j.C1.o1.fg
atggctgacaatgagaaaggcaataaggtcagaagtcaggacattggtatctcaagctcccgagtgaatgaagcaccagacaccagttgtgtgacactggtccaacacctgattaaccagaaccaattgcttatagagatactacagcagcatcagacgccaattctgaacctaagtcagatacaacctcaagcgcagttggaggcagtccaagcactcacaccacaagtcagcatgccgccagcatcccgaaggacccatggtgaagtgccacatgttgactcaaaagaagcaagtatcatttgttttatgtgtgatgagcaagggctctatgcaagggagtgtcctcagcagaaaagaaaaacaccaatgcgaaccgaagatgaagtccgtaagatgagcattaccagcacagaatggcctccaccaggaatgacaaaacgtcagagaagaaataccttccgaggtgcgccacagttgacagagcatcttttagctaatggaggtagagtgtctgatagtgaagattcagatcaagtctcctcagatgatgaagatgagaagtctccccaaggtttcaaccagaataaaatggaacgtaaggcatgctctcgttgtggagaaatcggtcatgttgccagctcgtgtgccactacatgcgttcattgtgaggaagaccatccacccgacaggtgtccaacgagcaggatcacttgtttcttttgtgaaggaactgatcatgtcccaaaagattgtcaattcagttttctgctgacgaagaagacggccaaccaacccgccagttccaatggagagaagtatcaaggcaacacaaatcctcaccaagattacagttttagcctaactccagtgccaggacagaggaatcaaaatgagaaaagaaaatgccgagtccggaaagatatctgttgcttcaattgtcaaggaatgggtcatttcgccgacaagtgcccaaaaccgagaaacatagctgccagcacgtcagtccacgcaactccctgcaatcagaagcttgctcctcagcgaactgtcatccatgcatcccgaagcagtcctacagcccgcgttgcaacagctccaactccagcgagtgcattaccacaagatgtcactgcccaatttcagccccagccatcagttgacgagaccgaggccagtatcggcattgtacctttggatgttccagcacagcagccaagaaatcaagtacaagatgaagaacccgagcataagaaagttattaggcatgcacccgttgtggagaaactggacacgttgctggcatgtgtctcacactctgctctcactatgaagaagaccatccaccaggggagtgtcccactcgcaagcctcagcaaagaattgtcatcgatggaagaagttgtgtccctccccgacctactccaggccgagcaaagggcaatcaacctccggagggcgataccaagcagaagaccgtcatccgcttcaaacagcaatcagaaggaagcttctcctatgaatgatagcaatatgcagtcctatcacatcatcacagaaccaatcaaggatgatgcagtcactagaacaatgccagctatatctctccagaaacaaaatgagcagctacgcttgtggttttcagttcgctacttatcactgtaa

SEQ ID NO: 15076 - DNA, 1362 bp, Oryza sativa
  Clone ID: TFbOSC404799j.C1.o20.fg
atggctgacaatgagaaaggcaataaggtcagaagtcaggacattggtacctcaagctcccgagtgaatgaagcaccagacaccagttgtgcggcagtggtccaacacctgattaaccagaacaaattgcttatagaaatactacagcagcatcggatgccaactttgaacccgagtcagatgcaacctcaagtgcagttggaggcagtccaagcactcacaccacaagtcagcgcaccgccaacatcccagaaggcccctcatgccatgccacatgttgactcaaaagaagcaagtatcatctgttttaggtgtgatgagcaagggcactatgcaaggaactgtcctcagcagaaaagaaaagcaccaatgcgaaccgaagatgaagtccgtaagatgatcattaccagcacagaatggcctccaccaggaatgacaaaacatcagagaagaaattccttccgaggtgcacaacagttgacagagcatcttttagctaatggaggtagagtgtctgatagtgaagattcagatcaagtctcctcagatgatgaaggtgcgaagcctccccaaggttttaaccagaataaaatagaacttaaggcatgctctcgttgtggagaaatcggtcatgttgccagctcgtgtgcctctacatgcgttcattgtgaggaagaccatccacccgacagttttctgctaacgaagaagatggccaaccaacccgccagttccaacggagagaagcatcaaggaaacacaaatcctcgccaagattccagtttcagcctaactccagtgccaggacagaggaatcgaaatgagaaaagaaaatgccgagtccgggaagacatctgttgcttcaattgtcaaggaatgggtcatttcgccgacaagtgcccaaaaccgagaaacatagctgccggcacgtcagtccacgcaactccctgcaatcagaagcttgctcctcaacgaattgtcatccatgcatcccgaagcagtcctatagcccgcgttgcaacagctccaactccaatgagtgcactaccacaaggtgtcaatgctcaatttcagccccagccaccagctgacaagacagaggccagtatctgcgttgtacctttagaagttccaatacagcagctgagaaatcaagtacaagatgaagaacccgagtgtaagaaagttattgtttgttacaactgcagtgaagaagggcattactccaaaaactgtccccaaccaaggcaaaatcgacctccacattaccgccaatttacacgaagcagacattccaatcgtattgtggtcactggagcaaacgccgtacccgtaaggcctcgtgttaatcagaacccatag

SEQ ID NO: 15077 - DNA, 1809 bp, Oryza sativa
  Clone ID: TFbOSC401368j.C1.o29.gm
atgtcgataaccggcgacaacaacaacactggagacaaggagaaggagcctcccgtcaacagcaacagaggcaatactacctcaaactccagcaaatggccattctcgggtgtgctccccgatagtattgtggatgtgtatatgcacatgcctttagggaaggacatgtgggatgctcttgaggccaagttcggggtttccgacgccggcagcgatctgtatgtcatggagctgttctatgactacaagatggtcgatggccgttctgtattggaacaggatcatgagattcagatgttggcaaaggaacttgagaacaacaactgtgagttgtcggacaagtttgtggcaggtggcattattgccaaattgccaccttcttggacggactttgctacttctctaaaacacaagaggcaagagttcagtgttactgatcttattggctctttgggtgttgaggagaaggcgagggcaaaggacaaccggggcaaaaagatcgagggaggttctagcgccaatttggtgcagaagaagaaccctcacgcatctcacaacaacaacaagaaagtcaagcctgatgtcaaaccaaaggcaactaccaattttaagaagaaaggcaagcgaaaggccaaaggcgtctgctttgtgtgcggtaagcctgggcattgggccaagaattgtccttatcgcaaggacaagaagtctgccaacatggtcattagcgagggcggaggaacattggggttcttaatagtaaattctggagtacccgacatgagtgttggtacaattactgagtccagagatgccacattttttgagaatgaattttctatgaaaaatgcacctagcacttctagtcaagaacctattttatcccctgagcactttgcgctgatagaacacattgatcaaacacttgaggaaaatcctgaggaggataacattttagcaactcgaaagagtaagagacaaaggactgcaaagtcttttggagatgactacattgtatatcttgtggatgatactccaagaaccattgaagaggcatattcatcttctgacgctgactattggaaggaagcgatacgcagtgagatggactcaattatgtctaatggtacttgggaagtcgtcgagcgtccatatgggtgcaagcctgtaggatgcaaatgggttttcaagaaaaagcttaggcttgatggtacaattgaaaagtacaaggcaaggcttgtggccaaggggacaatgagctatggaattcactacgccgggtacccaaaagtgctggagggctatagtgattcaaactggatatctgatgctgatgagataaaggctacaagtggcgggcgactccattccacaggcatccttgacggcagcgacgaaaccaacctcttcgagacatcttcaactgagaaggacttcaactctggcaacgggcagcccccctttcgtgccgcggtgaatccggaagctgatcaaccggacaccccggccgacccaactccatcacgcccaccctcgcctggggctgacgtcatcaaggcggggcgcggcgccgacatgcgggccccaccggtccacggaccggggaggagcggcgcgccacgcggcggccgaaccgatggccccgatctacccaagggtagatcggacggcggcgggagctcgcggccggtgcgcgtgggcacggcgcaaaccggcccggcgaccatggcgcgcgacggcgcggcgcacatgcggcagcggcgcaagacggcggccgacgacgaccgaccggcgacggagagcggcggctag

SEQ ID NO: 15078 - DNA, 4125 bp, Oryza sativa
  Clone ID: TFbOSC101037j.C1.o2.np
atgagggcacaagtgagtacaaggatgccaagcttcatttcgtcaagatccaatatgagacattctccatgttgcctcatgagagtgtgaatgacatgtatgggaggctcaatgttattgtgaatgatctcaaggggcttggggcaaactacaccgatcttgaggttgcccaaaagatgcttagggctctaccagagaagtatgagacccttgtcaccatgctcatcaactccgacaagtcaaggatgacaccggcaagcctcttggggaagatcaacaccaatgacatgtacaagttgaagaagaaggagatggaggaagcctcaccttccaagaagtgcattgctctccaagctgaagttgaggacaagggcaagggcaaggtgaatgaagccaatgaggacttggaggaagagattgcccttcttgctagaaggttcaatgatctcttgggaaggagaaaggagagaggaaggggctcaaactcaaataggagaagaaatagaagacccaacaagactctctccaacttgaggtgctttgagtgtggtgagaagggacactttgcttccaagtgcccttccaaagatgatgatggagacaagtcatccaagaagaagagtggaggatacaagctcatgaagaagctcaagaactccgcctcatccgggtccgaggaagaaggtggtgatgatgcaagctccaagaagaagaagatggccgttgttgccatcaaggaggctctatcactcttcgctccactttgtctcatggcaaagggttcctctaaggtaacatctcttagtgatagtgagagtaatgataattgtaatgatgtttcctatgatgagcttgtgagtatgtttgaggagctccatgcttatagtgagaaaaagattgtcaagttcatggccctaaagaaggatcatgcttctttggaggtcttgtatgaggagctaaagacttctcatgagagactcaccatttctcctgagaagcttaaggaagctcatgacaacctcctttccactactcaacatgaagctctcattgatgttggcatatcttgtgatttgcttgatgatagtgctacttgccatattgctcatgttgcatcatctagcatttctacctcttgtgatgatcttgtggatatgtctagctctagatctagctcttgtgtttctatttgtgatgtctcacttgttgttgagaacaatgagcttaaggagcaagtggctaagctcaacaagagcttggagaggtgcttcaagggtaagaacactcttgacaagattttgagtgagcaatggtgcatccttaacaaggagggacttggattcattccaaagaagggtaagaaaccttctcactgtgccactcgttttgtcaagagcaatggaaggctcatgatggtagcattgttgctagatatgtgggttcccctatactcggtggtgaactaccgcaccggtgggagccattgggtgcttgacagtggatgcactcaacacatgatagggctatgttcaccacatttgaggtaggaggaaatgaacaagagaaagtgacatttggagacaatagcaaaggaaaggtaattgggttaggtaaaattgctatctccaatgatttgtcaattgataatgtctctcttgttaaatctctaaattttaatttgctttcggttgctcaaatttgtgatcttggcttgtcatgtgctttcttcccgcaagaagttattgtttctagccttcttgacaagtcttgtgtattcaaaggttttagatatggaaatctttatttggttgatttcaattctagtgaagcaaatttgaaaacttgtttagttgcaaaaacttcattgggttggctttagcataggaggctagcccatgttggcatgaatcaattgagcaaactttcaaaacgtgatctagttgtgggcttgaaagatgtgaagtttgagaaatataagctttgtagtgcttgtcaagccggcaagcaaattgcatgttctcatcctactaagagtatcatgtctacatcgagactattggagctcttgcatatggatttgtttggcccaacaacctataagagcattggtggtaatagtcattgtcttgtgattgttgatgattattctcgctatacttgggtgttctttttgcatgtcaagtctatcgttgccgagcttttcaaaaagtttgcaaaagggcccaaaataaatttaattgcactcttgtgaaaataagaagtgacaatggttccgagtttaagaataccaatatcgaggactattgtgatgatcttggttatgcctcaaatagcaaggtataccgggtctacaacaagaacaaaggtattgtggaagaaaccgccgatgttcaatttgatgagactaatggctcccaagagggacatgagaatttggatgatgtaggtgatgaaggcttgatgagagctatgaagaacatgtccattggagatgtcaagcctattgaagtggaagacaagccatccacctccactcaagatgagccgtctacttccgctatgccaagtcaagcttaagttgaagtggaggaggagaaggcacaagatccacctatgcctctaaggatacacaccgctctttccaaggatcacccaattgaccaagtgttgggtgacattagtaagggtgttcaaactcgatctcgtgtcgcttcgatttgtgaactttactcatttgtttcttgtcttgagccaaaacatgtagatgaagctccttgtgatccggattggatgaatgctatgcatgaagaactcaacaactttgcaagaaacaaggtgtggactttggttgaaagacctagagaccacaatgtcatagggacaaagtgggtctttaggaacaaacaagacgagaacgggttggtggtgagaaacaaggtaaggttagtggcacaaggtttcacacaagttgaaggtttggacttcggtgaaacttttgcccccgtggcaagacttgaggatattcgcatccttcttacatttgcatcatgctttgatataaaactatttcaaatagatgtgaaaagtgcttttctaaatgatttcaaaattggaaaagttgacaccaccattttcacaaaaatcattggtgatgatttctttgtgtgtcaaatttatgttgatgacatcatattcggttctactaatgaggtattttgcaaggaatttggtgatatgatgtctagggaatttgagatgtccatgattagagagttgagcttcttccttggacttcaaatcaagcaactcaaggatgggacgttcgtgagccaaaccaagtacatcaaggatctactcaagaggtttagcttggaggatgcgaagcccatcaagacacctatggcaaccaacgggcatttcgaccttgatgagggaggtaaaccggtagatttaaagctttatcgttctatgattggtagcttgctttaccttaccgcatctaggccggatatcatgtttagtgtttgcatgtgtgcacggtttcaagccgctcctaaggagtgtcacttagtggccgtgaaaaggattctaagatatttaaagcattcctgtactattggcttgtggtacccaaaaggtgctaagtttaagcttgttggctattccgattcggattatgccggttgcaaagtggatagaaagagcacatccggtagttgccaaatgcttggtagatcccttgtgtcatggtcatccaagaaacaaaactccgtagacctctctaccgccgaggcagaatatgtttcggcgggtagttattgtgcccaattgctttggatgaaacaaacattgttggactatggcatatccttcaccaaaaccacactcctatgtgacaatgatagtgccataaagatagccaataacccggtccaacattctagaaccaagcatattgacatacgccatcacttcctaagacaccatgttgccaagtgtgacatagtcattagccacataagaaccgaggatcaactagccgacatctttaccaagcctcttgatgaaacccacttttgcaagttgaggaatgagttaaatgtcatagacttctctaatgtggct

SEQ ID NO: 15079 - DNA, 4125 bp, Oryza sativa; identical to SEQ ID NO: 15078
  Clone ID: TFbOSC13136j.C1.o2.np

SEQ ID NO: 15080 - DNA, 4278 bp, Oryza sativa
  Clone ID: TFbOSC400450j.C1.o1.gm
atgggccgctcccgccttgcccaccccttgacgaaaggggcgtgcggtggtttcgtggttgagcggtggagttgggctcgcctcaacgggggcttggtctctcttgattgggcttcaccgcctagagagaagatgtcgaacgaggtgaaccatgtagggaaggctcccatgtttaatggcacaaactattccacttggaaaattaaaatgtctactcacctcaaagctatgagcttccatatttggagtattgtggatgtaggctttgctatcaacggcacacccttgacggagattgatcaccgcaacctccaactcaatgcccaagccatgaatgctttgttcaactctttgagccaagaggagtttgatagagtgagcaaccttgagaccgcatatgagatttggaacaagttggcggagatccatgagggcacaagtgagtacaaggatgccaagcttcatttcgtcaagatccaatatgagacattctccatgttgcctcatgagagtgtgaatgacatgtatgggaggctcaatgttattgtgaatgatctcaaggggcttggggcaaactacaccgatcttgaggttgcccaaaagatgcttagggctctaccagagaagtatgagacccttgtcaccatgctcatcaactccgacaagtcaaggatgacaccggcaagcctcttggggaagatcaacaccaatgacatgtacaagttgaagaagaaggagatggaggaagcctcaccttccaagaagtgcattgctctccaagctgaagttgaggacaagggcaagggcaaggtgaatgaagccaatgaggacttggaggaagagattgcccttcttgctagaaggttcaatgatctcttgggaaggagaaaggagagaggaaggggctcaaactcaaataggagaagaaatagaagacccaacaagactctctccaacttgaggtgctttgagtgtggtgagaagggacactttgcttccaagtgcccttccaaagatgatgatggagacaagtcatccaagaagaagagtggaggatacaagctcatgaagaagctcaagaaggaaggcaagaagattgaagccttcatcggggaatgggactcaaatgaggagagctccgcctcatccgggtccgaggaagaaggtggtgatgatgcaagctccaagaagaagaagatggccgttgttgccatcaaggaggctctatcactcttcgctccactttgtctcatggcaaagggttcctctaaggtaacatctcttagtgatagtgagagtaatgataattgtaatgatgtttcctatgatgagcttgtgagtatgtttgaggagctccatgcttatagtgagaaaaagattgtcaagttcatggccctaaagaaggatcatgcttctttggaggtcttgtatgaggagctaaagacttctcatgagagactcaccatgtggatattatggctttccggtcgatcggccgcgagtccactctgccggcttgtcttcgccaccgccattgctgataacaacaacgacttcaccgaccggcccgcctccgtcgccgccgagtggtgcctccgcctacacggctggcctattatgccgccgctgttgggcgtctacgacttcaccgccggcctgcctccgtcgccgccgagtggcgtctacgacttcaccgccggcctgcctcgtccgccgccgactggtgcctccgcctacacggctggcctattatgccgccgctgttgggcgtctacgacttcaccgaccggccgcctcgtccgccgccgactggtgtcctcgccggcacggctggcctattatgccgccgctgttgggcgtctacgacttcaccgccggcgtgcctccgtcgccgccgagtggtgcctccgcctacacggctggcctattatgccgccgctgttgggcgtctacgacttcaccgccggcctgcctccgtcgccgccgattggtgcctccgcctacacggctggcctattatgccgccgctgttgggcgtctacgacttcaccgccggcctgcctccgtcgccgccgagtggtgcctccgcctacacggctggcctattatgccgccgctgttgggcgtctacgacttcaccgccggcctgcctccgtcgccgccgagtggtgcctccgcctacacggctggcctattatgccgccgctgttaggcgtctacgacttcaccgccggcctgcctccgtcgccgccgattggtgcctccgcctacacggctggcctattatgccgccgctgttgggcgtctacgacttcaccgccggcctgcctccgtcgccgccgattggtgcctccgcctacacggctggcctattatgccgccgctgttgggcgtctacgacttcaccgccggcctgcctccgtcgccgccgattggtgcctccgcctacacggctggcctattatgccgccgctgttgggcgtctacgacttcaccgccggcctgcctccgtcgccgccgagtggtgtccccgcctatacggaatggatcagtcagaacatcaccaccggccgcctcgtccgccgccgactagtgttttcgcctgcacggttggcctattatgccgccgttgttgggcgtctacgtcttcaccgaccggcttgccttcgccgccgccgactggtgtttccgcctgcacggctggcctttatgccgccgttgttgggcgtctacgtcttcaccgaccggccgcctcgtccgccgccgactggtgcttccgcctgcacggctggcctttatgccgccgttgttgggcgtctacgtcttcaccgaccggccgcctcgtccgccgccgactggtgcttccgcctgcacggctggcctttatgccgccgttgttgggcgtctacgtcttcaccgactggcttgccttcgccgctgccgactggtgtttccgcctgcacggctggcctttatgccgccgttgttgggcgtctaagtcttcaccgaccggccgcctcgtccgccgccgactggtgcttccgcctgcacggctggcctattatgccgccgttgttgggcgtctacgtcttcaccgaccggcttgccttcgccgccgccgactggtgtttccgcctgcacggctggcctttatgccgccgttgttgggcgtctgcgtcttcaccgaccggcttgccttcgccgccgccgactggtgtttccgcctgcacggctggcctttatgccgacgttgttgggcgtctacgtcttcaccgaccggccgcctcgtccgccgccgactggtgcttccgcctgcacggctggcctattatgccgccgttgttgggcgtctacgtcttcaccgaccggcttgccttcgccgccgccgactggtgtttccgcctgcacggctggcctttatgccgccgttgttgggcgtctacgtcttcaccgaccggcttgccttcgccgccgccgactggtgtttccgcctgcacggctggcctttatgccgccgttgttgggcgtctacgtcttcaccgaccggccgcctcgtccgccgccgactggtgcttccgcctgcacggctggcctattatgccgccgttgttgggcgtctacgtcgtcaccgaccggccacctcgaccgccgccgactgtcaaggtgctgtttgggtttatcaagcaattgattggatacaatatcattgctttttgccacccctccacagtcttcagatttggtaaaagtactcgggagaccatgacaaagatgattgaagcactcggctttggagtaatctgctcttgtgtttctatttgtgatgtctcacttgttgttgagaacaatgagcttaaggagcaagtggctaagctcaacaagagcttggagaggtgcttcaagggtaagaacactcttgacaagattttgagtgagcaatggtgcatccttaacaaggagggacttggattcattccaaagaagggtaagaaaccttctcactgtgccactcgttttgtcaagagcaatggtaagtattgctccaagtgtcgtgaggttgggcatttggtgaatgattgccctggtggttatgcctcaaatagcaaggtataccgggtctacaacaagaacaaaggtattgtggaagaaaccgccgatgttcaatttgatgagactaatggctcccaagagggacatgagaatttggatgatgtaggtgatgaaggcttgatgagagctatgaagaacatgtccattggagatgtcaagcctattgaa

SEQ ID NO: 15081 - DNA, 4713 bp, Oryza sativa
  Clone ID: TFbOSC408405j.C1.o11.fg
atgagcttccatatttggagtattgtggatgtaggctttgctatcaccggcacgtccttgacggagattgataaccgcaacctccaactcaatgcccaagccatgaatgctttgttcaactctttgagccaagaggagtttgatagagtgagcaaccttgagaccgcatatgagatttggaacaagttggcggagatccatgaggacacaagtgagtacaaggatgccaagcttcatttcctcaagatccaatatgagacattctccatgttgcctcatgagagtgtgaatgacatgtatgggaggctcaatgtcattgtgaatgatctcaaggggcttggggtaaactacaccgatcttgaggttgcccaaaagatgcttagggctctaccagagaagtatgagacccttgtcaccatgctcatcaattccgatatgtcaaggatgacacccgcaagcctcttggggaagatcaacaccaatgacatgtacaagttgaagaagaaggagatggaggaagcctcaccttccaagaagtgtattgctctccaagccgaagttgaagacaagggcaagggtaaggtgaatgaagccaatgaggacttggaggaagagattgcccttcttgctagaaggttcaatgatctcttgggaaggagaaaggagagaggaaggggctccaactccaataggagaagaaatagaagacccaacaagactctctccaacttgaggtgctttgagtgtggtgagaagggacactttgcttccaagtgcccttccaaggatgatgatggggacaagtcatccaagaagaagagtggaggctacaagctcatgaagaagctcaagaaggaaggcaagaagattgaggccttcatcggggaatgggactcaaatgaggagagctccgcctcatccgggtccgaggaagaaggtggtgatgatgcaagctccaagaagaagaagatggccgttgttgccatcaaggtaacatctcttagtgatagtgagagtgatgatgattgtgatgatgtttcctatgatgagcttgtcttgtatgaggagctaaagacttctcatgagagactcaccatttctcatgagaagcttaaggaagctcatgacaacctcatttccactactcaacttggagctctcattgatgttggcatatcttgtgatttgcttgatgatagtgctactcgccatattgctcatgttgcatcatctagcatttctacctcttgtgatgatcttgtggatatgtctagctctagctctagctcttgtgtttctatttgtgatgcctcacttgttgttgagaagaatgagcttaaggagcaaatggctaagctcaacaagagcttggagaggtgcttcaagggtaagaacactcttgacaagattttgagtgagcaacggtgcatccttaacaaggagggacttggattcattccaaagaagggtaagaaaccttctcaccgtgccactcgttttgttaagagcaatggtaagtattgctccaagtgtcgtgaggttggacatttggtgaatgattgccccggtggtaagcctcctaagacttgcatgtttgattctcattatatgcttaggaaggcttatgatgcaagcattgttgctagatatgtggattaccctatactcggtggaaaaaagaatgccatttgggtgcccaaagctttggtctctaacctccaagtgaactaccacaccggtgggagccattgggtgcttgatagtggatgcactcaacacatgaccggtgatagggctatgttcaccacatttgaagtaggagggaatgaacaagagaaagtgacatttggagacaatagcaaaggaaaggtaattgggttaggtaaaattgctatctccaatgatttgtcaattgataatgtctctcttgttaaatccctaaatttcaatttgctttcggtcgctcaaatttgtgatcttggcttgtcatgtgctttcttcccgcaagaagttattgtttctagccttcttgacaagtcttgtgtgttcaaaggttttagatatggaaatctttatttggttgattttaattctagtgaagcaaatttgaaaacttgtttagttgcaaaaacttcgttgggttggctttggcataggaggctagcccatgttggcatgaatcaattgagtaaactttcaaaacgtgatctagttgtgggcttaaaaaatgtgaagtttgagaaagataagctttgtagtgcttgtcaagccggcaagcaagttgcatgttctcatcctactaaaagtatcatgtccacatctagaccattggagctcttgcatatggatttgtttggcccaacaacctataagagcattggtggtaatagtcattgtcttgtgattgttgatgattattctcgctatacttgggtgttctttttgcatgacaagtctattgttgccgagcttttcaaaaagtttgcaaaaagggtccaaaatgaatttaattgcactattgtgaaaattataagtgacaatggttccgagtttaagaataccaatatcgaggactattgtgatgatcttggtatcaaacacgaactttccgctacctactcaccccaacaaaatggtgtaatggagaggaaaaatcgtacattgattgagatggcatggactatgcttgatgaatatggtgtttccgatttcttttgggtggaagccataaacaccgcttgccatgcaaccaataggctttatttgcatcgtctcttgaaaaagacttcctatgagctaattgttgggaggaagccaaatgttgcctattttcgagtttttggttgcaaatgttatatttaccgaaagggtgttagactaaccaaatttgaaagtcggtgtgatgaagggtttcttctaggttatgcctcaaaaagcaaggcataccgggtctacaacaagaacaaaggtattgtggaagaaaccgccgatgttcaatttgatgagactaatggctcccaagaagggtacgagaatttggatgatgtatgtgatgaaggcttgatgagagctatgaagaacatgtctattggagatgtcaagcctattgaagtggaagacaagccatccacctccactcaagatgagccatctacttccgctacgccaagtcaagctcaagttgaagtggaggaggagaaggcacaagatccacctatgcctccaaggatacacaccgctctttccaaggatcacccaattgaccaagtgttgggtgacattagtaagggtgttcaaactcgatctcgtgtcgcttcgatttgtgaacattactcgtttgtttcttgtcttgagccaaaacatgtagatgaagctctttgtgatccggattggatgaatgctatgcatgaagagctcaacaactttgcaagaaacaaggtgtggactttggttgaaagacctagagaccacaatgtcatagggacaaagtgggtctttaggaacaaacacgatgagaacgggttggtggtgagaaacaaggcaaggttggtggcacaaggtttcacacaagttgaagatcctaaaaatcctaaacatgtttacaaactctcaaaagctctttatggtttaaaacaagctcctagggcttggtatgaaagattgagagattttcttttgtcaaaggatttcaaaattggaaaagttgacaccacccttttcacaaaaatcattggtgatgatttctttgtgtgtcaaatttatgttgatgacatcatattcggttctactaatgaggtattttgcaaggaatttggtgatatgatgtctagggaatttgagatgtccatgattggagagttgagcttcttccttggacttcaaattaagcaactcaaggatgggacgttcgtgagcaaaaccaagtacatcaaggatctactcaagaggtttggcttggaggatgcgaagcccatcaagacacctatggcaaccaacgggtatcttgaccttgatgagggaggtaaaccggtagatttaaagctttatcgttctatgattggtagcttgctttaccttaccgcatctaggccggatatcatgtttagtgtttgcatgtgtgcacgatttcaagccgctcctaaggagtgtcacttagtggccatgaaaaggattctaagatatttaaagcattcctctactattggcttgtggtacccaaaaggtgctaagtttaagcttgttggctattccgattcggattatgccggttgcaaagtggatagaaagagcacatctggtagttgccaaatgcttggtagatcccttgtgtcatggtcatccaagaaacaaaactccgtagccctctctaccgccgaggcggaatatgtttcggtgtgtagttgttgtgcccaattgctttggatgaaacaaacattgttggactatggcatatccttcaccaaaaccccactcctatgtgacaatgatagtgccataaagatagccaataacccggtccaacattctagaaccaagcatattgacatacgccatcacttcctaagagaccatgttgccaagtgtgacatagtcattagccacataagaaccgaggatcaactagccgacatctttaccaagcctcttgatgaaacccgcttttgcaagttgaggaatgagttaaatgtcatagacttctctaatgtggcttga

SEQ ID NO: 15082 - DNA, 4931 bp, Oryza sativa
  Clone ID: TFbOSC900301j.C1.o6.np
attatgtgtgcgcatggatgtctacctatggattaaaaattgacggcacaaagctaaaggaagagaagacggtaaacttgtgttttcatttgaaattgattgaggctttgttcaactctttgagccaagaggaattcgatagagtgagcaaccttgagaccgcatatgagatttagaacaagttggcggagatccatgagggcacaagcgagtacaaggatgccaagcttcatttcctcaagatccaatatgagacattctccatgttgcctcattagagtgtgaatgacatgtatgggaggctcaatgtcattgtgaatgatcttaaggggcttggggcaaactacaccgattttgaggttgcccaaaagatgcttagggctctaccggagaagtatgagacccttgtcaccatgctcatcaactccgacatgtcaaggatgacacccgcaagcctcttggggaagatcaacaccaatgacatgtacaagttgaagaaggagatggaggaagcctcaccttccaagaagtgcattgctctccaagccgaagttgaagacaagggcaagggcaaggtgaataaagccaatgaggacttggaggaagagattgccctttttgctagaaggttcaatgatcacttgggaaggagaaaggagagaggaaggggctccaactccaataggagaagaaatagaagacccaacaagactctctccaacttgaggtgctttgagtgtggtgagaagggacactttgcttccaagtgcccttccaaggatgatgatggagacaagtcatccaagaagaagagtggaggctacgagctcatgaagaagctcaagaaggaaaggaagaagattgaggccttcatcggggaatgggactcaaatgaggagagcttagcctcatccaggtctgaggaagaaggtggtgatgatgcaagctccaagaagaagaagatggccgttgttaccatcaaggaggctccatcactcttcgctccactttgtctcatggcaaagggctcctctaaggtaacatctcttagtgatagtgagagtgatgataattgtgatgatgtttcctatgatgagcttgtgagtatgtttgaggagctccatgcttatagtgagaaggagattgcaagttcaaagccctaaagaaggatcatgcttctttggagatcttgtatgaggagctaaagacctctcatgagagactcatcatttctcatgagaagcttaaggaagctcatgacaacctcctttccactactcaacatggagctcgcattgatgttggcatatcttgtgatttgcttgatgatagtgctacttgctatattgctcatgttgcatcatctagcatttctacctcttgtgatgatcttgtggatatgcctagctctagctcttgtgtttcgatttgtgatgtctcacttgttgttgagaacaatgagcttaaggagcaagtggccaagctcaacaagagtttggagaggtgcttcaagggtaagaacactcttgacaagattttgagtgagcaacgatgcatccttagcaaggagggacttggattcattctaaagaagggtaagaaaccttctcaccgtgccactcgttttgtcaagagcaatggtaagtattgctccaagtgtcgtgaggttgggcatttggtgaatgattgccccggtggtaagctttctaagacatgcatgtttgattctcattatatgcttaggaaggctcatgatggtagtattgttgctagatatgtgggttcccctatacttggtggtaaaaagaataccatttgggtgtccaaagctttgatctctaacctccaaggacccaaatatgtttggattattctcgctatacttgggtgtttttttgcatgacaagtctattgttgccgagcttttcaaaaagtttgcaaaaagggcccaaaatgaatttaattgcactcttttgaaaattagaagtgacgatggttccgagtttaagaataccaatatcgaggactattgtgatgatcttggtattaaacacgaactttccgctacctactcacctcaacaaaatggtgtagtggagaggaaaaatcgtacattgattgagatggcaaggactatgcttaatgaatatggtgtttccgattccttttgggtggaagccataaacactgcttgccatgcaaccaataggctttatttgcatcgtcttttgaaaaagacttcctatgagctaattgttgggaggaagccaaatgttgcctattttcgagtttttggttgcaagtgttatatttactaaaaggatgttagactaaccaaatttgaaagtcggtgtgatgaagggtttcttctaggttatgcctcaaatacccgggtctacaacaagaacaaaggtgatgaaggcttgatgagagctatgaagaacatgtctattggagatgtcaagcctattgaagtggaagacaagccatccacctccactcaagatgagccatctacttccgcttcgccaagtcaagctcaagttgaagtggaggaggagaaggcacaagatccacctatgtcaccaaggatacacaccgctctttccaaggatcacccaattgatcaagcgtcgggtgacattagtaagggtgttcaaactcgatctcgtgttgcttcgatttgtgaacattactcgtttgtttcttgtcttgagccaaaacatgtagatgagctctttgtgatccggattggatgaattctatgcatgaagagctcaacaactttgcaagaaacaaggtgtggactttggttgaaagacctaaagaccacaatgtcatagggacaaagtgggtctttaggaacaaacaagatgagaacgggttggtggtgagaaacaaggcaagattggtggcgcaaggtttcacacaagttgaaggtttggactttggggaaactgttgcccccgtggcaagactagaggttattcgcatccttcttgcatttgcattatgctttgatataaaactatttcaaatggatgtgaaaagtgtttttctaaatggtgaaattgccgaacttgtctttgttgaacaacctcccggttttaaagatcctaaaaatcctaaccatgtttataaactatcaaaagctctttatggtttaaaacaagctcctagggcttggtatgaaagattgagagattttcttttgtcccgatacaccaaaagcacactttgtcgggttcatcttcaggccatatttcccggttctctcaaaaacctttctcaaatcggctatgtggtcttctatttctttagacttaacaaccacatcatcaatatagacttcaaccaaccagccgatcaaatcatgatatatatataattcatagctctttggtacgtgagccaaaccaagtatatcaaatcgtaagccaaaccaagtacatcaaggatctactcaagatgtttggcttggaggatgcgaagcccatcaagacacctatggcaaccaacgcacatctcgttccatgataggtagcttgctttaccttaccgcatctaggccggatatcatgtttagtgtttgcatttgtgcacggtttcaagccgctcctaaggagtgtcacttagtggcctacccaaaaggtgctaagtttaagcttgttggctattccgattcggattatgccggttgcaaagtggatagaaagaacacatccggtagttgccaaatgcttgctatgcctccccacactcgccatggtcgtcgtgagcccacgcccaatcccatcagtgagaatgaggaatcaagcggagatgatatgttcaaagtgaggatgaaaatatggaaaatgttgagggggatgaggtggaagtaagtggtgatgacaatggcagtgatggtggtgatgtcaatggcagtggcgatggtgaggatgatgaggcaagtgatgatgggagtcctctcgatcccaccatccattttgtgctcaatttgaggaatgcccagcaatacactatccttcgtcatctgatcaattccggaggcctaatgattgcaatgatccaagattccatacacggttccaaaaatccgtatatgagcaagtatatgccaacaaagccttcaccgaacacaagtggatttcttggaggcacattggtgagacaccggagtttgtggatttgcaagagatgttctgggccgttgggattgataggattgtcaccatgaagcaaccctttgatgaagatctcattcggcaattttatgccaccgtgtgggtgtccggcgattgtgatgctatgaagtggatgtcggggacccttcggtgctctatcaaccgccgtgaattcaaggagctcttgcacatttgcttcaacaacggggatgacctccatgatgagcacaaccacaaccccttcatgattgattacttttctcagttctatgaagaagggggaaggcacacatatggaaaggtggggggtttgagggctatcccaagtgtaatcaaccgcatagtgagggccaccattctcccaagatgtggtaacaatgatgacatacgcggcgttgcatggcatgtcattgatgccatcatggatgatcgtcggtttgatgtcatcaaccttatgatgaaggagatagccatttccaaggggactattggacaaggagtttactatgccctctacataatgaggttgccgcctcctagacggcttgtggaggagttgcccggtgacctctccgagaagattatggaggaggcccggtgccggtttgtgagtggtttggagttcaccaccttcggagtgaaggaagaactaccctagtgatcgaggcttgggtagtcctcttcgtgggccggctcccgccttgcccaccccttgacgaagggggcgtgcggtggcttcgtggt

SEQ ID NO: 15083 - DNA, 2071 bp, Oryza sativa
  Clone ID: TFbOSC405422j.C1.o3.np
ttccgcattcatttggaccacactcaaggagagatacgacgagtccaaatgtgatgatgtactctttttggaagaaccacttgaggagcgttcaacttcatcaccaaattgcgaagaacctcaagtgactaccttcgatgatcaagataatcatcccacatccaccttatcatcaacacataactacgttgaaggtaacgaattggtgagtaaggttgacgatcgtccaattctcccattggattccaacaacaccgataatgaaattgtcatatggcattgtgttgttgactcatacatctcacctagcaccaagtatgtgtgtgaggataatatggataaatgctctacttcctatagtacttgtggaactaaccttttaaaggaaaaagtaaataagcaccaatggacaagtgaagaatccacctcaccaagatgctcatcttctatttccgaagattatgcttgctttatgagtgaagatggtgactccgagtttgatcacttgagcaagaaggatataacaatggtgatcaagctcatggaagccattgagaagcaacaagcatgcactatcaagaagaatgaagaaatcatgagtctaaccgaagaacacaagaaacttaaggattttcattcttcattgactatgaggtatgaaaaattggaaaatgaatttgcttgtgccactaattctattgcttgtgtagcatctttggagaagcaaaatcaagagctcaaatctcaacttgatgagatcactaacaagtatgtggatttacaagaaagacatgatgaacttttgtgttctcatgagaatcttgtggattctcatgcaatgctagaggtatctcatgaggtgataattgcaacggtaaaatcctacgagcctcatgttcaagttgatcttacttgtactaacccttgttgcgcccaagcaaatatttccccgagcactatatatgacttggattgtgtaggcaaaagggagaagcaaatagatcatggacttgtgtgcattgctcaaccttctcaagataactgtgaaggcatggtgaagaatcttgaggagggatcaaccgtggcttgcaccaggatccatcaaagggatagcaagtccatcaatgcttataccaagggacgaaatcaaaagatgatcaagagttccattacttgcttcaagtgcaagaaagtgggacatcatgctagagattgcccttggaagaaaggaaataagttgagcaagaagaaagacattcctcacatcaagtgcttcaagtgcaccgaagtgggacactttgcctcaaggtctccttgtacattggatgaacaatgcaaaacatcaagtgagaggcaaaccggcaacaagcaaaccgaaaagcaatatagaagcaaaagtcgactttgctataattgccgggcaaagggacatattggtaaaaattttcccatgggtaacattcctaagacaagtctctcatttgatcataatttgcttaggaatgccaaaaatgatatttgtgctactagggtgatttgttcgccacacactagcataaaggccatttgggtgtctaagtctcttgtgactaacctttatggacccaatgttgttggggaccaaaatgtgctaaaattttatagtggaaccaaaggcttcggtaagaccgctcgatttgcaatgaagctcatctatcaccatgcattggagcccggaggctctggaaagataccccggagactccgggaagattccttggtcacccgaaggatctaggccagaggctccaagttcacaagaacatgcatacttaaatgttatccatccgtgtaagaatcacgggtgtgaccacaagaagtccatgatgaccaaggtggactacttgatcaacctcaatcaactcaagtcaacctaccacaattgtctatgaagaacatgaagacatgcttttggaaggaagatggtgcaaatgctaaaccggatcgggtcatggcattacaagaagagcacaagcactatcaggacgtagactgtgatcaaagagtcaaacatgttcgtgatgggaaagct

SEQ ID NO: 15084 - DNA, 1404 bp, Oryza sativa
  Clone ID: TFbOSC403976j.C1.o1.fg
atggctgacaatgagaaaggcaataaggtcagaagtcaggacgttggtacctcaagctcccgagtgaatgaagcaccagacaccagttgtgtgacactggtccaacacctgattaaccagaaccgattgcttatagagatactacagcagcatcagacgccaattctgaacctgagtcaaatacaacctcaagtgcagttggaggcagtccaagcactcacaccacaagtcagcatgccgccagcatcccgaaggacccatggtgacgtgccacatgttgacccaaaagaagcaagtaacatttgctttatgtgtgatgagcaagggcactatgcaagggagcgtcctcagcagaaaagaaaaacaccaatgcgaactgaagatgaagtccgtaagatgatcattactagcacagaatggcctccaccaggaatgaccagacgtcagagaagaaataccttccgaggtgcaccacagttgacagagcatcttttagctaatggaggtagagtgtctgatagtgaagattcagatcaagtctcctcagatgatgaagatgaaatggaatgtaaggcatgctctcgttgtggagaaatcggtcatgtcgccagctcgtgtgccactatatgcgttcattgtgaggaagaccatccgcccgacaggtgtccaacgagcaggatcacttgtttcttttgtgaaggaactgatcatgtaccaaaagattgtcaattcagtcttctgctgacgaagaagatggccaaccaacccgccagttccaacggagagaagcatcaaggcaacacaaatccccgccaagatcaccgtttcagcctaactccagtgccaggacagaggaatcaaaatgagaaaagaaaatgccgagtccgggaagatatctgttgcttcaattgtcaaggaatgggtcatttcgccgacaagtgcccaaaaccaagaaacacagctgccagcacgtcagtccacgcaactccctgcaatcagaagcttgctcctcagcgaattgtcatccatgcatcccgaagcagtcctatagcccgcgttgcaacagctccaactccaatgagtgcactaccacaaggtgtcaatgctcaatttcagccccagccaccagctgacaagacagaggccagtatctgcgttgtacctttggaagtcccaatacagcagctgagagatcaagtacaagatgaagaacccgagtgtaagaaagttattgtttgttacaactgcagtgaagaagggcattactccaaaaactgtccccaaccaaggcaaaatcgacctccacattaccgccaatttacacgaagcagacattccaatcgtattgtggtcactggagcaaacgccgtacccgtgaggcctcgtgttaatcagaacccatag

SEQ ID NO: 15085 - DNA, 4599 bp, Oryza sativa
  Clone ID: TFbOSC100049j.C1.o2.fg
atggtgcgctgcggtggattgtgttatgcaaggggtattgtcacagctcctttccgagctcctggtttggaatggtatattcctggtttggagatagatctgtacagccggatgccgcgctacaagcctgagtacttgtttggtgttgagggatttgtccaggagttgcgtacgatgtccattgccataggatttgggactgcccctttttatgcccagattcctcatgatcgtcatgaagagaagtgccgggtcaaagtcaccttaaacagtaatagcgaagatatcccctcagtgatgttcgaagctggaggaaaaaactacatccatgcatgtcagaaggtggcaaggatcgccataggagagctgcgcgatcgctacagtgatcagttggccgacaccgagtatcgctaccatcctcgccaaccacagggaaagactgtgttagcagctcaagatcgtgaagatcggaatcgtggtaagatttgcaagctagaggacaaagtggatcatttggagaaggaactagccgccttgaagggagaagcaccaccgcagaaggccaggattcgtcttaccgcaaggaagagagctctatttgtccctcgctatcaattggcgccaaaggttcgtgtggtggaaaaagaagttaccccagccctagcagatcctccggtcgtcaacatggtgctcactcgcagcaacgggaatggccccaacaacaacaacaataacaataacaacaacaatggagagaatcccacacttgcccaagtcctggctcaacaggcacagcttatgaacatgatgatgcagcaactccagaaccagcagaaccagggaaataaccatgcacctccccagaacaagttagccgaatttcttcgtgtgaggccgcccattttctccagtaccactaatcctgttgaagctggtgattggctgcatgtcatagagaagaagttggatttgcttcagtgcactgatcaggagaaggtctcatttgcatcacaccagttgcatggccctgcctctgaatggtgggatcacttccgcctgcatcggactactgctgaacctatcacttggcttgaattcaccgctgctttccggaagacgcatataccatcgggagtggtgtctctcaaaaagagggaattcaggtcgctcactcaggggtctcgctctgttacggagtatctgcacgagttcaatcgtctggctcattatgctccggaagagaagttagtggataaggctattcgccaggaggacaagtacaaccgcatggagcaaaagaaacgccggattgctcaattcaagacacaacaggggaataatcaaaagccgcgtcttactttaggaccccagtccatgccacagggaggttcttcgtctgttgttcgtccgcagcgtcagttcttcaacaacaatgccggcaacaacatccgtaatcaagctccatgccctgttgcagcctcgacacagcaacaacctgccaagagggagcaaggcagcaagcccgtggtgtgtttcaactgtggagacccaggacattacgctgacaagtgtccgaagccccgacgtgtgaaggttgtccctacccagggcaactctaccgcaccagcatcaaaggcccgtgtcaatcatgttgctgctgcagaagctcaagatgctccagatgtgattttgggtacgtttcttgttaacttagttcctgcaacagtgcttttcgattctggtgctacacattcattcttatctatgagttttgcgggaaatcatgggatggaagtagaagatcttagacgtcctatgatggttagtaccccaagtaatcaggcactctctttgcaacgtagcccctctgtcagaatagaaattcaaggcgtaccatttctggccaatcttatcctattagaatccaaagaccttgatgtcatcctagggatggactggttagccagatataaaggtgtgatagactgtgctaacagaaaagtaactctcaccagcaatgatggtcgagttgtaactgtttatgcattgtcttctgagtctttaaggtcaagactaaaccaaataactttggaagagattcctatagtccgggagtatcctgatgtgttcccagatgatttacctggtatgcctcctaaaagggatatagagttcagaatagatttggtaccaggaacaactccaatccataagagaccttatagaatggcagccaatgagttggcagaagtcaagaggcaagtggacgatttgcttcggaaagggtacatcagaccgagttcatctccatggggagctccagttatctttgtggaaaagaaagatcatacccaaaggatgtgtgtggactatcgtgcactaaatgatgtgactatcaagaataagtacccgctacccagaattgatgatttgtttgatcagcttaaagaagagcatgaacaacatcttcgccttgcactggagaagctgcgagaacatcaactgtatgctaagtttagcaagtgtgaattttggttgtccgaagtgaagttccttggtcacgtcatctcagcaggaggagttgccgtcgatcctagtaatgtggaatccgtaaccaattggaaacaaccaaagacagtttcagagattcgcaattttctaggcctcgcaggatattatcggaggtttataaagaatttttccaagattgctaagcccatgacacgattacttcagaaagatgtaaagtacaagtggtcagaagaatgtgagcagagttttcaagagttgaagaatcgcttaatatcagctcctattttgattttacctgatccaaagaagggattccaagtgtattgcgatgcatccaaatttgggttaggttgtgttctgatgcaagatgagaaggtggttgcctatgcatctcgtcagttacgtccgcatgagaagaactaccctactcatgatcttgagttagctgcagtagttcatgcgttgaaaatttggcgtcattatcttttcggtactcgtacagaggtgtataccgatcacaagagtttaaaatatatctttactcagccggatctgaacatgagacaacggagatggttggaattaattaaggattatgacatgggaattcattatcacccgggaaaggctaatgttgtagcagatgctcttagcaggaaaggctattgcaatgctacggaaggacgacagttgccattggaattatgcaaggaatttgaaagattgaatttgggaattgtcagtagaggtttcgttgcagctttagaagcgaagcccactctaattgatcaagttagagaagcccaaattaatgatcctgatattcaagagatcaagaagaatatgaggagagggaaagctatcggtttcttgaaagatgagcaaggaactgtatggttgggcgagagaatctgtgtccccgacaacaaagatttaaaagatgcaattctaaaggaagcccatgataccttatactccattcaccctggtagtactaagatgtaccaggatctcaatgaaggattttggtgggcaagtatgaagcgtgaaatcgcagagtacgtagcagtatgtgatgtttgtcagcgagtcaaggcagaacatcagaaacccgccggtttgttgcagcctttgaagattcctgaatggaaatgggaggaaattggtatggatttcatcactggtctacccagaacgtcatcaggccatgactctatttgggtgatagtcgacagacttaccaaagtggctcatttcattccgacagacggacaaaccgaaagggtgaatcagattttggaagacatgttgagagcttgtgctttagacttcggtggaagttgggataagaatctaccttatgcagaattttcgtacaacaacagttatcaagctagtcttcagatggctccgtacgaagcactgtatggtcggaagtgccgcactccgcttttgtgggatcaaacgggagaacgtcaggttttcgggacggatatcctgagggaagcagaagaaaaggtgaaaatcattcaagaaaggttgcgtgtggcccagtctcgtcataagagttatgccgacaatcgtcgtagagatctaagttttggcgaaggagattatgtgtatcttcgtatcacgccttttcgaggagttcatcgttttcacaccaaagaaaaattggcaccgcgttttgtgggaccttataagattgtcaatagaagaggagaggttgcttatcagttggagttacctcaatctttggcaggagtccataatgtgttccatgtttcgcaattgaaaaagtgtttaagggtacctaccgaggaaactaatcttgaacagatagaagtccaagaggatctgacctatattgagaaaccaatcggtattttggaaatagatgagagaagaaccagaaatcgagttatccgtttttgcaatgttcaatggagtaatcactcggaagaagaatcaacttgggaacgagaagatgaattgaagtcagctcatccgcatctgttcgccagttcttcagaatctcgaggacgagattctgttaaaggggggtag

SEQ ID NO: 15086 - DNA, 4587 bp, Oryza sativa
  Clone ID: TFbOSC100172j.C1.o1.fg
atggatgaagtcgggcgtcgatggacattctccagggcaaatgaaggctacacgagctgcggcccgggaagtgatcgtggcagttaccttgagactgaaggaattgagaatgatgctaccacaagatatttggttgagatgctgtgggctatggatgaaagtcgtgcagagagtgtgctagcagctcaagatcgggaagatcggaatcgtggtaagatttgcaagctcgaagataaggtggatcgtttggagaaggaactagccgcattgaagggagaagcaccaccgcagaaggccaggattcgtctcaccgcaaggaagagagctctatttgtccctcgctatcaattggcgccaaagatggtgaatactcgcagcaacgggaatggtcccaacaaccccaataacaataacaatggagagaatcccactcttgctcaagttcttgctcaacagacacagctaatgaacatgatgatgcaacaatttcagaatcagcagaaccaaggaaataaccatgcacctcctcagaataagttagcagaatttcttcgtgtaaggccgcctgttttctctagtaccactaatcctgttgaagctggtgactggctgcatgccatagagaagaagttggatttgcttcagtgcactgatcaggagaaggtctcatttgcatcataccagttacatggccctgcctctgaatggtgggatcacttccgcctgaataggactactgctgaacctatcacttggcttgaattcactgctgctttccgaaagacgcatataccatcgggagtggtgtctctcaagaagaaggagttcaggtcgcttactcagggatctcgctctgttacggagtatctgcacgagttcaatcgtcttgctcgttatgctccggaagatgtgcgcactgatgaagaacgtcaagagaagttcttggaaggacttaatgatgagctttcttacccactcatgactggagattattctgatttccagaaattggtggataaggctattcgtcaggaggacaagtataatcgcatggagcagaagaaacgccggattgctcacttcaaggcacaacaggggagtaatcagaagccgcgtcttgctttaggaccccagcctatgccacagggaggttcttcgtctgttgttcgtccgcagcgtcagttcttcaacaacaatgctggcaataacatccgcaatcaagctccacgccctgttgcagctccagcacagcaacaacctgccaagagggagcaaggtagcaagcccgtggtgtgtttcaactgtggagacccaggacattatgctgacaagtgtccgaagcctcgacgcgtgaaggttgtccctgctcagagcaactctactgtaccagcatcaaaggcccgtgtcaatcatgttgctgctgcagaagctcaagatgctccagatatgattttgggtacgttccctgttaactcagttcctgcaacagtacttttcgattctggtgctacacattcattcttatctatgagttttgcgggaaatcatgggatggaagtagaagatcttagacgtcctttgatggttagtaccccaggtaatcaagcactttctttgcaacgtagcccctcggtcagaatagaaattaaaggagtaccatttctggccaatcttatcttgttagaatccaaagaccttgatgtcattctagggatggactggttagccagacataaaggtgtgatagactgtgccaacagaaaagtaactctcaccagcaatgatggtcgagttgtaactgttaatgcattgtcttctgagtctttaaggtcaagactgaaccagataactttggaagagattcctatagttcgggagtattccgatgtgttcccagatgatttacctggaatgccgcccaaaagggatatagagttcagaatagatttggtacctggaacaactccgatccataagagaccttatagaatggcagccaatgagttggctgaagtcaagaggcaagtagatgatttgctacagaaaggatacatcagaccgagttcgtcactatggggagctccagttattttttgggaaaagaaagaccatacccagagaatgtgtgtggattatcgtgcattaaatgatgtgactatcaagaataagtacccgctacccagaattgatgatttgtttgatcagcttaaaggtgccactgttttctccaagatagatcttcgatcagggtatcaccagttaagaatcaaagaggaagatatacctaagacagcttttaccactaggtatgggttgttcgaatgtactgttatgtcttttggacttaccaatgcccctgctttcttcatgaacttgatgaataaggtgtttatggaatacctagacaagtttgtggtggtctttattgatgatattcttatctactctcgaaccaaagaagagcatgaagaacatcttcgccttgcattggagaagctacgagagcatcaattgtatgccaagtttagcaagtgtgaattttggttgtctgaagtgaaattccttggtcacgtcatctcagccggaggagttgccgttgatcctagtaatgtggaatccgtaaccaattggaagcaaccgaagacagtttcagagatccgcagtttcctaggcctcgcaggatattaccggaggtttatagagaatttttctaagattgctaagcccatgacacgactgcttcagaaagatgtgaagtacaagtggtcggaagaatgtgaacagagttttcaagagttgaaaagtcgcttaatatcagctcctattttgattttgcctgatccaaagaagggtttccaagtgtattgcgatgcatccaaacttgggttaggttgtgttctgatgcaagatgggaaggtggttgcctatgcatctcgtcagttacgtccgcatgagaagaactaccctactcatgatcttgagttagctgcagtagttcatgcgttgaaaatttggcgtcattatcttttcggtactcgtacagaggtgtacaccgatcacaagagtttaaagtatatctttactcagccggatctgaacatgagacaacggagatggttggaattaagtaaggattatgacatgggaattcattatcacccaggaaaggctaatgttgtagccgacgctcttagcaggaaaggctattgcaatgctacagaaggacgacagttgccattggaattatgcaaggaatttgaaagattaaatttgggaattgtcagtagaggttttgttgcagccttagaagcgaagcccactctaattgatcaagttagagaagcccaaattaatgatcctgatattcaagaaatcaagaagaatatgagaagaggaaaagctatcggtttcttggaggatgagcacggaactcgagtcaaggcagaacatcagaaacctgccggtttgttgcagcctttgaagattcctgaatggaaatgggaagaaattggtatggattttatcactggtttgcccagaacgtcatcaggccatgactctatttgggtaatagtcgacagacttaccaaagtggctcattttattccggtaaaaacaacctattccggaagtcgcttagcaaaattgtatatggcaaggattgtgtgtttgcatggcgtccctaagaaaatagtgtctgatcgaggcagtcagtttacttcaaatttttggaagaaacttcaggaagagatgggttctaagttgaactttagcactgcttatcatccgcagacagacggacagaccgaaagagtgaatcagattttggaagacatgttgagagcttgtgctttagacttcggtggaagttgggataagaatctaccctatgcagaattctcgtacaacaacagttatcaagctagtctgcagatggctccttacgaagcactgtatggtcggaagtgccgcactccgcttttgtgggatcaaacgggagaacgtcaggttttcgggacggatatcctaagggaagcagaagaaaaggtgaaaatcattcaagaaagattgcgagtggctcagtctcgacataagagttatgccgacaatcgccgcagagatttgagttttgaagaaggagattatgtgtatcttcgtgtcacgcctcttcgaggtgttcatcgttttcacaccaaaggaaaattggcaccgcgttttgtgggaccttataagattgtcagtagaagaggagaggttgcttatcagttggagttacctcaatccttggcaggagtccataatgtgttccatgtgtcgcaattgaaaaagtgtttaagggtacctaccgaagaagctaatcttgaacagatagaagtccaagaggatctgacctatgttgagaaaccaatccgtatcttggaaacaaatgagagaaaaaccaggaatcgagttatccgtttttgtaaagtccagtggagtaatcactcggaagaagaatcaacttgggaacgagaagatgaattgaagtcagctcatccgcatctgttcgccagttcttccgaatctcgaggacgagattctgtttaa

SEQ ID NO: 15087 - DNA, 5128 bp, Oryza sativa
  Clone ID: TFbOSC101716j.C1.o1.np
ctcctggtttggaatggtatattcctggtttggagatagaactgtgcagccgggatggttgttcagaatggttgggcctatgcaacaggatgccgcgctacaagcctgagtacttgtttggtgttgagggttttgtccaggagttgcgtacgatgtcctttgtcattggatttgggactgcccctttttatgcccagattcctcatgatcgtcatgaagagaagtgccgagtcaaagtcaccttgaacagtaatagtgaagatatcccctcagtgatgtttgaagctggaggaagaaactacatccatgcatgtcaggaggtggcaaggatcgccataggagagctccgtgatcgctacagtgatcagttggccgacactgagtatcgctaccatcctcgccaaccccagggaagtgaccgtggcagttaccttgagactgaaggaattgagaatgatgctaccacaaggcatttggttgagatgctgtgggctatggatgaaagccgcgcggagactgtgttagcagctcaagatcgtgaagattggaatcgtggtaagatttgcaagttagaagacaaggtggatcgtttggagaaggaactagccgcattgaagggagaagcaccacctcaaaaggccaggattcgtcttaccgcaaggaagagagctctatttgtccctcgctatcaattggcgccaaagatggtgaacactcgcagcaacgggaatggccccaacaacaacaacaacaataacaacaacaatgaagggaacccaacccttgctcaagttcttgctcaacagactcagttaatgaacatgatgatgcagcaacttcagaatcagcaaaaccagggaaataaccatgcacctccccagaacaagttagcagaatttcttcgtgtgaggccgcctattttctctagtaccactaatcctgttgaagctggtgattggttgcatgccatagagaagaagttggatttgcttcagtgcactgatcaggagaaggtctcatttgcatcacaccagttgcatggccctgcctctgaatggtgggatcacttccgcctgaataggactactgctgaacctatcacttggcttgaattcaccgctgctttccggaagacgcatataccatcgggagtggtgtctctcaagaagaaggagttcaggtcgctcacccagggatctcgctctgttacggagtatttgcacgagttcaatcgtctggctcgttatgctccggaagatgttcgcaatgatgaagagcgccaggagaagttcttggaaggacttaatgatgagctttcttacccactcatgactggagattattctgatttccagaagttggtggataaggctattcgtcaggaggacaaatacaatcgcatggagcagaagaaacgccggattgctcaattcaagacacaacaggggaataatcagaagccgcgtcttactttaggaccccagtctgtgccacaggggggttcttcgtctgttgttcgtccgcagcgtcagttcttcaacaacaatgctggcaacaacatccgcaatcaagctccacgtcctgttgcagctccaacacagcaacagcctgccaagagggagcaaggcaacaagcccgtggtgtgtttcaactgtggagacccaggacattatgctgacaagtgtccgaagccccgacgtgtgaaggttgtccctgtccagagcagctctaccgcactagcattaaaggcccgtgtcaatcatgttgctgctgcagaagctcaagatgctccagatgtgattttgggtacgtttcctgttaacttagttcctgcaacagtgcttttcgattctggtgctacacattcattcttatctatgagttttgcgggaaatcatgggatggaagtagaagatcttagacgtcctttgatggttagtaccccaagtaatcaagcactctccttgcaacgtagcccctctgtcagaatagaaattcaaggagtaccatttctggccaatcttatactgttagaatccaaagaccttgatgtcatcctagggatggactggttagccagacataaaggtgtgatagactgtgccaacagaaaagtaactctcaccagcaatgatggtcgagttgtaactgttcatgtattgtcttctgagtctttaaggtcaagactgaaccaaataactttggaagagattcctatagtccgggagtatcccgatgtgttcccagatgatttacctggtatgccgccgaaaagggatatagagttcagaatagatttggtacctggaacaactccgatccataagagaccttatagaatggcagccaatgagttggcagaagttaagaggcaagtagacgatttgcttcagaaaggatacatcagaccgagttcatctccatggggagctccagttatttttgtggaaaagaaagaccatacccagaggatgtgtgtggactatcgtgccctaaatgatgtgactatcaagaataagtacccgctacccagaattgatgatttgtttgatcagcttaaaggtgccaccgttttctccaagatcgatcttcgatcagggtatcaccagttgagaatcaaagaggaagatatacctaagacagcttttaccactaggtatggattgttcgaatgtactgttatgtcttttggacttaccaatgcccctgctttcttcatgaacttgatgaataaggtgtttatggaatacctagacaagttcgtggtggtatttattgatgacattcttatctactctcgaaccaaagaagagcatgaagaacatcttcgccttgcattggagaagctacgagaacatcaactgtatgctaagtttagcaagtgtgaattttggttgtctgaagtgaagttccttggtcacgtcatctcagcaggaggagttgccgttgacctagtaatgtggaatccgtaaccaactggaaacaaccgaagacagtttcagagatccgcagtttcttaggcctcgcaggttattatcggaggtttatagagaatttttccaagattgctaagcccatgacacgactgcttcagaaagatgtgaagtacaagtggtcggaataatgtgagcagagttttcaagagttgaagaatcgcttgatatcagctcctatcttgattttacctgatccaaagaagggttttcaagagtattgcgatgcatccaaacttgggttaggttgtgttctgatgcaagatgggaaggtggttgcctatgcatctcgtcagttacgtccgcatgagaagaactaccctactcatgatcttgagttagctgcagtagttcatgcgttgaagatttggcgtcattatcttttcggtactcgtacagaggtgtataccgatcacaagagtttaaagtatatctttactcagccggatctgaacatgagacagaggagatggttggaattaattaaggattatgacatgggaattcattatcacccgggaaaggctaatgttgtagcagatgctcttagcaggaaaggctattgcaatgctacggaaggacgacagttgccattggaattatgcaaggaatttgaaagattaaatttgggaattgtcagtagaggtttcgttgcagccttagaagcgaagcccactctaattgatcaagttagagaagcccaaattaatgatcctgatattcaagagatcaagaagaatatgagaagaggaaaagctatcggtttcatggaggatgagcaaggaactgtatggttgggcgagagaatctgtgtccccgacaacaaagatttaaaagatgcaattctgaaagaagctcatgatactttatattccattcaccctggtagtactaagatgtaccaggatctcaaggaaagattttggtgggcaagtatgaagcgtgaaatcgcagaatacgtagcagtatgtgatgtctgtcagcgagtcaaggcagaacatcaaaaacctgccggtttgttgcagcctttgaagattcctgaatggaaatgggaagaaatcggtatggattttatcactggtctacccagaacgtcatcaggccatgactctatttgggtgatagtcgacagacttaccaaagtggctcatttcatcccagtgaagacaacatattccggaagtcggttggcggaattgtatatggcaaggattgtgtgtttgcatggcgttcctaagaagatagtgtctgatcgaggcagtcagtttacttcaaatttttggaagaagcttcaggaagagatgggttctaagctgaactttagtactgcttatcatccgcaaacagatggacaaactgaaagggtgaatcagattttggaagacatgttgagagcttgtgctttagatttcggtggaagttgggataagaatctaccttatgcagaatttccgtataacaacagttatcaagctagtcttcagatggctccttacgaagcactgtatggtcggaagtgccgcactccgcttttgtgggatcaaacgggagaacgtcaggttttcgggacggatatcctaagggaagcagaagaaaaggtgaaaatcattcaagaaagattgcgagtggcccagtctcgacataagagttatgccgacaatcgccgcagagatttgagttttgaagaaggagattatgtgtatcttcgtgtcacgcctcttcgaggagttcatcgtttccacaccaaaggaaaattggcaccgcgttttgtgggaccttataagattgtcagtagaagaggagaggttgcttatcagttagagttacctcaatctttggcaggagtccataatgtgttccatgtgtcgcaattgaaaaagtgtttaagggtacctaccgaagaagctaatcttgaacagatagaagtccaagaggatctgacctatgttgagaaaccaatccgtattttggaaatagatgagagaaggaccaggaatcgagttatccgcttttgcaaagtccagtggagtaatcactcggaagaagaatcaacttgggaacgagaagatgaattgaagtcagctcatccgcatctgttcgccagttcttctgaatctcgaggacgagattctgtt

SEQ ID NO: 15088 - DNA, 309 bp, Oryza sativa
  Clone ID: TFbOSC101716j.C1.o2.gm
atgggccgccggcccatctcctcctttcctccccctcctccctgctgggccggccgcaggccgaggcccagccggccgcccgcctccctccctcccggggtcgccgacaggtggggcccacctgtcggacccgtctcccacctcccgcctctcccgctcgcgccgtcccgccgaaaccgctgccgccgcacccacttcctccgctttccccgcgcccacgccacgtcgccgcgcccacgccacgtcgccgccctctccccgcgtctcccggccgcgccagcgcacgagaggggcgggattcgattttga

SEQ ID NO: 15089 - DNA, 3288 bp, Oryza sativa
  Clone ID: TFbOSC102284j.C1.o1.fg
atgtggggctgtgtcttgtgggtacagtggtacacctctgatcagagtaaaactattcgaatagccgtgcccgcggttatggctcctggtttggaatggtatattcctggtttgaagatagaactgtgcagccgggatggttgttcagaatggttgggcctatgcaacaggattcctcatgatcgtcatgaagagaagtgccgagtcaaagtcactttgaacagtaatagtgaagatatcccctcagtgatgttcgaagctggaggaagaaactacatccatgcatgtcaggaggtagcaaggatcgccataggcgagctccgcgatcgctacagtgatcagttggccgacactgagtatcgctaccattctcgtcaaccccagggaagtgaccgtggcagctaccttgagactgagggaattgagaatgatgctaccacaaggcatttggttgagatgctgtgggctatggatgaaacccgtgcagagactgtgttagcagctcaagatcgtgaagatcggaatcgaggtaagatttgcaagctagaggacaaagtggatcgattggagaaggaactagccgcgttgaagggagaagcaccaccgcagaaggccaggatttgtcttaccgcaaggaagagagctctatttgtccctcgctatcaattggcaccaaaggtccgtgtggtggaaaaagaagttaccccagccctagcggatcctccggtcgtcaacatggtggtcactcgcagcaacgggaatggccccaacaacaacaataacaacaacaacaatggagagaatcccacacttgcccaagtcctggctcaacaggcacagcttatgaacatgatgatgcagcaactccagaaccagcagaaccagggaaataaccatgcacctccccagaacaagttagcagaatttcttcgtgtgaggccgcctactttctctagtaccactaatcctgttgaagctggcgattggctgcatgccatagagaagaagttggatttgcttcagtgcactgatcaggagaaggtctcatttgcatcacaccagttgcatggccctgcctctgaatggtgggatcacttccgcctgaataggactactgctgaacctatcacttggcttgagttcaccgctgctttccggaagatgcatataccatcgggagtggtgtctctcaagaagaaggaatttaggtcgctcacccagggatcccgctctgttacggagtatctacacgagttcaatcgtctggctcgttatgctccggaagatgtgcgcactgatgaagagcaccaggagaagttcttggaaggacttaatgatgagctttcttacccactcatgactggggattatcatgatttccagaagttagtggataaggctattcgtcaggaggacaagtacaatcgcatggagcagaagaaacgccggattgctcaattcaagacacaacaggggaataatcagaggccgcatcttactttaggaccccagtccatgccacagggaggttattcgtctgttgttcgtccgcagcgtcagttcttcaacaacaatgctggcaacaacatccgcaatcaagttccacgtcctgttgcagcctcgacacagcaacaacctgccaagagggagcaaggcagcaagcccgtggtgtgtttcaactgtggagacccaggacattacgctgacaagtgtccgaagccccgatgcgtgaaggttgtccctgcccagagcaactctaccgtatcagcatcaaaggcccgtgtcaatcatgttgctgctgcagaagctcaaggtgctccagatgtgattttgggtacgtttcttgttaactcagttcctgcaacagtgcttttcgattctggtgctacacattcattcttatctatgagttttgcgggaaatcatgggatggaagtagaagatcttagatgtcctttgatggttagtaccccaagtaatcaagcactctctttgcaacgtagcccctctgtcagaatagaaattcaaggagtaccatttctggccaatcttatcttgttagagtccaaagaccttgatgttatcctagggatggactggttagccaggcataagggtgtgatagactgtgctaacagaaaagtaactctcaccagcaatgatggtcgagttgtaactgttcatgcattgtcttctgagtctttaaggtcaatactgaaccaaataactttggaagagattcctatagtccgggagtatcccgatgtgttctcagatgatttacctggtatgccgcctaaaagggatatagagttcagaatagatttggtaccaggaacaactccgatccataagagaccttatcgaatggcagccaacgagttggcagaagtcaagaggcaagtggacgatttgcttcagaaaggaattgatgatttgtttgatcagcttaaaggtgccactgttttctccaagatagatcttcgatcagggtatcatcagttgagaatcaaagaggaagatatacctaagacagcttttaccactaggtatgggttgttcgaatgtactgttatgtcttttggacttaccaatgcccctgctttcttcatgaacttgatgaataaggtgtttatggaatacctagacaagttcgtggtagtctttattgatgatattcttatctactcccgaaccaaagaagagcatgaagaacaccttcgccttgcattggagaagctacgagagcatcaactgtatgctaagtttagcaagtgtgaattttggttgtctgaagtgaagttccttggtcacgtcatctcagcaggaggagttgccgtcgatcctagtaatgtagaatccgtaaccaactggaaacaaccaaagaccgtttcagagattcgcagtttcctaggcctcgcaggatattatcggaggtttatagagaatttttccaagattgctaagcccatgacacggctgcttcagaaagatgtgaagtacaagtggtcagaagaatgtgagcagagttttcaagagttgaagaatcgcttaatatcagctcctattttgatcttacctgatccaaagaagggattccaagtgtattgcgatgcatccaaacttgggttaggttgtgttctgatgcaagatgggaaggtggttgcctatgcatctcgtcagttacgtccgcatgagaagaactaccctactcatgatcttgaattagctgcagtagttcgtgcgttgaagatttggcgtcattatcttttcggtactcgtacagag

SEQ ID NO: 15090 - DNA, 4611 bp, Oryza sativa
  Clone ID: TFbOSC10947j.C1.o2.fg
atgtctttcgtgattagtctcacccttctcaccatagtaaatgatgctataactggtaataatttgattagctcctggtttggaatgatgccgcgctacaagcctgagtacttgtttggtgtggagggttttgtccaggagttgcgtacaatgtcctttgtcattggatttgggactgcccctttttatgcccagattcctcatgatcgtcatgaagagaagtgccgagtcaaagtcaccttgaacagtaatagtgaagatattccctcagtgatgttcgaagctggaggaagaaactacatccatgcgtgtcaggaggtggcaaggatcgccataggagagcttcgcgatcgctacagtgatcagttggccgatacggagtatcgctaccatcctcgtcaaccacagggaagtgaccgtggcaattaccttgagactgaaggaattgagaatgatgctaccacaaggcatttggttgagatgctgtgggctatggatgaaagtcgtgcggagactgtattagcggctcaagatcgtgaagaccggaatcgtggtaagatttgcaagctagaagacaaggtggatcgtttggagaaggaattagccgcattgaagggagaagcaccgccgcagaaggccaggattcgtctcactgcaatgaagagagctctatttgtccctcgctatcaattggcgccaaagatggtgaacactcgcagcaatgggaatggccccaacaacaacaacaataacaacaacaacagtggagagaatcccacacttgcccaagtcctggctcaacagacacagcttatgaacatgatgatgcagcaactccagaaccagcaaaaccaaggaaataaccatgcacctccccagaacaagttagcagaatttctgcgtttgcatggccctgcctctgaatggtgggatcactttcgcctgaacaggattactgctgaacctatcacttggcttgaattcaccgctgctttccggaagacgcatataccatcgggagtggtgtctctcaagaagaaggagttcaggtcgctcactcagggatctcgctctgttacggagtatttgcacgagttcaatcgtttggctcgttatgctcctgaagatgtgcgcaatgatgaagagcgtcaggagaagttcttggaaggacttaatgatgagctttcttacccactcatgactggagattatcctgatttccagaagttagtggataaggctattcgtcaggaggacaaatacaaccgcatggagcagaagaagcgccggattgctcaattcaagacacaacaggggaataatcagaggccgcgtcttactttaggaccccagtccgtgccacagggaggttcttcgtctattgttcgtccgcagcgtcagttcttcaacaacaatgctggcaacaacatccgtaatcaagttccacgtcctgttgcagctccaacacagcaacaacctgccaagagggagcaaggcagcaaacccgtggtgtgtttcaactgtggagacccaggacattacgctgacaagtgtccgaagccccgacgcgtgaaggttgtccctactcagagcaactctaccgcaccagcatcaaaggcccgtgtcaatcatgtcgctgctgcagaagctcaagatgctccagatgtgattttgggtacgttccttgttaacttagttcctgccacagtgcttttcgattctggtgctacacattcattcttatctatgagttttgcgggaaatcatgggatggaagtagaagatcttagacatcctttgatggttagtaccccaagtaatcaagcactctctttgcaacgtagcccctctgtcagaatagaaattaaaggagtaccatttctggccaatcttatcttgttagaatccaaagaccttgatgtcatcctagggatggactggttagccagacataaaggtgtgatagactgtgctaacagaaaagtaactctcaccagcaatgatggtcgagttgtaactgttcatgcattgtcttctgagtctttaaggtcaagactgaaccaaataactttggaagagattcctatagtccaggagtatcccgatgtgttcccagatgatttacctggtatgccgcctaaaagggatatagagttcagaatagatttggtaccaggaacaactccgatccataagagaccttatagaatggcagccaatgagttggcagaagttaagaggcaagtagacgatttgcttcagaaaggatacatcagaccgagttcatcaccatggggagctccggttatttttgtggaaaagaaagaccatacccagaggatgtgtgtggactatcgtgcactaaatgatgtgactatcaagaataagtatccactacccagaattgatgatttgtttgatcagcttaaaggtgctactgttttctccaagatagatcttcgatcagggtatcaccagttgagaatcaaagaggaagatatacctaagacagcttttaccactaggtatgggttgttcgaatgtactgttatgtcttttggacttaccaatgcccctgctttcttcatgaacttgatgaataaggtgtgtatggaatacctagacaagttcgtggtggtctttattgatgatattcttatctactctcgaaccaaagaagagcataaagaacatcttcgccttgcactagagaagctacgagaacatcaactgtatgctaagtttagcaagtgtgaattttggttgtctgaagtgaagttccttggtcacgtcatctcagcaggaggagttgccgtcgatcctagtaatgtggaatccgtaaccaactggaaacaaccaaagacagtttcagaaattcgcagttttctaggcctcgcaggatattaccggaggtttatagagaatttttccaagattgctaagcccatgacacgactgctacagaaagatgtgaagtacaagtggtcagaagaatgtgagcagagttttcaagagttgaagaatcgcttgatatcagctcctattttgattttacccgatccaaagaagggtttccaagatgggaaggtggttgcctatgcatctcgtcagttacgtccgcatgagaagaactaccctactcatgatcttgagttagctgcagtagttcatgcgttgaaaatttggcgtcattatcttttcggtactcgtacagaggcaaatgttgtagccgacgctcttagcaggaaaggctattgcaatgctaccgaaggacgacagttgccattggagttatgccaggaatttgaaagattaaatttgggaattgtcagtagaggtttcgttgcagctttagaagcgaagcccactctaattgatcaagttagagaagcccaaattaatgatcctgatattcaagagatcaagaagaatatgagaagaggaaaagctatcggtttcttggaggatgagcaaggaactgtttggttgggcgagagaatctgtgtccctgacaacaaagatttgaaagatgtaattctgaaagaagctcatgatactttatactccattcaccctggaagtactaagatgtaccaggatctcaaagaaagattttggtgggcaagtatgaagcgtgaaatcgcagaatacgtagcagtatgtgatgtttgtcagcgtgtcaaggcagaacatcagaaacctgccggtttgctgcagcctttgaagattcctgaatggaaatgggaagaaatcggtatggattttatcactggtttacccagaacgtcatcaggccatgactctatttgggtaatagtcgatagacttaccaaagtggctcattttattccggtaaagacaacttattccggaagtcggttggcagaattgtatatggcaaggattgtgtgttcgcatggcgtccctaagaaaatagtgtctgatcgaggcagtcagtttacctcaaatttctggaagaaacttcaggaagagatgggttctaagctgaactttagcactgcttatcatccgcagacagacggacaaaccgaaagggtgaatcagattttggaagacatgttgagagcttgtgctttagatttcggtggaagttgggataagaatctaccttatgcagaattttcgtacaacaacagttatcaagctagtatacagatggctccttacgaagcactgtatggtcgtaagtgccgcactccgcttttgtgggatcaaacgggagaacgtcaggttttcgggacggatattctaagagaagcagaagaaaaggtgaaaatcattcaagaaagattgcgagtggctcagtctcgtcataagagttatgccgacaatcgccgtagagatttgagttttgaagaaggagattatgtgtatcttcgtgtcacgccttttcgaggagttcatcgttttcataccaaaggaaaattagcaccgcgttttgtgggaccttataagattgtcagtagaagaggagaggttgcttatcagttagagttacctcaatccttggcaggagtccataatgtgttccatgtgtcgcaattgaagaagtgtttaagggtacctaccgaagaagctaatcttgaatag

SEQ ID NO: 15091 - DNA, 5037 bp, Oryza sativa
  Clone ID: TFbOSC11372j.C1.o1.fg
atgccgcgttacaagcctgagtacctgtttggtgttgagggttttgtccaggagttgcgcacgatgtcctttgtcattggatttgggactgcccctttttatgcccagattcctcatgatcgtcatgaagagaagtgccgagtcagagtcaccttgaacagcaatagtgaagaggtcccctcagtgatgtttgaagctggaggaagaaactacatccatgcatgtcaggaggtggcaaggatcgccataggagagctccgtgatcgctacagtgatcaattggccgacactgagtatcgctaccatcctcgccaacctcagggaagtgaccgtggcagttaccttgagactgaaggaattgagaatgatgttaccacgaaacatttggttgagatgttgtgggctatggatgaaagtcgtgcggagactgtgttagcagctcaagatcgtgaagatcggaatcgtggtaagatttgcaagttagaagacaaggtggatcgtttggagaaggaattagccgcattgaagggagaagcaccgccgcagaaggccaggattcgtcttaccgcaaggaagagagctctatttgtccctcgctatcaactggcgccaaagatggtgaacactcgtagcaatgggaatggtcccaacaaccccaataacaacaacaatggagagaatcccactctggcccaagttcttgctcaacagacacagcttatgaacatgatgatgcagcaatttcagaatcagcaaaaccaagggaataatcatgcacctccccaaaacaagttagcagaatttcttcgtgtgaggccgcctgttttctctagtaccactaatcctgttgaagctagtgattggctgcatgccatagagaagaagttggatttacttcagtgtactgatcaggagaaggtctcatttgcatcacatcagttgcatggccctgcctctgaatggtgggatcacttccgccttaacaggactactgctgaacctatcacttggcttgaattcaccgctgctttccggaagacgcatataccatcgggagtagtgtctctcaagaagaaggagttcaggtcgctttcccagggatctcgctctgttacggagtatctgcacgagttcaatcgtcttgctcgttatgctccggaagatgtgcgcaatgatgaagagcgccaggagaagtttttgggaggacttaatgatgagctttcttacccactcatggttggagattatcctgatttccagaaattagtggataaggctattcgtcaggaggacaagtacaatcgcatggagcagaagaaacgtcggattgctcaattcaagacacaacagggaaataatcagaagccgcgtcttactttaggaccccagcccatgccacagggaggttcttcgtctgttgttcgtccgcaacgtcagttcttcaacaacaatgctggcaacaacatccgtaatcaagctccacgtcctgttgcagctccagcacagcaacaacctgccaagagggagcaaggcaacaagcccgtggtgtgtttcaactgtggagatccaggacattatgctgacaagtgtccgaagccccgacgtgtgaaggttgtccctgcccagaataactctgctgtaccagcatccaaggctcgtgtaaatcatgtcgctgctgcagaagctcaagatgctccagatgtgattttgggtacgttccttgttaactcagttcctgcaacagtacttttcgattctggtgctacacattcattcttatctacgagttttgcgggaaatcatgggatggaagtagaagatcttagacgtcctttgatggttagtaccccaagtaatcaagcactctctttgcaacgtagcccctctgtcagaatagaaattcaaggagtaccatttctggccaatcttatcttgttaaaatccaaagaccttgatgtcatcctagggatggactggttagccagacataaaggtgtgatagactgtgccaacagaaaagtaactctcaacagctatgatggtcgagttgtaactgttcatgcattgtcatctgagtctttaaggtcaagactgaaccagataactttggaagagattcctatagtccgggagtatcctgatgtgttcccagatgatttacctggtatgccgcctaaaagggatatagagttcagaatagatttggtacctggaacaactccgatccataagagaccttatcgaatggcagccaatgagttggcagaagttaagaggcaagtagatgatttgctacagaaaggatacatcagaccgagttcatcaccatggggagctccggttatttttgtggaaaagaaagaccatactcagagaatgtgtgtggactatcgtgcactaaacgatgtgactattaagaataagtatccactacccaggattgatgatttgtttgatcaacttaaaggtgccactgttttctccaagatagatcttcgatcagggtatcatcagttgagaatcaaagaggaggatatacctaagacaacttttaccactaggtatgggttgtttgaatgtactgttatgtcttttggacttaccaatgcccctgctttcttcatgaacttgatgaataaggtgtttatggaatacctagacaagttcgtggtggtctttattgatgatattcttatctactctcgaaccaaagaagagcatgaagaacatcttcgccttgcattggagaagctacgagaacatcaactgtatgctaagtttagcaagtgtgaattttggttgtctgaagtgaaattccttggtcacgtcatctcagccggaggagttgccgtcgatcctagtaacgtggaatccgtaaccaattggaagcaaccaaagacagtttcagagattcgcagtttcctaggccttgcaggatattatcggaggtttatagagaatttttccaagattgctaagcccatgacacgactgcttcagaaagatgtgaagtacaagtggtcggaagaatgtgaacagagttttcaagaattgaaaagtcgcttaatatcagctcctattttgattttgcctgatccaaagaagggttttcaagtgcattgtgatgcatccaaacttgggttaggttgtgttctgatgcaagatgggaaggtggttgcctatgcctctcgacagttacgtccgcatgagaagaactaccctactcatgatattgagttagctgcagtcgttcatgcattgaagatttggcatcattatcttttcggtactcgtacagaagtgtacaccgatcacaagagtttaaagtatatctttactcagccggatctgaacatgagacaacggagatggttggaattaattaaggattatgacatgggaattcattatcatccgggaaaggctaatgttgtagcagacgctcttagcagaaaaggctattgcaatgctacagaaggacgacagttgccattggaattatgcaaggaatttgaaagattaaatttgggaattgtcgatagaggtttcgttgcagccttagaagcgaagcccactctaattgatcaagttagagaagcccaaattaatgatcctgatattcaagagatcaagaagaatatgagaagaggaaaagctattggtttcttggaggatgagcacggaactgtatggttgggtgagagaatctgtgtccccgacaacaaagatttaaaggatgcaattctgaaagaagctcatgatactttatactccattcaccctggtagtactaagatgtaccaggatcttaaggaaagattttggtgggcaagtatgaagcgtgaaatcgcagaatacgtagcagtatgtgatgtttgtcagcgagtcaaggcagaacatcaaaaacccgccggtttgttgcaacctttgaagattcctgaatggaaatgggaagaaattggtatggattttattactggtttacccagaacgtcatcaggccatgactctatttgggtgatagtcgacagacttaccaaagtggctcatttcattccggtaaagacaacttattccggaagtcgcttagcggaattgtatatggcaaggattgtgtgtttgcatggcgtccctaagaagatagtgtctgatcgaggcagtcagtttacttcaaatttttggaagaaacttcaggaagagatgggttctaagctgaactttagtactgcttatcatccgcagacagacggacaaaccgaaagggtgaatcaaattttggaagacatgttgagagcttgtgctctagatttcggtggaagttgggataagaatctaccctatgcagaattttcgtacaacaacagttatcaagctagtcttcagatggctccttacgaagcactgtatggtcggaagtgtcgcactccgcttttgtgggatcaaacgggagaacgtcaggttttcggaacggatatcctaagggaagcagaagaaaaggtaaagatcattcaagaaagattgcgtgtggctcagtctcgtcataagagttatgccgacaatcgccgcagagatttgagttttgaagagggagattatgtgtatcttcgtgtcacgcctctacgaggagttcatcgttttcataccaagggaaaattggcaccgcgttttgtgggaccttataagattgtcagtagaagaggagaggttgcttatcagttggagttacctcaatctttggcaggagtacataatgtgttccatgtgtcgcaattgaaaaagtgtttaagggtacctaccgaagaagctaatattgagcagatagaagtccaagaggatttgacttatgttgagaaaccaatccgtatcctggaaacaagtgagagaagaaccaggaatcgagttatccgtttttgcaaagtccagtggagtaatcactcggaagaagaatcaacttgggaacgagaagatgaattgaagtcagctcatccgcacctgttcgccagttcttccgaatctcgaggacgagattctgtttaa

SEQ ID NO: 15092 - DNA, 4940 bp, Oryza sativa
  Clone ID: TFbOSC13115j.C1.o5.np
gtgacaagttggtatcagagccaccttgaccttaggataagccaaatgatgccgccccattcaccgagaaatttgatcgaggtgttaggattcgtcagggagctaagattgatggtttttgaggtaggttatgaagttgctcccgagtatcgccaaatttcccatgaccccgacgaggagaagtgtcatgttcgtgtgacgttggctagtgatcgtgaagaccttccgtctattaagttcgaagctggaggaagatcgtacagccatgcttgtcaagaagcagctttggtggccattggagagttgcgtcaacgctttgaagaagagttggattcatcagctttctagtatcatcctcacaagcctcatggtcaagactatggaacctatatctgtcctgatggtgaagagagtgccactctgatgcatgtggtgcatatgcttagtgctatggatgcagtaagtgtggagcgagacaaagcagctcatgacagggaaaactggaatcgaggcaagatttgcaagttggagagcaaggtgtaccgtctacagaaggaattagctgaacttaaaggagaaacgccgccgccaacacccaagcttcgcctcgtcgcaagaaagagaacctgtccgccacctcgtctccagttagcctcgaagattcgtgtgatgggcgaagctgtgcccgatcgtgctgaacctgtcatcgacatcataagtgatgaggaagaagaggaagaccctgaagaaagagagccagctactccagaggaagaagatccatcgcttcgttccgacacaaggcggaccaccaatccagtagaagcaggagactggctgcatgcggtggaaaagaagttggatttgatccagtgtactgagcaggagaaagtttcttttgcttcgcatcaactgcatggacctgctgccgaatggtgggatcattttcgccaaggcagggctgaaggagagcctattacgtggcaggaattcacggctgctttcaagaagacacacataccagcgggtgttgtagctctaaagaagagagaatttagagcactcaaccagggatctcgttcggtcactgagtacctccatgatttcaaccgtttagctcgctatgctccagaggatgttcgcactgatgaagaacgtcaggagaagtttttagagggactgaatgatgagttgtcttatgccttgatgtctacggatttccgggatttccagcaattggtggacaaggcgattcgtcaggaagacaagtataaccggatggagcagaagaagcgcagggctgcccaattcaaggcacaacagggcagtaaccagaggccacgtctcgttattggacctcaagctccatcgtaccctcaaggaggatcttcatcagttatccgcccccaacgccagttctacaacaacaatactggtaatcgtggcaatgacaaccgcaacgtggttgctcgtcctgcagcaactccagctcagaaccagcctgtcaggaaggaacagggaagcaaaccagtggtgtgcttcaattgtggtgatccaggacattatgctgataagtgtcctaagcctcggcgcgtgaagaacgctccagctccgaacaactccaatgttccagtaccaaaggcacgtgtcaatcatgtggtagcagcagaagctcagaatgcaccatatgtggttttgggtacgtttcctgttaactctatacccgcaactgtgctttttgattccggtgctacacattcctttttgtctaaaagttttgcgagcaatcatgggatggaagttgttagtcttgggagacctttactagttaacaccccaggcaatcaagtattttcgacacagtattgtccttccgctactatagaaatagaagaagttcctttcccatcctcacttatcttgctagaatccaaggatctagatgttatcttagggatggactggttatctcgtcacagaggagttatagattgtgtcaaccgtaaggtgactttaactagtagcaatggggaaaccgtttctttctttgtgtcctctcctaaatctcatggtgtgaacttaaaccaagttgctctacaagagattcccatagtacaagactacccagacgtgtttcccgaggatttgccaggtctgccacctaagagagacatagagtttcggatagacttggtacctggaaccaaccctatccataagagaccatacagaatggcagctaatgagttagctgaagtgaagagacaggtggatgatttgcttcagaaaggatacattagacccagtacttcgccatggggagcaccagtcatctttgtggagaagaaagatcatactcagagaatgtgcgtggattatcgagcgttgaatgaggtcactatcaagaataagtatcctctacccagaattgatgacctctttgatcaattgaaaggtgctacagttttctccaagatagatctccgttctggatatcatcaacttcgaatccgtgaggaagatataccaaagaccgccttcacaactcggtatggtttgttcgaatgtaccgttatgtcatttggactcactaatgccccagcctttttcatgaatctgatgaacaaggtgtttatggaatatctggataagtttgtcgtggtgtttattgatgacattctcatttactccaagacgaaggaagaacatgaggagcatcttcgtctagctttagagaaactacgtgagcatcagctttatgccaagttcagtaaatgtgaattttggttgtccgaagtgaagtttcttggacatgtcatctcgtctggaggagtggcagtagatccaagcaatgtggagtcagtgttaagttggaagcaacccaagacggtttcagaaattcgtagtttccttggacttgcaaggtattaccgcaggtttattgagaacttttcaaagatcgccagaccaatgactcgtctgcttcagaaggaagtgaagtacaagtggacagaggattgtgaacgaagtttccaagaactgaagaaaaggctagtgactgcacctgtattaattttgcctaattcgaggaaaggtttccaagtgtattgtgatgcatcccgacacggtttgggttgtgtgttgatgcaagaaggaaaggtggttgcctatgcatctaggcagttacgtcctcatgagaataactacccaacgcatgacctagaattggcagctgtggtgcatgcattgaagatttggcgtcattatcttttcggtaaccgtacagagatgtatacggatcataaaagtttgaagtacattttcactcaacctgatttgaacatgcgtcagcgaagatggttagagttgattaaagattatgatatggaaatccactatcacccggggaaagcaaatgttgtagccgatgctcttagcaggaaaagctactgtaatatgtcagaaggtcgacgtttaccttggaagttatgccaagaatttgaaaagttgaacttgggaatagtcagcaaaggttttgtggctactttggaagctcaacctactctgtttgatcaagttagagaagctcaagtgaatgatcctgacatacaagaaattaaaaagaacatgagaagaggtaaagccatcggttatgtagaagatgagcaaggaactgtgtggttgggagaaagaatttgcgtcccagaaaataaggagttgaaggatactatcatgaaagaagctcatgaaactttgtattccattcaccctggaagcaccaagatgtaccaagacttaaagcaacaattctggtgggccagtatgcgacgtgagatagcagaatatgtggctctatgtgatgtatgtcagcgggtcaaggcagaacatcagaagccagccggtctgttacaaccgttgaagattccagagtggaagtgggaagaaataggaatggattttataaccggtctacccagaacgtcagcaggacatgattctatttgggtagtggttgataggttgacaaaagtcgctcacttcatacctgtcaaaacaacctatacggggaataagcttgcagagttatacatggccagagtggtatgtttgcatggcgttcctaagaagatagtgtcagatagaggtagccagtttacttcgaagttttggcagaaattacaagtagagatgggtacccgtttgaatttcagtaccgcctatcaccctcaaacagatggtcagacggaaagagtaaaccaaattttagaagatatgttgagagcctgtgttctagattttggtggaagttgggataagaatttgccgtacgcggaattctcatataacaatagttatcaagctagtttgcaaatggctccgtatgaagcattatatggtcgaaaatgtcgtacgccgattctttgggatcaaaccggtgaacgtcaagtttttgggacagacatattgcgagaggcagaagaaaaagtaaagattatccaagaaaggttgcgcgttgctcagtcacgtcagaagagctatgccgataatcgtcgcagagatttggctttcgaagaaggagattatgtataccttcgggttacgccattacgaggtgttcatcgtttccaaaccaaagggaaattggcaccgcgttttgtgggaccttttaagattgtgagtcgaagaggtgaagtagcttatcagttagagttgcctccgtcaatggcgggaatacacgacgtgttccatgtgtctcagctgaagaaatgtttacgtgtacctacggaggaagcagatcctgatcgtatagagcttcaggaagatttaacttatgttgagaagccagtcagaattttggaatttccgacgttccggaggagagcgtttccgttgaggaagtactttgacctccttgtgcttcggtccgttcttgatctacc

SEQ ID NO: 15093 - DNA, 2232 bp, Oryza sativa
  Clone ID: TFbOSC13206j.C1.o1.fg
ggaagtgaccgtggcagttaccttgagactgaaggaattgagaatgatgctaccacaaggcatttggttgagatgctgtgggctatggatgaaagtcgtgcggagactgtgttagcagctcaagatcgtgaagaccggaatcggggtaagatttgcaagctagaagacaaggtggatcgtttggaaaaggaactagctgcattaaagggagaagcaccgccacagaaggccaggattcgtctcaccgcaaggaagagagctctatttgtccctcgctaccaattggcgccaaagtttcccccggtttctcttcttgtgccctgtccatgccagatggtgatcactcgcagcaatgggaatggccctaacaaccccaataacaacaatgaagggaacccaacacttgctcaagttcttgctcaacagactcagttaatgaacatgatgatgcagcaacttcagaaccagcagaaccagggaaataaccatgcacctccccagaacaagttagcagaatttcttcgtgtgaggctgcctattttctctagtaccactaatcctgttgaagctggtgattggctgcatgccatagagaagaagttggatttgcttcaatgcactgatcaggaaaaggtctcatttgcatcacatcagttgcatggccctgcctctgaatggtgggatcacttccgccttaataggactactgctgaacctatcacttggcttgaattcaccgctgctttccggaatacgcatataccatcgggagtggtgtctctcaagaagaaggaattcaggtcgctcacccagggatctcgctctgtcacggagtatctgcatgagttcaattgtctggctcgttatgctccagaagatgaggacaaatacaatcgcatggaacagaagaaacgccggattgctcaattcaagacacaaccgggaaataatcaaaggccgcgtcttactttaggaccccagtccatgccacatggaggttcttcgtctgttgttcgtccgcggcgtcagttcttcaacaacaatgctggcaacaacatccgcaatctagctccacgccctgttgcagtttcgacacagcaacagcctgccaagagggagcaaggcagcaagcccgtagtgtgcttcaactgtggagacccaggacattatgctgacaagtgtccgaagccccgacgcgtgaaggttgtccctgcccagagcaactctaccgcaccagcatcaaaggcccgtatcaatcatgttgctgctgcagaagctcaagacgctccagatgtgattttgggtacgttccttgttaactcagttcctgcaacagtgcttttcgattctggtgctacacattcatttttatctatgagttttgcgggaaatcatgggatggaagtagaagatcttagacgtcctttgatggttagtaccccaagtaatcaagcactctctttgcaacgtagcccctctgtcagaatagaaattaaaggagtaccatttctggccaatcttatcttgttagaacccaaagaccttgatgtcatcctagggatggactggttagccagacataaaggtgtgatagactgtgctaacagaaaagtaactctcaccagcaatgatggtcgagttgtaactgttcatgcattgtcttctgagtctttaaggtcaagactgaaccagataactttggaagagattcctatagtccgggagtatcccgatgtgttcccagatgatttacctggtatgccgcctaaaagggatatagagttcagaatagatttggtacctggaacaactccgatccataagagaccttatagaatggcagccaacgagttggcagaagtcaaaaggcaagtagatgatttgcttcagaaaggatacatcagaccgagttcatcaccatggggagctccggttatttttgtgggaaagaaagatcatacccagaggatgtgtgtggactatcgtgcactaaacgatgtgactatcaagaataggtatccactacccagaattgatgatttgtttgatcagcttaaaggtgccactgttttctccaagatagatcttcgatcagggtatcaccagttaagaatcaaagaggaagatatacctaagacagcttttaccgctaggtatggattgttcgaatgtactgttatgtcttttggacttaccaatgcccctgcttttttcatgaactttatgaataag

SEQ ID NO: 15094 - DNA, 3804 bp, Oryza sativa
  Clone ID: TFbOSC13283j.C1.o1.fg
atgccgtgttacaagcctgagtacctgtttggcgttgagggttttgtccaggagttgcgtacgatgtcctttgtcattggatttgggaatgctcctttttatgcccagattcgtcatgatcgtcatgaagaaaagtgccgagtcaaagtcaccttgaacagcaatagtgaagatatcccctcagtaatgtttgaagctggaggaagaaactacatccatgcatgtcaggaggtggcaaggatcgccataggagagctccgtgatcgctacagtgatcagttggtcgacactgagtatcgctatcatcctcgccaaccccagggaagtgaccgtggcagttaccttgagactgaaggaattgagaatgatgttaccacaagacatttggttgagatgttgtgggctatggatgaaagtcgtgcggagactgtgttagcagctcaagatcgtgaagatcggaatcgtggtaagatttgcaagctagaagacaaggtggatcgtttggagaaggaattagccgcattgaagggagaagcaccgccgcagaaggccaggattcgtcttaccgcaaggaagagagctttatttgtccctcgctatcaactggcgccaaaggttcgtgtggtggagaaagaagttgccccagctcaagcggatcctccggtcatcatcataagtagtgatgaagaagaagaatccaagcgcatcaattccaagattgagtgggtagcaactcaagatgatgaagatgagccttcaatcgacctcctatgctcggaagaactagagaagttggagagtttagtggtgtgggagtcttcagtttgtaataatgaaactcagttaagatcaataaaagttaaaatggtgaacactcgtagcaatgggaatggtcccaacaaccccaataataacatcaatggagagaatcccactctggcccaagttcttgctcagcagacacagcttatgaacatgatgatgcaacaatttcagaatcagcaaaaccaagggaataatcatgcacctccacagaacaagttagcagaatttcttcgtgtgaggccgcctgttttctctagtaccactaatcctgttgaagctagtgattggctacatgccatagagaagaagttggatttacttcagtgtactgatcaggagaaggtctcatttgcatcacatcagttgcatggccctgcctctgaatggtgggatcacttccgtcttaacaggactactgctgaacctatcacttggcttgaattcaccgctgctttccggaagacgcatataccatcgggggtagtgtctctcaagaagaaggagttcaggtcgcttacccagggatctcgctctgttacggagtatctgcacgagttcaatcgtcttgctcgttatgctccggaagatgtgcgcaatgatgaagagcgccaggagaagtttttgggaggacttaatgatgagctttcttacccacttatggttggagattaccctgatttccagaaattagtggataaggctattcgtcaggaagacaagtacaatcgcatggagcagaagaaacgtcggattgctcaattcaagacacaacagggaaataatcagaagccgcgtcttactttaggaccccagtccatgccacagggaggttcttcgtctgttgttcgtccgcaacgtcagttcttcaacaacaatgctggcaacaacatccgtaatcaagctccacgtcctgttgcagctccagcacagcaacaacctgccaagagggagcaaggcagcaagcccgtggtgtgtttcaactgtggagatccaggacattatgctgacaagtgtccgaagccccaacgcgtgaaggttgtccctgcccagagtaactctgctgtaccagcatcaaaggcccgtgtcaatcatattgctgctgcagaagctcaaggtgctccagatgtgattttgggtacgttccttgttaactcagttcctgcaacagtacttttcgattctggtgctacacattcattcttatctatgagttttgcgggaaatcatgggatggaagtagaagatcttagacgtcctttgatggttagtaccccaagtaatcaagcactctttttgcaacgtagcccctctgtcagaatagaaattcaaggagtaccatttctggccaatcttatcttgttagaatccaaagaccttgatgtcatcctagggatggactggttagccagacataaaggtgtgatagactgtgccaacagaaaagtaactctcaacagctatgatggtcgagttgtaaccgttcatgcattgtcttctgagtctttaaggtcaagactgaatcaaataactttggaagagattcctatagtccgggagtatcctgatgtgttcccagatgatttaccgggtatgccgcctaaaagggatatagagttcagaatagatttggtacctggaacaactccgatccataagagaccttatcgaatggcagccaatgagttggcagaagttaagaggcaagtagatgatttgctacagaaaggatacatcagaccgagttcatcaccatggggagctccggtaatttttgtggaaaagaaagaccatactcagagaatgtgtgtggactatcgtgcactaaacgatgtgactatcaagaataagtatccactacccaggattgatgatttgtttgatcagcttaaagacaagttcgtggtggtctttattgatgatattcttatctactctcgaaccaaagaagagcatgaggaacatcttcgccttgcattggagaagctacgagaacatcaactgtatgctaagtttagcaagtgtgaattttggttgtccgaagtgaaattccttggtcacgtcatctcagccggaggagttgccgttgatcctagtaacgtggaatccgtaaccaattggaagcaaccaaagacagtttcagagattcgcagtttcctaggccttgcaggatattatcggaggtttatagagaatttttctaagattgctaagcccatgacacgactgcttcagaaagatgtgaagtacaaatggtcggaagaatgtgagcggagttttcaagagttgaaaagtcgcttaatatcagctcctattttgattttgcctgatccaaagaagggtttccaagtatattgcgatgcatccaaacttgggttaggttgtgttctgatgcaagatgggaaggtggttgcctatgcatctcgtcagttacgtccgcatgagaagaactaccctactcatgatattgagttagctgcagtcgttcatgcattaaagatttggcgtcattatcttttcggtactcgtacagaagtgtacaccgatcacaagagtttaaagtatatctttactcagccggatctgaatatgagacaacggagatggttggaattaattaaggattatgacatgggaattcattatcatccgggaaaggctaatgttgtagcagacgctcttagcagaaaaggttattgcaatgctacagaaggacgacagttgccattggaattatgcaaggaatttgaaagattaaatttgggaattgtcggtagaggtttcgttgcagctttagaagcgaagcccactctaattgatcaagttagagaagcccaaattaatgatcctgatattcaagagatcaagaagaatatgagaagaggaaaagctattggtttcttggaagatgagcacggaactgtatggttgggtgaaagaatctgtgtctgtcacgtcctgataaattcatcccaaaattaa

SEQ ID NO: 15095 - DNA, 1425 bp, Oryza sativa
  Clone ID: TFbOSC14137j.C1.o1.fg
atgccacagggaggttcttcgtctgttgttcgtccgcagcgtcagttcttcaacaacaatgttggcaacaacatccgcaatcaagctctacgccctgttgcagctccaacacagcaacaacctgccaagagggagcaaggcagcaagcccgtggtgtgtttcaactgtggagacccaggacattatgctgacaagtgtccgaagccccgacgcatgaaggttgtccctacccagagcaactctaccgtaccagcatcaaaggcccgtgttaatcatgtcgctgctgcagaagctcaagatgctccagatgtgattttggaatccaaagacctagatgtcatcctagggatggactggttagccagacataaaggtgtgatagactgtgccaacagaaaagtaactctcaccagcaatgatggtcgagttgtaactgttcatgcattgtcttctgagtctttaaggtcaagactgaaccagataactttggaagagattcctatagtccgggagtatcccgatgtgttcccagatgatttacctggtatgccgcctaaaagggatatagagttcagaatagatctggtaccaggaacaactccgatccataagagaccttatagaatggcagccaatgagttggcagaagtcaagaggcacgtagatgatttgcttcagaagggatacatcagaccgagttcatctccatggggagctccagttatttttgtggaaaagaaagaccatacccagagaatgtgtgtggattatcgtgcattaaacgatgtgactatcaagaataagtatccgctacccagaattgatgatttgtttgatcagcttaaaggtgccactgttttctccaagatcgatcttcgatcaggatatcaccagttgagaatcaaagaggaagatatacctaagacagcttttaccactaggtatgggttgttcgaatgtactgttatgtcttttggacttaccaatgcccctgctttcttcatgaacttgatgaataaggtgtttatggaatacctagacaagttcgtggtggtctttattgatgatattcttatctactcccgaaccaaagaagagcatgaagaacatcttcgccttgcattggagaagctacgagaacatcaactgtatgctaagtttagcaagtgtgaattttggttgtctgaagtgaagttccttggtcacgtcatctcagcaggaggagttgccgttgatcctagtaatgtggaatccgtaactaattggaagcaaccaaagacagtttcagagattcgcagttttctaggcctcgcaggatattatcgaaggtttatagagaatttttctaagattgctaagcccatgacacgactgcttgtcacgaccggaaataacccaacgggcgttcttacgtgcgtgcattaa

SEQ ID NO: 15096 - DNA, 677 bp, Oryza sativa
  Clone ID: TFbOSC15745j.C1.o1.fg
aagacgcatataccatcgggagtggtgtctctgaagaagaaggagttcaggtcgcttacccagggatctcgctctgttacggagtatctgcacgagttcaatcgtctggctcgttatgctccggaagatgtgcgcaatggtgaagagcgtcaggagaagtttttggaaggacttaatgatgagctttcttacccactcatgactggagattatcatgatttccagaagctagtggataaggctattcgtcaggaggacaaatacaatcgcatggagcagaagaaacgtcggattgctcaattcaagacacaacaggggaataatcagaagccgcgtcttactttaagaccccagtccatgccacatggaggttcttcgtttgttgttcgtccgcagcgtcagttcttcaacaacaatgctggcaacaacatccgcaatcaagctccacgtcctgttgcagctccaacacagcaacaacctgccaagagggagcaaggcagcaagcccgtggtgtgtttcaactgtggagacccaggacattatgctgacaagtgtccgaagccccgacgcgtgaaggttgtccctacccagagcaactctacggtaccagcatcaaaggcccgtgtcaatcatgttgctgctgcaagaggttcaagatgctccagatgtgattttgg

SEQ ID NO: 15097 - DNA, 1425 bp, Oryza sativa
  Clone ID: TFbOSC15754j.C1.o1.fg
atgccacagggaggttcttcgtctgttgttcgtccgcagcgtcagttcttcaacaacaatgttggcaacaacatccgcaatcaagctctacgccctgttgcagctccaacacagcaacaacctgccaagagggagcaaggcagcaagcccgtggtgtgtttcaactgtggagacccaggacattatgctgacaagtgtccgaagccccgacgcatgaaggttgtccctacccagagcaactctaccgtaccagcatcaaaggcccgtgttaatcatgtcgctgctgcagaagctcaagatgctccagatgtgattttggaatccaaagaccttgatgtcatcctagggatggactggttagccagacataaaggtgtgatagactgtgccaacagaaaagtaactctcaccagcaatgatggtcgagttgtaactgttcatgcattgtcttctgagtctttaaggtcaagattaaaccaaataactttggaagagattcctatagtccgggagtatcccgatgtgttcccagatgatttacctggtatgccgcctaaaagggatatagagttcagaatagatttggtaccaggaacaactccgatccataagagaccttatagaatggcagccaatgagttggcagaagtcaagaggcaagtagatgatttgcttcagaaaggatacatcagaccgagttcatctccatggggagctccggttatttttgtggaaaagaaagaccatacccagagaatgtgtgtggactatcatgcattaaatgatgtgactatcaagaataagtatccgctacccagaattgatgatttgtttgatcagcttaaaggtgccaccgttttctccaagatagatcttcgatcagggtatcaccagttgagaatcaaagaggaagatatacctaagacagcttttaccactaggtatgggttgttcgaatgtacggttatgtcttttggacttaccaatgcccctgctttcttcatgaacttgatgaataaggtgtttatggaatacctagacaagttcgtggtggtctttatagatgatattcttatctactctcgaaccaaagaagagcatgaagaacatcttcgccttgcattagagaagctacgagaacatcaactgtatgctaagtttagcaagtgtgaattttggttgtctgaagtgaagttccttggtcacgtcatctcagcaggaggagttgccgttgatcctagtaatgtggaatccgtaactaattggaagcaaccaaagacagtttcagagattcgcagttttctaggcctcgcaggatattatcgaaggtttatagagaatttttctaagattgctaagcccatgacacgactgcttgtcacgaccggaaataacccaacgggcgttcttacgtgcgtgcattaa

SEQ ID NO: 15098 - DNA, 5349 bp, Oryza sativa
  Clone ID: TFbOSC15782j.C1.o1.np
gccgtcgctcgggaagaccgccgtcgtcatcgccaagtcgccgccgtcctcgtccgccccttcgcagccgtcggaacccgccggagcttcgtcgccgtcgacaacccgaaggtagccgccgcttccttctcgtcgccgtcgtcgtccaagattccgtcgtttccggagagtccgttttcgcagaagaagagtttgaagagttccaaggccagcaaggcaactcctggtttggaatggtacattcctggtttggagatagaactgtgcagccggggtggttgttcagaatggttgggcctatacaacaggatgccgcgctacaagcctgagtacctgtttggtgttgaagggtttgtccaggagttgcgtactatgtcctttgtcattggatttggaactgcccctttttatgcccagattcgtcatgatcgtcatgaagagaggtgccgtgtcaaagtcaccttaaacagtaatagtgaagatattccatcagtgatgttcgaagctggaggaagaaattatatccatgcatgtcaggaagtggcaaggatcgccataggagagctccgtgaccgctacagtgatcagttggccgatactgagtatcgctaccatcctcgccaaccacagggaagtgaccgtggcagttaccttgagactgaaggaattgagaatgatgctaccacaaggcatttggttgagatgctgtgggctatggatgaaagtcgtgcggagactgtgttagcggctcaagatcgtgaagaccggaatcgtggtaagatttgcaagctagaagacaaggtggatcgcttggagaaggaattagccgcattgaagggagaagcaccgccgcagaaggccaggattcgtctcaccgcaaggaagagaactttgtttgtccctcgttatcaattggcgccaaagatggtgaacactcgcagcaacgggaatggtcctaacctcaacaaccccaataacaacaacaatggagagaatcccactcttgctcaagttcttgctcaacagacacagcttatgaacatgatgatgcagcaatttcagaatcagcagaaccaaggaaataaccatgtacctcctcagaataagttagcagaatttcttcgtgtgaggccgcctgttttctctagtaccactaatcctgttgaagctagtgattggctgcatgccatagagaagaagttggatttacttcagtgtactgatcaggagaaggtctcatttgcatcacatcagttgcatggccctgcctctgaatggtgggatcacttccgccttaacaggactactgctgaacctatcacttggcttgaattcaccgctgctttccgaaagacgcatataccatcgggagtagtgtctctcaagaagaaggagttcaggtcgctttcccagggatctcgctctgttacggagtatctgcacgagttcaatcgtcttgctcgttatgctccggaagatgtgcgcaatgatgaagagcgccaggagaagtttttgggaggacttaatgatgagctttcttacccactcatggttggagattatcctgatttccagaaattagtggataaggctattcgtcaggaggacaagtacaatcgcatggagcagaagaaacgtcggattgctcaattcaagacacaacagggaaataatcagaagccgcgtcttactttaggaccccagcccatgccacagggaggttcttcgtctgttgttcgtccgcaacgtcagttcttcaacaacaatgctggcaacaacatccgtaatctagctccacgtcctgttgcagttccagcacagcaacaacctgccaagagggagcaaggcaacaagcccgtggtgtgtttcaactgtggagatccaggacattatgctgacaaatgtccgaagccccgacgcgtgaaggttgtccctgcccagaataactctgctgtaccaacatccaaggctcgtgtaaatcatgtcgctgctgcagaagctcaagatgctccagatgtgattttgggtatgttccttgttaactcagttcctgcaacagtgcttttcgattctggtgctacacattcattcttatctatgagttttgcgggaaatcatgggatggaagtagaagaccttagatgtcctttgatggttagtaccccaagtaatcaagcactctctttgcaacgtagcccctctgtcagaatagaaattcaaggagtaccatttctggccaatcttatcttgttagaatccaaagaccttgatgtcatcctagggatggactggttagccagacataaaggtgtgatagactgtgccaacagaaaagtaactctcaacagctatgatggtcgagttgtaactgttcatgcattgtcatctgagtctttaaggtcaagactgaaccagataactttggaagagattcctatagtccgggagtatcctgatgtgttcccagatgatttacctggtatgccgcctaaaagggatatagagttcagaatagatttggtacctggaacaactccgatccataagagaccttatcgaatggcagccaatgagttggcagaagttaagaggcaagtagatgatttgctacagaaaggatacatcagaccgagttcatcaccatggggagctccggttatttttgtggaaaagaaagaccatactcagagaatgtgtgtggactatcgtgcactaaacgatgtgactattaagaataagtatccactacccaggattgatgatttgtttgatcaacttaaaggtgccactgttttctccaagatagatcttcgatcagggtatcatcagttgagaatcaaagaggaagatatacctaagacagcttttaccactaggtatgggttgttcgaatgtactgttatgtcttttggacttaccaatgcccctgctttcttcatgaacttgatgaataaggtgtttatggaatacttagacaagttcgtggtggtctttatagatgatattcttatctactctcgaaccaaagaagagcatgaagaacatcttcgccttgcattggagaagctacgagaacatcaactgtatgctaagtttagcaagtgtgaattttggttgtccgaagtgaaattccttggtcacatcatctcagccggaggagttgccgtcgatcctagtaacgtggaatccgtaaccaattggaagcaaccaaagacagtttcagagattcgcagtttcctaggccttgcaggatattatcggaggtttatagagaatttttccaagattgctaagcccatgacacgactgcttcagaaagatgtgaagtacaagtggtcggaagaatgtgagcagagttttcaagagttgaaaagtcgcttaatatcagctcctattttgattttgcctgatccaaagaagggttttcaagtgtattgtgatgcatccaaacttgggttaggttgtgttctgatgcaagatgggaaggtggttgcctatgcctctcgacagttacgtccgcatgagaagaactaccctactcatgatattgagttagctgcagtcgttcatgcattgaagatttggcgtcattatcttttcggtactcgtacagaagtgtacaccgatcacaagagtttaaagtatatctttactcagtcggatctgaacatgagacaacggagatggttggaattaattaaggattatgacatgggaattcattatcatccgggaaaggctaatgttgtagcagacgctcttagcagaaaaggctattgcaatgctacagaaggacgacagttgccattggaattatgcaaggaatttgaaagattaaatttgggaattgtcggtagaggtttcgttgcagccttagaagcgaagcccactctaattgatcaagttagagaagcccaaattaatgatcctgatattcaagagatcaagaagaatatgagaagaggaaaagctattggtttcttggaggatgagcacggaactgtatggttgggtgagagaatctgtgtccccgacaacaaagatttaaaggatgcaattctgaaagaagctcatgatactttatactccattcaccctggtagtactaagatgtaccaggatctcaaggaaagattttggtgggcaagtatgaagcgtgaaatcgcagaatatgtagcagtatgtgatgtttgtcagcgagtcaaggcagaacatcagaaacccgccggtttgttgcagcctttgaagattcctgaatggaaatgggaagaaataggtatggattttattactggtttacccagaacgtcatcaggccatgactctatttgggtgatagtcgacagacttaccaaagtggctcatttcattccggtaaagacaacttattccggaagtcgcttagcggaattgtatatggcaaggattgtgtgtttgcatggcgtccctaagaagatagtgtctgatcgaggcagtcagtttacttcaaatttttggaagaaacttcaggaagagatgggttctaagctgaactttagtactgcttatcatccgcagacagacggacaaaccgaaagggtgaatcaaattttggaagacatgttgagagcttgtgctctagatttcggtggaagttgggataagaatctaccctatgcagaattttcgtacaacaacagttatcaagctagtctacagatggctccgtatgaagcactgtatggtcggaagtgccgcactccgcttttgtgggatcaaacgggagaacgtcaggttttcggaacggatatcctaagggaagcagaagaaaaggtaaagatcattcaagaaagattgcgtgtggctcagtctcgtcataagagttatgccgacaatcgccgtagggatttgagttttgaagaaggagattatgtgtatcttcgtgtcacgcctctacgaggagttcatcgttttcataccaagggaaaattggcaccgcgttttgtgggaccttataagattgtcagtagaagaggagaggttgcttatcagttggagttacctcaatctttggcaggagtacataatgtgttccatgtgtcgcaattgaaaaagtgtttaagggtacctactgaagaagctaatattgagcagatagaagtccaagaggatttgacttatgttgagaaaccaatccgtatcctggaaacaaatgagagaagaaccaggaatcgagttatccgtttttgtaaagtccagtggagtaatcactcggaagaagaatcaacttgggaacgagaagatgaattgaagtcagctcatccgcacctgttcgccagttcttccgaatctcgaggacgagattctgtt

SEQ ID NO: 15099 - DNA, 5232 bp, Oryza sativa
  Clone ID: TFbOSC15871j.C1.o1.np
cgaaagtcggcccaaaacctcctctctctttcccccggcccaattccgacgtttccggagagtccgttttcgcaggagaagaatttgaagagttccaaggccagcaaggcaactcctggtttggaatggtatattcctggtttggagatagaactgtacagccgggatggttgttcagaatggttgggcctatacaacaggatgccgtgctacaagcctgagtacttgtttggtgttgagggatttgtccaggagttgcgtacgatgtcctttgccataggatttgggactacccctttttatgcccagattcctcatgatcgtcacgaagagaagtgccgagtcaaagtcaccttgaacagtaatagtgaagatatcccctcagtgatgttcgaagctggaggaagaaactacatccatgcatgtcaggaggtggcaaggatcgccataggagagctccgcgatcgctacagtgatcagttggccgacactgagtatctctaccatcctcgcaaccacagggaagtgaccgtggcagctaccttgagactgaaggaattgagaatgatgctaccacaaagcatttggttgagatgctgtgggctatggatgaaacccgtgcagagactgtgttagcagctcaagatcgtgaagaccggaatcatggtaagatttgcaagctataggacaaagtggatcgtttagagaaggaactagccgcattgaagggagaagcaccaccgcagaaggccaggattcgtcttaccgcaaggaagagagctctatttgtccctcgctaccaattggcgccaaagatggtgctcactcgcagcaacgggaatggccccaacaacaacaataacaacaacaatggagagaatcccacacttgcccaagtcctggctcaacaggtacagcttatgaacataatgatgcagcaacttcagaaccagcagaaccagggaaataatcatgcacctcctcagaacaagttagcagaatttcttcatgtgaggccgcctactttctctagtaccactaatcctgttgaagctggcgattggctgcatgccatagaaaagaagttggatttgcttcagtgcaccgatcaggagaaggtctcatttgcatcacatcagttgcatggccttgcctctgaatggtgggatcacttccgcctgaacaggactactactgaacctatcacttggcttgaattcaccgctgctttccggaagacgcatataccatcgggagtggtgtctctcaagaagaaggaattcaggtcgctcactcaggggtctcgctctgttactgagtatctgcacgaattcaatcgtctggctcgttatgctccggaagatgtgcgcactgatgaagagcgacatgagaggttcttggaaggacttaatgatgagctttcttacccactcatgactggggattatcatgatttccagaagttagtggataaggctattcgccaggagggcaagtacaaccgcatggagcagaagaaacgccggattgctcaattcaaggcacaacaagggaatagtcagaggccgcgtcttactttaggaccccagtccatgcgacagggaggttcttcgtctgttgttcgtccgcagcgtcagttcttcaacaacaatgcgggcaacaacatccgcaatcaagctccacgccctgttgcagcttcgacacagcaacagcctgccaagaaggagcaaggcagcaagcccgtggtgtgcttcaactgtggagacccaggacattacgctgacaagtgtccgaagccccgacgcgtgaaggttgtccctgcccagagcaactctactgtaccagcatcaaaggcccgtgtcaatcatgttgctgctgcagaagcccaaggtgctccggatgtgattttgggtacgttccttgttaacttagttcctgcaacagtgcttttcgattctggtgctacacattcattcttatctatgagttttgcgggaaatcatgggatggaagtagaagatcttagacgtcctttgatggttagtaccccaagtaatcaagcactctctttgcaacgtagcccctctgtcagaatagaaattcaaggagtaccatttctggccaatcttatcctgttagaatccaaagaccttgatgtcatcttagggatggactggttagccagatataaaggtgtgatagactgtgccaacagaaaagtaactatcaccagtaatgatggtcgagttgtaactgttcatgcattgtcttctgagcctttaaggtcaagactgaaccaaataactttggaagagattcctatagtccgggagtatcccgatgtgttcccagacgatttacctggtatgccgcctaaaagggatatagagttcagaatagatttggtaccaggaacgactccgatccataagagaccttatagaatggcagccaatgagttggcagaagtcaagaggcaagtagacgatttgcttcagaaaggatacatcagaccgagttcatctccatggggagctccggttatttttgtggaaaagaaagatcatacccagaggatgtgtgtagactatcgtgcactaaatgatgtgactatcaagaataagtatccgctgcccagaattgatgatttgtttgatcagcttaaaggtgccatcgttttctccaagatagatcttcgatcagggtatcaccagttgaggatcaaagaggaagatatacctaagacagcttttaccactaggtatggattgttcgaatgtactgttatgtcttttggacttaccaatgcccccgctttcttcataaacttgatgaataaggtgtttatggaatacctagacaagttcgtggtggtctttattgatgacattcttatctactcccgaaccaaagaagagcatgaagaacatcttcgccttgcactagagaagctacgagaacatcaactgtatgctaagtttagcaagtgtgaattttggttgtctgaagtgaagttccttggtcacgtcatctcagcaggaggagttgccgtcgatcctagtaatgtggaatccataaccaattggaaccaaccaaagacagtttcaaagattcgcagtttcttaggcctgcaggaatataatggaggtttatagagaatttttccaagattgctaagcccatgacacgattgcttcaaaaggatgtgaagtacaagtggtcagaaaatgtaagcagagttttcaagagttgaagaatcgcttaatatcagctcctattttgattttacctgatccaaagaagggtttccaagtgtattgtgatgcatcccaacttgggttaggttgtgttctgatgcaagatgggaaggtggttgcatatgcatctcgtcagttacgtccgcatgagaagaactaccctactcatgatcttgagttagctgcagtaattcatgcgttgaagatttggcgccattatcttttcggtacttgtatagaggtgtataccgatcacaagagtttaaagtatatttttactcagccggatctgaacatgagacaacggagatggttggaattaattaaggattatgacatgggaattcagtatcacccgggaaaggctaatgttgtagcagatgctcttagcaggaaaggctattgcaatgctacggaaggacgacagttgccattggaattatgcaaggaatttgaaagattaaatttgggaattgtcagaagaggtttcgttgcagccttagaagcaaagcccactctaattgatcaagttagagaagcccaaattaatgatcctgatattcaagaaatcaagaagaatatgagaagagggaaagctatcggtttcttggaggatgagcaaggaactgtatggttgggtgagagaatctgcgtccccgacaacaaagatttaaaagatgcaattctgaaagaagctcatgatactttatactccattcaccctggtagtaccaaaatgtaccaggatctcgaggaaagattttggtgggcaagtatgaagcgtgaaatcgcagaatacgtagcagtatgtgatgtttgtcagcgagtcaaggcagaacatcagaaacccgccggtttgctgcagcctttgaagattcctgaatggaaatgggaggaaatcggtatggatttcatcactggtctacccagaacgtcatcaggccatgactctatttgggtggtagtcgacagacttaccaaagtggctcatttcatcccagtaaagacaacctattccggaagttggttggcggaattgtatatggcaaggattgtgtgtttgcatggcgtccctaagaaaatagtgtctgatcgaggcagtcagtttacttcaaatttttggaagaagcttcaggaagagatgggttctaagctgaactttagtactgcttatcatccgtagacagacggacaaaccgaaagggtgaatcagattttggaagatatgttgagagcttgtgctttagacttcggtggaagttgggataggaatctaccttatgcagaattttcgtacaacaacagttatcaagctagtcttcagatggctccttacgaagcactgtatggtcggaagtgccgcactccgcttttgtgggatcaaacaggagaacgtcaggttttcgggacggacatcctaagggaagcagaagagaaggtgaaaatcattcaagaaaggttgcgtgtggcccagtctcgtcataagagttatgccgacaatcgtcgtagagatctaagttttgacgaaggagattatgtgtatcttcgtgtcacgcctcttcgaggagttcatcgttttcacaccaaaggaaaattggtaccgcattttgtgggaccttataagattgtcaatagaagaggagaggttgcttatcagttggagttacctcaatctttggcaggagttcataatgtgttccatgtgtcgcaattgaaaaagtgtttaagggtacctaccgaagaagctaatcttgaacagatagaagtccaagaggatctgacctatgttcagaaaccaatccgtatcttggaaatagaagagagaagaaccagaaatcgagttatccgtttttacaaagtccaatggagtaatcactcggaagaagaatcaacttgggaacgagaagatgaattgaagtcagctcatccgcatctgttcgccagttcttccgaatctcgaggacgagattctgtt

SEQ ID NO: 15100 - DNA, 4357 bp, Oryza sativa
  Clone ID: TFbOSC1652j.C1.o1.fg
atgacacgactgcttcagaaagatgtgaagtacaagtggtcggaagaatgtgaacagagttttcaagaattgaaaagtcgcttaatatcagctcctattttgattttgcctgatccaaagaagggttttcaagtgtattgcgatgcatccaaacttgggttaggttgtgttttgatgcaagatgggaaggtggttgcctatgcctctcgacagttacgtccgcatgagaagaactaccctactcatgatattgagttagctgcagtcgttcatgcattgaagatttggcgtcattatcttttcggtactcgtacagaagtgtacaccgatcacaagagtttaaagtatatctttactcagccggatctgaacatgagacaacggagatggttggaattaattaaggattatgacatgggaattcattatcatccgggaaaggctaatgttgtagcagacgctcttagcagaaaaggctattgcaatgctacagaaggacgacagttgccattggaattatgcaaggaatttgaaagattaaatttgggaattgtcggtagaggtttcgttgcagctttagaagcgaagcccactctaattgatcaagttagagaagcccaaaataatgatcctgatattcaagagatcaagaagaatatgagaagaggaaaagctattggtttcttggaggatgagcacggaacggtatggttgggtgagagaatctgtgtccccgacaacaaagatttaaaggatgcaattctgaaagaagctcacgatactttatactccattcaccctggtagtactaagatgtaccaggatctcaaggaaagattttggtgggcaagtatgaagcgtgaaatcgcagaatacgtagcagtatgtgatgtttgtcagcgagtcaaggcagaacatcagaaacccgccggtttgttgcaacctttgaagattcctgaatggaaatgggaagaaattggtatggattttattactggtttacccagaacgtcatcaggccatgactctatttgggtaatagttgacagacttaccaaagtggctcatttcattccgacagacggacaaaccgaaagggtgaatcaaattttggaagacatgttgagagcttgtgctctagatttcggtggaagttgggataagaatctaccttatgcagaattttcatacaacaacagttatcaagctagtttacagatggctccttacgaagcactgtatggtcggaagtgccgcactccgcttttgtgggatcaaacgggagaacgtcaggttttcggaacggatatcctaagggaagcagaagaaaaggtaaagatcattcaagaaagattgcgtgtggctcagtctcgtcataagagttatgccgacaatcgccgcagagatttgagttttgaagagggagattatgtgtatcttcgtgtcacgcctcttcgaggagttcatcgttttcataccaaaggaaaattggcaccgcgttttgtgggaccttataagattgtcagtagaagaggagaggttgcttatcagttggagttacctcaatctttggcaggagtacataatgtgttccatgtgtcgcaattgaaaaagtgtttaagggtacctaccgaagaagctaatattgagcagatagaagtccaagaggatttgacttatgttgagaaaccaatccgtatcctggaaacaactcctggtttggaatggtacattcctggtttggagatagaactgtgcagccggggtggttgttcagaatggttgggcctatacaacaggatgccgcgttacaagcctgagtacctgtttggtgttgagggttttgtccaggagttgcgtacgatgtcctttgtcattggatttgggactgcccctttttatacccagattcctcatgatcgtcatgaagagaagtgccgagtcaaagtcaccttgaacagcaatagtgaagatattccctcagtgatgttcgaagctggaggaagaaactacatccatgcatgtcaggaggtggcaaggatcgccataggagagctccgtgatcgctacagtgatcaattggccgacactgagtatcgttaccatcctcgccaaccccagggaagtgaccgtggcagttatcttgagactgaaggaattgagaattatgttaccacaagacatttggttgagatgttgtgggctatggatgaaagtcgtgcggagactgtgttagcagctcaagatcgtgaagaccggaatcatggtaagatttgcaagttagaagacaaggtggatcgtttggagaaggaattagccgcattgaagggagaagcaccgccgcagaaggccaggattcgtcttaccgcaaggaagagagctctatttgtccctcgctatcaactggcgccaaagatggtgaacactcgtagcaatgggaatggtcccaacaaccccaataacaacaatggagagaatcccactcttgctcaagttcttgctcaacaaacacagcttatgaacatgatgatgcagcaatttcagaatcagcaaaaccaagggaataatcatgcacctccccagaacaagttagcagaatttcttcgtgtgaggccgcctgttttctctagtaccactaatcctgttgaagctagtgattggctgcatgccatagagaagaagttggatttacttcagtgcactgatcaggagaaggtatcttttgcatcacatcagttgcatggccctgcctctgaatggtgggatcacttccgccttaacaggactactgctgaacctatcacttggcttgaattcaccgctgctttccgaaagacgcatataccatcgggagtagtgtctctcaagaagaaggagttcaggtcgcttactcagggatctcgctctgttacggagtatctgcacgagttcaatcgtcttgctcgttatgctccggaagatgtgcgcaatgatgaagagcgccaggagaagtttttgggaggacttaatgatgagctttcttacccactcatggttggagattatcctgatttccagaaattagtggataaggctattcgtcaggaggacaagtataatcgcatggagcagaagaaacgtcggattgctcaattcaagacacaacagggaaataatcagaagccgcgtcttactttaggaccccagtctatgccacagggaggttcttcgtctgttgttcgtccgcaacgtcagttcttcaacaacaatgctggcaacaacatccgtaataaagctccacgtcctgttgcagctccagtacagcaacaacctgccaagagggagcaaggcagcaagcccgtggtgtgtttcaactgtggagacccaggacattatgctgacaagtgtccgaagccccgtcgcgtgaaggttgtccctgcccagagtaactctgctgtaccagtatccaaggctcgtgtaaatcatgtcgctgctgcagaagctcaagatgctccagatgtaattttgggtacgttccttgttaactcagttcctgcaacagtacttttcgattctggtgctacacattcattcttatctatgagttttgcgggaaatcatgggatggaagtagaagatcttagacgtcctttgatggttagtaccccaagtaatcaagcactctctttgcaacgtagcccctcggtcagaatagaaattaaaggagtaccatttctggccaatcttatcttgttagaatccaaagaccttgatgtcatcctagggatggactggttagccagacataaaggtgtgatagactgtgccaacagaaaagtaactctcaacagctatgatggtcgagttgtaactgttcatgcattgtcatctgagtctttaaggtcaagactgaaccagataactttggaagagattcctatagtccgggagtattctgatgtgttcccagatgatttacctggtatgccgcctaaaagggatatagagttcagaatagatttggtacctggaacaactccgatccataagagaccttatcgaatggcagctaatgagttggcagaagttaagaggcaagtagatgatttgctacagaaaggatacatcagaccgagttcatcaccatggggagctccggttatttttgtggaaaagaaagaccatactcagagaatgtgtgtggactatcgtgcactaaacgatgtgactatcaagaataagtatccactacccaggattgatgatttgtttgatcagcttaaaggtgccactgttttctccaagatagatcttcgatcagggtatcatcagttagaatcaaagaggaagatatacctaagacagcttttaccactag

SEQ ID NO: 15101 - DNA, 3117 bp, Oryza sativa
  Clone ID: TFbOSC1666j.C1.o2.fg
atgtcgaacgaaaaggttccatcgaatgcaccaatagcgcctcaagaaggtaacgctcctcaaaattccggtagcaataagcagccagacgcttctagtgaagaaacgtggcgcacaccaagtgacccgtttccaatggaaataacacaagtcgccccccgcgatgatgatccggactacatacctatcgaacaggccatggtagtccgacgccgctcgaaacgtaaagccgagaggaacaggacagagcaagaagttgagatggacaccgctacgtctgcacctgaacgtacggagacatctacaagtgcaggcgggagtgggaaaaaaagatgtggtgagagaagcaagaataaattacccaaggaaacttacaacgtgattgctctcgatcaggatgggaagcccgtcgagccaccgatagtgcggtccaagttcagcaacgcatgtggcactctagtcaggacacgttgtcccattaatgtcaagttgtgggaaacagtggacgacaacatcaagacacttctctggaatgagttgcagaagtattttgtgttccctcctggatcagaggtcagggggagagattacgcacttaaaaagatgggagatcgatggcgacagtggaagtccgatctaaatcgggattatgttcagaagaatctcccaccgtttacggattatggacatatatcgcaggctgactgggacacgtttgttgcggatcatacaacagctgaagcattggctttgaggaaaaaaatgtcatacgctggtcacgtcgatcaatggcgggagatcgagcaaagatttgccgcggccgctgaaaacccgacagcctttccaaggttattccctgatagccaacaacccacacaatccgcacagcaaacaactaatgtacccagcagtgtaggctcagtgcagacaactaccttccctgtggatagtataactggaccacctccgtgcagtctcatcgtaccaatcggtcgcgctggaaagactaaggaggttgcaatgggttttgcaatacccggacgtcaattccacaacacggcaatccctgaggattacgcaaggatacaggtcgccaagactgagccacaaactaagccttacccactagacatgtggaagtacggtagtgctttgcaacagaggcccgaagaccggtccttatatggccgagctcctggtttggaatggtacattcctggtttggagatagaactgtgcagccggggtggttgttcagaatggttgggcctatacaacaggatgccgcgttacaagcctgagtacctgtttggtgttgagggttttgtccaggagttgcgtacgatgtcctttgtcattggatttgggactgcccctttttatacccagattcctcatgatcgtcatgaagagaagtgccgagtcaaagtcaccttgaacagcaatagtgaagatattccctcagtgatgttcgaagctggaggaagaaactacatccatgcatgtcaggaggtggcaaggatcgccataggagagctccgtgatcgctacagtgatcaattggccgacactgagtatcgttaccatcctcgccaaccccagggaagtgaccgtggcagttatcttgagactgaaggaattgagaattatgttaccacaagacatttggttgagatgttgtgggctatggatgaaagtcgtgcggagactgtgttagcagctcaagatcgtgaagaccggaatcatggtaagatttgcaagttagaagacaaggtggatcgtttggagaaggaattagccgcattgaagggagaagcaccgccgcagaaggccaggattcgtcttaccgcaaggaagagagctctatttgtccctcgctatcaactggcgccaaagatggtgaacactcgtagcaatgggaatggtcccaacaaccccaataacaacaatggagagaatcccactcttgctcaagttcttgctcaacaaacacagcttatgaacatgatgatgcagcaatttcagaatcagcaaaaccaagggaataatcatgcacctccccagaacaagttagcagaatttcttcgtgtgaggccgcctgttttctctagtaccactaatcctgttgaagctagtgattggctgcatgccatagagaagaagttggatttacttcagtgcactgatcaggagaaggtatcttatgcatcacatcagttgcatggccctgcctctgaatggtgggatcacttccgccttaacaggactactgctgaacctatcacttggcttgaattcaccgctgctttccgaaagacgcatataccatcgggagtagtgtctctcaagaagaaggagttcaggtcgcttactcagggatctcgctctgttacggagtatctgcacgagttcaatcgtcttgctcgttatgctccggaagatgtgcgcaatgatgaagagcgccaggagaagtttttgggaggacttaatgatgagctttcttacccactcatggttggagattatcctgatttccagaaattagtggataaggctattcgtcaggaggacaagtataatcgcatggagcagaagaaacgtcggattgctcaattcaagacacaacagggaaataatcagaagccgcgtcttactttaggaccccagtctatgccacagggaggttcttcgtctgttgttcgtccgcaacgtcagttcttcaacaacaatgctggcaacaacatccgtaataaagctccacgtcctgttgcagctccagtacagcaacaacctgccaagagggagcaaggcagcaagcccgtggtgtgtttcaactgtggagacccaggacattatgctgacaagtgtccgaagccccgtcgcgtgaaggttgtccctgcccagagtaactctgctgtaccagtatccaaggctcgtgtaaatcatgtcgctgctgcagaagctcaagatgctccagatgtaattttgggtacgttccttgttaactcagttcctgcaacagtacttttcgattctggtgctacacattcattcttatctatgagttttgcgggaaatcatgggatggaagtagaagatcttagacgtcctttgatg

SEQ ID NO: 15102 - DNA, 2928 bp, Oryza sativa
  Clone ID: TFbOSC17324j.C1.o1.fg
ggaggttcttcgtctattgttcgtccgcagcgtcagttcttcaacaacaatgctggcaacaacatccgtaatcaagttccacgtcctgttgcagctccaacacagcaacaacctgccaagagggagcaaggcagcaaacccgtggtgtgtttcaactgtggagacccaggacattacgctgacaagtgtccgaagccccgacgcgtgaaggttgtccctactcagagcaactctaccgcaccagcatcaaaggcccgtgtcaatcatgtcgctgctgcagaagctcaagatgctccagatgtgattttgggtacgttccttgttaacttagttcctgccacagtgcttttcgattctggtgctacacattcattcttatctatgagttttgcgggaaatcatgggatggaagtagaagatcttagacatcctttgatggttagtaccccaagtaatcaagcactctctttgcaacgtagcccctctgtcagaatagaaattaaaggagtaccatttctggccaatcttatcttgttagaatccaaagaccttgatgtcatcctagggatggactggttagccagacataaaggtgtgatagactgtgctaacagaaaagtaactctcatcagcaatgatggtcgagttgtaactgttcatgcattgtcatctgagtctttaaggtcaagactgaaccagataactttggaagagattcctatagtccgggagtatcccgatgtgttcccagatgatttacctggtatgccgcccaaaagggatatagagttcagaatagatttggtaccaggaacaactccgatccataagagaccttatagaatggcagccaatgagttggcagaagtcaaaaggcaagtagacgatttgcttcagaaagggtacatcagaccgagttcatctccatggggtgctccggttatttttgtggaaaagaaagaccatactcagcggatgtgtgtggactatcgtgcattaaacgatgtgactatcaagaataagtatccgctgcccagaattgatgatttgtttgatcagcttaaaggtgctactgtattctccaagatagatcttcgatcaggatatcaccagttgagaatcaaagaggaagatatacctaagacagcttttaccactaggtatgggttgttcgaatgtactgttatgtcttttggacttaccaatgcccctgctttcttcatgaacttgatgaataaggtgtttatggaatacctagacaagtttgtggtggtctttattgatgacattcttatctactcccgaaccaaagaagagcatgaagaacatcttcgccttgcattggagaagctacgagaacatcaactgtatgctaagtttagcaagtgtgaattttggttgtctgaagtgaagttccttggtcacgtcatctcagcaggaggagttgccgtcgatcccagtaatgtggaatccgtaaccaactggaaacaaccaaagacagtttcagagattcgcagttttctaggcctcgcaggatattaccggaggtttatagagaatttttccaagattgctaagcccatgacacgactgctacagaaagatgtgaagtacaagtggtcagaagaatgtgagcagagttttcaagagttgaagaatcgcttgatatcagctcctattttgattttacccgatccaaagaagggtttccaagtctattgcgatgcatccaaacttgggttaggttgtgttctgatgcaagatgggaaggtggttgcctatgcatctcgtcagttacgtccgcatgagaagaactaccctactcatgatcttgagttagctgcagtagttcatgcgttgaaaatttggcgtcattatcttttcggtactcgtacagaggattatgacatgggaattcattatcacccaggaaaggcaaatgttgtagccgacgctcttagcaggaaaggctattgcaatgctaccgaaggacgacagttgccattggagttatgccaggaatttgaaagattaaatttgggaattgtcagtagagagatcaagaagaatatgagaagaggaaaagctatcggtttcttggaggatgagcaaggaactgtttggttgggcgagagaatctgtgtccctgacaacaaagatttaaaagatgtaattctgaaagaagctcatgatactttatactctattcaccctggtagtactaagatgtaccaggatctcaaggaaagattttggtgggcaagtatgaaacgtgaaatagcagaatatgtagcagtatgtgatgtttgtcagcgagtcaaggcagaacatcagaaacctgccagtttgctgcagcctttaaagattcctgaatggaagtgggaagaaatcggtatggattttatcactggtttacccagaacgtcatcgggtcatgactctatttgggtgatagtcgacagacttaccaaagtagctcatttcattccggtaaagacaacctattctggaagtcggttggcggaattgtacatggcaaggatcgtgtgtttgcatggcgtccctaagaaaatagtgtctgatcgaggcagtcagtttacttcaaatttttggaagaaacttcaggaagagatgggttctaagctgaactttagtactgcttatcatccgcagacagacggacaaaccgaaagggtgaatcaaattttggaagacatgttgagagcttgtgctttagacttcggtggaagttgggataagagtctaccttatgcagaattttcgtacaacaacagttatcaagctagtcttcagatggctccttacgaagcactgtatggtcggaagtgccgcactccacttttgtgggatcaaacgggagaacgtcaggttttcgggacggatatcctaagagaagcagaagaaaag

SEQ ID NO: 15103 - DNA, 2233 bp, Oryza sativa
  Clone ID: TFbOSC17993j.C1.o1.gm
atggagcccgagaactccgcggccggtttcctttctctccggccgccctctctctctcccgtcgctataaaatcaatccccgagctccgctcctccgtttccgccactcgccgctcactctccccgtcggaatcgagcccgcaccgtcgcactttctctccgccgtcgccgccgtgctccggttcgccgccgtcgtcgctccggacttcctcccgactcggcgtcacctccatcggcttcgccgcgttgccgtcgaccccgtccgcgcctccgtttcgcccgccgaccgccggagcaccgtcgtcctcgtcatcccgaaccgcgccgccgcctctcgccgcttcggtcgtcgtttccgccgccctcgtcgtcccggggtgggacccggccgtcagccgcccgcgcccgcgggtgcggctgacgcgtgggacccacggcgccgaccgccgccagccgcgtgctcccgacgctgcagcttcggaagatccgctcttcgtggaagttgaagccgcacctcggccatataaggaccggtcttcgggcctctgttgcaacgcactaccgtacttccacatgtctagtggggcaaatgaaggctacacgagctgcggcccggagaaggtctcatttgcatcacatcagttgcatggccctgcctctgaatggtgggatcacttccgccttaacaggactactgctgaacctatcacttggcttgaattcaccgctgctttccgaaagacgcatataccatcgggagtagtgtctctcaagaagaaggagttcaggtcgcttacccagggatctcgctctgttacggagtatctgcacgagttcaatcgtcttgctcgttatgctccggaagatgtgcgcaatgatgaagagcgccaggagaagtttttgggaggacttaatgatgagctttcttacccacttatggttggagattaccctgatttccagaaattagtggataaggctattcgtcaggaggacaagtacaatcgcatggagcagaagaaacgtcggattgctcaattcaagacacaacagggaaataatcaaaagccgcgtcttaccttaggaccccagtccatgccacagggaggttcttcgtctgttgttcgtccgcaacgtcagttcttcaacaacaatgctggcaacaacatccgtaatcaagctccacgtcctgttgcagctccagcacagcaacaacctgccaagagggagcaaggcagcaagcccgtggtgtgtttcaactgtggagatccaggacattatgctgacaagtgtccgaagccccgacgcgtgaaggttgtccctgtccagaataactctgctgtaccagcatcaaaggcccgtgtcaatcatgttgctgctgcagaagctcaagatgctccagatgtggttttggtccgggagtatcctgatgtgttcccagatgatttaccggccaatgagttggcagaagttaagaggcaagtagatgatttgctacagaaaggatacatcagaccgagttcatcaccatggggagctccggttatttttgtggaaaagaaagaccatactcagagaatgtgtgtggactatcgtgcactaaacgatgtgactatcaagaataagtatccactacccaggattgatgatttgtttgatcagcttaaaggtgccactgttttctccaagatagatcttcgatcagggtattatcagttgagaatcaaagaggaagatatacctaagacagcttttaccactaggtatgggttgttcgaatgtactgttatgtcttttggacttaccaatgcccctgctttcttcatgaacttgatgaataaggtgtttatggaatacctagacaagttcggggtggtctttattgatgatattcttatctactctcgaaccaaagaagagcatgaggaacatcttcgtcttgcattggagaagctacgagaacatcaactgtatgctaagtttagcaagtgtgaattttggttgtccgaagtgaaattccttggtcacgtcatctcagccggaggagttgccgtcgatcctagtaacgtggaatccgtaaccaattggaagcaaccaaagacagtttcagagattcgcagtttcctaggcctcgcaggatattaccggaggtttatagagaatttttccaagattgctaagcccatgacacgactgcttcagaaagatgtgaagtacaagtggtcggaagaat

SEQ ID NO: 15104 - DNA, 4779 bp, Oryza sativa
  Clone ID: TFbOSC18197j.C1.o1.np
ggggagcacctctatatagaaaatttggagatagaactgtgcagccggggtggttgttcagaatggttgggcctatacaacaggatgccgcgttacaagcctgagtacctgtttggtgttgagggttttgtccaggagttgcgtacgatgtcctttgtcattggatttgggactgcccctttttatgcccagattcctcatgatcgtcatgaagagaagtgccgagtcaaagtcaccttgaacagcaatagtgaagaggtcccctcagtgatgtttgaagctggaggaagaaactacatccatgcatgtcaggaggtggcaaggattgccataggagagctccgtgatcgctacagtgatcaattggccgacactgagtatcgctaccatcctcgccaacctcagggaagtgaccgtggtagttaccttgagactgaaggaattgagaatgatgttaccacgaaacatttggttgagatgttgtgggctatggatgaaagtcgtgcagagactgtgttagcagctcaagatcgtgaagatcggaatcgtggtaagatttgcaagctagaagacaaggtggatcgtttggagaaggaattagccgcattgaagggagaagcaccgccgcagaaggccaggattcgtcttaccgcaaggaagagagctctatttgtccctcgctatcaactggcgccaaagatggtgaacactcgtagcaatgggaatggtcccaacaaccccaataacaacacaatggagagaatcccactctggcccaagttcttgctcaacagacacagcttatgaacatgatgatgcagcaatttcagaatcagcaaaaccaagggaataatcatgcacctccacagaacaagttagcagaatttcttcgtgtgaggccgcctgttttctctagtaccactaatcctgttgaagctagtgattggctgcatgccatagagaagaagttggatttacttcagtgtactgatcaggagaaggtctcatttgcatcacatcagttgcatggccctgcctctgaatggtgggatcatttccgccttaacaggactactgctgaacctatcacttggcttgaattcaccgctgctttccggaagaaacatataccatcgggagtagtgtctctcaagaagaaggagttcaggtcgctttcccagggatctcgctctgttacggagtatctgcacgagttcaatcgtcttgctcgttatgctcggaaagatgtgcgcaatgatgaagagcgccagaagaagtttttgagagaacttaatgatgagctttcttacccactcatggttggagattatcctgatttccagaaattagtggataaggctattcgtcaggaggacaagtacaatcgcatggagcagaagaaacgtcggattgctcaattcaagacacaacagggaaataatcagaagccgcgtcttactttaggaccccagcccatgccacagggaggttcttcgtctgttgttcgtccgcaacgtcagttcttcaacaacaatgctggcaacaacatccgtaatcaagctccacgtcctgttgcagctccagcacagcaacaacctgccaagagggagcaaggcaacaagcccgtggtgtgtttcaactgtggagatccaggacattatgctgacaagtgtccgaagccccgacgcgtgaaggttgtctctgctcaaagtaactctgctgtaccagcatcaaaggcccgtgtcaatcatgttgctgctgcagaagctcaagatgctccagatgtgattttgggtacgttccttgttaactcagttcctgcaacagtacttttcgattctggtgctacacattcattcttatctatgagttttgcgggaaatcatgggatggaagtagaagatcttagacgtcctttgatggttagtactccaagtaatcaagcactctctttgcaacgtagcccctctgtcagaatagaaattcaaggagtaccatttctggccaatcttatcttgttagaatccaaagaccttgatgtcatcctagggatggactggttagccagacataaaggtgtgatagactgtgccaacagaaaagtaactctcaacagctatgatggtcgagttgtaactgttcatgcattgtcatctgagtctttaaggtcaagactgaaccagataactttggaagagattcctatagtccgggagtatcctgatgtgttcccagatgatttacctggtatgccgcctaaaagggatatagagttcagaatagatttggtacctggaacaactccgatccataagagaccttatcgaatggcagccaatgagttggcagaagttaagaggcaagtagatgatttgctacagaaaggatacatcagaccgagttcatcaccatggggagctccggttatttttgtggaaaagaaagaccatacccagagaatgtgtgtggactatcgtgcactaaacgatgtgactatcaagaataagtatccactacccaggattgatgatttgtttgatcagcttaaaggtgccactgttttctccaagatagatcttcgatcagggtatcatcagttgagaatcaaagaggaagatatacctaagacagcttttaccactaggtatgggttgttcgaatgtactgttatgtcttttggacttaccaatgcccctgctttcttcatgaacttgatgaataaggtgtttatggaatacttagacaagttcgtggtggtctttattgatgatattcttatctactctcgaaccaaagaagagcatgaggaacttcttcgccttgcattggagaagctacgagaacatcaactgtatgctaagtttagcaagtgtgaattttggttgtccgaagtgaaattccttggtcacgtcatctcagccggaggagttgccgtcgatcctagtaacgtggaatccgtaaccaattggaagcaaccaaagacagtttcagagattcgcagtttcctaggcctcgcatgatattaccggaggtttatagagaatttttccaagattgctaagcccatgacacgactgcttcagaaagatgtgaagtacaagtggtcggaagaatgtgaacagagttttcaagaattgaaaagtcgcttaatatcagctcctattttgattttgcctgatccaaagaagggttttcaagtgtattgtgatgcatccaaacttgggttaggttgtgttctgatgcaagatgggaaggtggttgcctatgcctctcgacagttacgtccgcatgagaagaactaccctactcatgatattgagttagctgcagtcgttcatgcattgaagatttggcgtcattatcttttcggtactcatacagaagtgtacaccgatcacaagagtttaaagtatatctttactcagccggatctgaacataaaacaacggagatggttggaattaattaaggattatgacatgggaattcattatcatccgggtaaaggctaatgttgtagcagacgctcttagcagaaaaggccattgcaatgctacagaaggacgacagttgccattggaattatgtaaggaatttgaaagattaaatttgggaattgtcggtagaggtttcgttgcagccttagaagcgaagcccactctaattgatcaagttagagaagcccaaattaatgatcctgatattcaagagatcaagaagaatatgagaagaggaaaagctattggtttcttggaggatgagcaaggaactgtatggttgggtgagagaatctgtgtccccgacaacaaagatctaaaagatgcaattctgaaagaagctcatgatactttatactccattcaccctggtagtactaagatgtaccaggatcttaaggaaagattttggtgggcaagtatgaagcgtgaaatcgcagaatacgtagcagtatgtgatgtttgtcagcgagtcaaggcagaacatcagaaacccgccggtttgttgcaacctttgaagattcctgaatggaaatgggaagaaattggtatggattttattactggtttacccagaacgtcatcaggccatgactctatttgggtgatagtcgacagacttaccaaagtggctcatttcattccggtaaagacaacttattccggaagtcgcttagcggaattgtatatggcaaggattgtgtgtttgcatggcgtccctaagaagatagtgtctgatcgaggcagtcagtttacttcaaatttttggaagaaacttcaggaagagatgggttctaagctgaactttagtactgcttatcatccgcagacagacggacaaaccgaaagggtgaatcaaattttggaagacatgttgagagcttgtgctctagatttcagtggaagttgggataagaatctaccctatgcagaattttcatacaacaacagttatcaagctagtctacagatggctccgtacgaagcactgtatggtcgaaagtgccgcactccgcttttgtgggatcaaacgggagaacgtcaggttttcggaacggatatcctaagggaagcagaagaaaaggtaaagatcattcaagaaagattgcgagtggctcagtctcgacataagagttatgccgacaatcgccgtaaagatttgagttttgaagaaggagactatgtgtatcttcgagccacaccctttttgggggtttttaacagcaattttatataatctccaaaactttcttaaacacgaaaatccctctgtaaaaggaac

SEQ ID NO: 15105 - DNA, 1207 bp, Oryza sativa
  Clone ID: TFbOSC18999j.C1.o1.gm
gtcgctcactcagggatctcgctctgttacggagtatctgcacgagttcaatcgtcttgctcgttatgctccggaagatgtacgcactgatgaagagcgccaggagaagttcttggaaggacttaatgatgagctttcttatccactcatgactggggattatcctgatttccagaagttggtggataaggctattcgtcaggaggacaagtacaatcgtatggagcagaagaaacgccggattgctcaattcaagacacaacagggaagtaatcagaagccgcgtcttactttaggacaccagtccatgccacagggaggttcttcgtctgttgttcgtccgcagcgtcagttcttcaacaacaatgctggcaacaacatccgcaatcaagctccacgtcctgttgcagctccaacacagcaacaacctgccaagagggagcaaggcagcaagcccgtggtatgtttcaactgtggagacccaggacattatgctgacaagtgtccgaagccccgacgtgtgaaggttgtccctacccagagcaactctaccgtaccagcatcaaaggctcgtgtcaatcatgttgctgctgcagaagctcaagatgctccagatgtgattttggaaaggatacatcagaccgagttcatcaccatggggagctccggttatttttgtggaaaagaaagaccatacccagagaatcttaaaggtgccactgttttctccaagatagatcttcgatcggggtatcaccagttaagaatcaaagaggaagatatacctaagacagcttttaccactagcaccttagcgccgagtagcatcgagccgccgtcgccgccgttgctccagccgtgcgccgccgccgttccggtcatcgtcgtcgctcgggaagactgccgtcgtggtcgccaagtcgccgccgtcctcgtccgcctcttcgtcgccgccgaagaccgccggagcaccgtcgccgccgtcgacccgatcttctccgccgtttcaacctcgtcgccgtcgccgtccgttggtcttccgccgctcctttggtcaccgcgccaccaccaccgcgccgccgccgctgccttcctctccttcctatgcctagtgagcggtggggacggggtaaagggaggaggagtacgaatacgtgttcatcagacgcagcggcatggcgaagttgaacctgctggcacgggatga

SEQ ID NO: 15106 - DNA, 5064 bp, Oryza sativa
  Clone ID: TFbOSC19032j.C1.o3.fg
atgccgcgctacaagcctgagtacttgtttggtgtcgatggttttgtccaggagttgcgtacgatgtcctttgtcattggatttgagactgcccctttttatgctcagattcgtcatgatcgtcatgaagagaagtgccgagtcaaagtcaccttgaacagtaatagtgaagatattccctcagtgatgttcgaagctggaggaagaaactacatccatgcatgtcaggaggtggcaaggatcgccataggagagctccgtgatcgctacagtgatcagttggccgacactgagtatcgctaccatcctcgccaaccccagggaagtgaccgtggcagctaccttgagactgaaggaattgagaatgatgctaccacaaggcatttggttgagatgctgtgggctatggatgaaagtcgtgcggagactgtgttagcggctcaagatcgtgaagaccggaatcgtggtaagatttgcaagttagaagacaaggtggatcgtttggagaaggaattagctgagttgaagggagaagcaccgccgcagaaggccaggattcgtcttaccgcaaggaagagagctttatttgtccctcgctatcaattggcgccaaagattcgtgtggtggagaaagaagttgccccaactttagcagatcctccggttatcatcataagtgatgatgaagaagaagaatccaagcgcaacaattccaagattgagtggttttccccggtttctcttcttgtgccctgcccatgcctgatggtgaacactcgcagcaacgggaatggccccagtaacaataacaatggagagaatcccactcttgctcaagttcttgctcaacagactcagcttatgaatatgatgatgcagcaacttcagaatcaaggaaataaccatgcatctcctcagaataagttagcagaatttcttcgtgtgaggccgcctattttctctagcaccactaatcctgttgaagctggtgattggttgcatgccatagataagaagttggatttgcttcaatgcactgatcaggagaaggtctcatttgcatcacatcagttgcatggccctgcctctgaatggtgggatcacttccgccttaacaggactactgctgaacctatcacttggcttgaattcaccgctgctttccggaagacgcatataccatcgggagtggtgtctctcaagaagaaggaattcaggtcgctcacccagggatctcgctctgttacggagtatttgcacgagttcaatcgtctggctcgttatgctccagaagatgtgcgcaatgatgaagagcgccaggagaagttcttggaaggacttaatgatgagctttcttacccactcatgactggagattatgctgatttccagaagttggtggataaggctattcgtcaggaggacaaatacaatcgcatggagcagaagaaacgccggattgctcaattcaagacacaacaggggaataatcagaggccgcgtcttactttaggaccccagtctatgccacagggaggttcttcgtctgttgttcgtccgcagcgtcagttcttcaacaacaatgctggcaacaatatccgtaatcaagctccacgccctgttgcagctccaacacagcaacaacctgccaagagggagcaaggcagcaagtccgtggtgtgtttcaactgtggagacccaggacattatgctgataagtgtccgaagccccgacgcgtgaaggcccgtgtcaatcatgttgctgctgcagaagctcaagatgctccagatgtgattttgggtacgttccttgttaactcagttcatgcaacagtgcttttcgattctggtgctacacattcattcttatctatgagttttgcgggaaatcatgggatggaagtagaagatcttagacgtcctttgatggttagtaccccaagtaatcaagcactctctttgcaacgtagcccctctgtcagaatagaaattcaaggaataccatttctggccaatcttatcttgttagaatccaaagaccttgatgtcatcttagggatggactggttagccagatataaaggtgtgatagactgtgctaacagaaaagtaactctcaccagcaatgatggtcgagttgtgactgttcatgcattgtcttctgagactttaaggtcaagactgaaccaaataactttggaagagattcctgtagtccgggagtattccgatgtgttcccagatgatttacctggtatgccgcctaaaagggatatagagttcagaatagatttggtaccaggaacaactccgatccataagagaccttatagaatggcagccaatgagttggcagaagtcaagaggcaagtagacgatttgcttcagaaaggatacatcagaccaagttcatctccatggggagctccggttatttttgtggaaaagaaagatcatacccagaggatgtgtgtggactatcgagccctaaacgatgtgactatcaagaataagtatccgctacctagaattgatgatttgtttgatcagcttaaaggtgctactgttttctccaagatagatcttcgatcagggtatcaccagttgagaatcaaagaggaagatatacctaagacagcatttaccactaggtatgggttgttcgatgtgtttatggaatacttagacaagttcgtggtggtctttattgatgatattcttatctattctcgaaccaaagaagagcatgaagaacatctttgccttgcactagagaagctacgagaacatcaactgtatgctaagtttagcaagtgtgaattttggttgtctgaagtgaagttccttggtcacgtcatctcagcaggaggagttgccatcgatcctagtaatgtggaatccgtaaccaactggaagcaaccaaagacagtttcagagattcgcagtttcttaggccttgcaggatattatcgaaggtttatagagaatttttccaagattgctaagcccatgacacgattacttcgaaaggatgtgaagtacaagtggtcagaagaatgtgagcggagttttcaagagttgaagaatcgcttaatatcagctcctattttgattttacctgatccaaagaagggtttccaagtgtattgcgatgcatccaaacttgggttaggttgtgttctgatgcaaaatgggaaggtggttgcctatgcatctcgtcagttacgtccgcatgagaagaactaccctactcatgatattgagttagccgtagtagttcatgcgttgaaaatttggcgtcattatcttttcggtactcgtacagaggtatataccgatcacaagagtttgaagtatatctttactcagccggatctgaacatgagacaaaggagatggttggaattaattaaggattatgacatgggaattcattatcacccggggaaggctaatgttgtagcagacgctcttagcagaaaaggctattgcaatgctacggaaggacgacagttgccgttggaattatgcaaggaatttgaaagattaaatttgggaattgtcagtagaggttgcgttgcagccctagaagcgaagcccactctaattgatcaagttagagaagcccaaattaatgatcctgatattcaagaaatcaagaagaatatgagaagaggaaaagctattggtttcttggaagatgagcaaggaactgtatggttgggtgagagaatctgtgtccccgacaacaaagatttaaaagatgcaattctgcaagaagctcatgatactttatactccattcaccctggtagtaccaagatgtaccaggatctcaaggaaagattttggtgggcaagtatgaagcgtgaaatcgcagaatacgtagtagtatgtgatgtttgtcagcgagtcaaggcagaacatcagaaacccgccggtttgttgcagcctttgaagattcctgaatggaaatgggaagaaatcggtatggattttatcactggtttgcccagaacgtcatcaggccatgactctatttgggtaatagtcgacagacttaccaaagtggcacatttcattccggtaaagacaacttattctagaagtcgattggcggaattgtatatggcaaggattgtgtgtttgcatggtgtccctaagaagatagtgtctgatcgaggcagtcagtttacttcaaatttttggaagaaacttcaggaagagatgggttctaagctgaactttagtactgcttatcatccgcagacagacggacaaaccgaaagggtgaatcagattttggaagacatgttgagagcttgtgctttagatttcggtggaagttgggataagaatctaccttatgcagaattttcgtacaacaacagttatcaagctagtctacagatggctccttacgaagcactgtatggtcggaagtgccgcactccgcttttgtgggatcaaacgggagaacgtcaggttttcgggacggatatcctaagggaagcagaagaaaaggtgaaaatcattcaagaaagattgcgagtggctcagtctcgacataagagttatgccgacaatcgctgcagagatttgagttttgaagaaggagattatgtgtatcttcgtgtcacgcctcttcgaggtgttcatcgttttcacaccaaaggaaaattggcaccgcgttttgtgggaccttataagattgtcagtagaagaggagaggttgcttatcaattggaattacctcaatccttggcaggagtccataatgtgttccatgtgtcgcaattgaagaagtgtttaagggtacctaccgaagaagctaatcttgaacagatagaagtccaagaggatctgacctatgttgagaaaccaatccgtatcttggaaacgaatgagagaagaaccaggaatcgagttatccgtttttgcaaagtccaatggagtaatcactcggaagaggagtcaacttgggaacgagaagatgaattgaagtcagctcatccacatctgttcgccagttcttccgaatctcgaggacgagattctgtttaa

SEQ ID NO: 15107 - DNA, 3810 bp, Oryza sativa
  Clone ID: TFbOSC19140j.C1.o2.fg
atgatgatgcagcaactccagaaccagcagaaccagggaaataaccatgcacctccccagaacaagttagcagaatttcttcgtgtgaggccgcctattttctctagtaccactaatcctgttgaagctggtgattggttgcacgccatagaaaagaagttggatttgcttcagtgcactgatcaggagaaggtctcatttgcatcacaccagctgcatggccctgcctctgaatggtgggatcactcccgccttaataggattactgctgaacctatcacttggcttgagttcaccgctgctttccggaagacgcatataccatcgggagtggtgtctctcaagaagaaggaattcaggtcgctcacccagggatctcgctctgttaccgagtatctgcacgagttcaatcgtctggctcgttatgctctggaagatgtacgcactgatgaagagcgccaggagaagttcttggaaggacttaatgatgagctttcttatccactcatgactggggattatcctgatttccagaagttagtagataaggctattcgccaggaggacaagtacaatcgcatggaacagaagaaacgccggattgctcaattcaagacacaacaggggaataatcagaggccgcgtcttactttaggaccccagtccatgccacagggaggttcttcgtctgttgttcgtccgcagcgtcagttcttcaacaacaatgctggcaacaacatccgcaatcaagctccacgccctgttgcagctccaacacagcaacagcctgccaagagggagcaaggcagcaagcccgtagtgtgtttcaactgtggagacccaggacattatgctgacaagtgtccgaagccccgacgcgtgaaggctgtccctgcccagagcaactctaccgcaccagcgccaaaggcccgtgtcaatcatgttgctgctacagaagctcaaggtgctccagatgtgattttgggtacgttccttgttaacttagtccctgcaacagtgctttttgattctggtgctacacattcattcttatctatgagttttgcgggaaatcatgtgatggaagtagaagatcttagacgtcctttgatggttaataccccaagtaatcaagcactctctttgcaacgtagcccctctgtcagaatagaaattctcagatcattatttctggccaatcttatcctgttagaatccaaagaccttgatgtcatcctagggatggactggttagccagatataagggtgtgatagactgtgctaacaggaaagtaactctcaccagtgatgatggtcgagttgtaacaattcatgcattgtcttctgagtctttaaggtcaagactgaaccaaataactttggaagagattcctatagtccgggagtatcctgatgtgttcccagacgatttacctggtatgcctcctaaaagagatatagagttcagaatagatttggtaccaggaacaactccgatccataagagaccttatagaatggcagccaatgagttggcagaagtcaaaaggcaagtagacgatttgcttcagaaaggatacatcagaccgagttcatctccatggggagctccagtaatttttgtggaaaagaaagaccatacccagaggatgtgtgtggactatcgtgcactaaatgatatgactatcaagaataagtatccgctgcccagaattgatgatttattcgatcagcttaaaggtgccaccgttttctccaagatagatcttcgatcagggtatcatcagttgagaatcaaagaggaagatatacctaagacagcttttaccactaggtatggattgtttgaatgtactgttatgtcttttggacttaccaatgcccccgctttcttcatgaacttgatgaataaggtgtttatggaatacctagacaagttcgtggtggtctttattgatgacattcttatctactcccgaaccaaagaagagcatatagaacatcttcgccttgcactagaaaagctacgagaacatcaactgtatgctaagtttagtaagtgtgaattttggttgtctgaagtgaagttccttggtcacgtcatctcagcaggaggagttgccgtcgatcctagtaatgtggaatccgtaaccaactggaaacaaccaaagacagtttcagagattcgcagtttcctaggcctcgcgggatattatcggaggtttatagaaaatttttccaagattgctaagcccatgacacgattgcttcagaaagatgtgaagtacaagtggtcagaagaatgtgagcagagttttcaagagttgaagaatcgcttaatatcagctcctattttgattttacctgatccaaagaagggtttccaagtgtattgcgatgcatccaaactggggttaggttgtgttctgatgcaagatgggaaggtggttgcctatgcatctcgtcagttacgtccgcatgagaagaactaccctactcatgatcttgaattagctgcagtagttcatgcgttgaaaatttggcatcattatcttttcggtactcgtacagaggtgtataccgatcacaagagtttaaatagaggtttcgttgcagccttagaagcgaagcccactctaattgatcaagttagagaagcccaaattaatgatcctgatattcaagaaattaagaagaatatgagaagaggaaaagctatcggtttcttggaagatgagcaaggaactgtatggttgggtgagagaatctgcgtccccgacaacaaagatttaaaagatgcaattctgaaagaagcccatgatactttatactccattcaccctggtagtaccaaaatataccaggatctcaaggaaagattttggtgggcaagtatgaagcgtgaaattgcagaatacgtagcagtatgtgatgtttgtcagcgaatcaaggcagaacatcagaaacccgccggtttgttgcagcctttgaagattcctgaatggaaatgggaggaaatcggtatggatttcatcactggtttacccagaacgtcatcaggtcatgactctatttgggtgatagtcgacagacttaccaaagtggctcatttcatcccagtaaagacaacatattctggaagtcggttggcggaattgtatatggcaaggattgtgtgtttgcatggcgtccctaagaaaatagtgtctgatcaaggcagtcagtttacttcaaaattttggaagaagcttcaggaagagatgggttctaagctgaactttagtactgcttatcatccgcagacagacggacaaaccgaaagggtgaatcagattttggaagatatgttgagagcttgtgctttagacttcggtggaagttgggataagaatctaccttatgcggaattttcgtacaacaacagttatcaagctagtcttcagatggctccttacgaagcactgtatggtcggaagtgccgcactccgcttttgtgggatcaaacgggagaacgtcaggttttcgggacggatatcttgagggaagcagaagaaaaggtgaaaatcattcaagaaagattgcgtgtggcccagtctcgccataagagttatgccgacaatcgtcggagagatctaagttttgacgcaggagattatgtgtaccttcatgtcacgcctcttcgaggggttcatcgttttcataccaaaggaaaattggcaccgcgttttgtgggaccttataagattgtcagtagaagaggagaggttgcttatcagttggaattacctcaatttggcaggcgtccataa

SEQ ID NO: 15108 - DNA, 1620 bp, Oryza sativa
  Clone ID: TFbOSC19159j.C1.o1.gm
atgatgatgcagcaactccagaaccagcagaaccagggaaataaccatgcacctccccagaacaagttagcagaatttcttcgtgtgaggccgcctattttctctagtaccactaatcctgttgaagctggtgattggttgcacgccatagaaaagaagttggatttgcttcagtgcactgatcaggagaaggtctcatttgcatcacaccagctgcatggccctgcctctgaatggtgggatcactcccgccttaataggattactgctgaacctatcacttggcttgagttcaccgctgctttccggaagacgcatataccatcgggagtggtgtctctcaagaagaaggaattcaggtcgctcacccagggatctcgctctgttaccgagtatctgcacgagttcaatcgtctggctcgttatgctctggaagatgtacgcactgatgaagagcgccaggagaagttcttggaaggacttaatgatgagctttcttatccactcatgactggggattatcctgatttccagaagttagtagataaggctattcgccaggaggacaagtacaatcgcatggaacagaagaaacgccggattgctcaattcaagacacaacaggggaataatcagaggccgcgtcttactttaggaccccagtccatgccacagggaggttcttcgtctgttgttcgtccgcagcgtcagttcttcaacaacaatgctggcaacaacatccgcaatcaagctccacgccctgttgcagctccaacacagcaacagcctgccaagagggagcaaggcagcaagcccgtagtgtgtttcaactgtggagacccaggacattatgctgacaagtgtccgaagccccgacgcgtgaaggctgtccctgcccagagcaactctaccgcaccagcgccaaaggcccgtgtcaatcatgttgctgctacagaagctcaagtccgggagtatcctgatgtgttcccagacgatttacctgaaaggatacatcagaccgagttcatctccatggggagctccagtaatttttgtggaaaagaaagaccatacccagaggatcttaaaggtgccaccgttttctccaagatagatcttcgatcagggtatcatcagttgagaatcaaagaggaagatatacctaagacagcttttaccactagcctcgcgccgccgttgtcgccgccgctccagccgtgctccgccgtcgctccagtcgtcgccgtcgctcggggaggtcgccatcgtggtcgccgtcgcgtcgccgtcctcgtccgccccttcgccgtcgctgaagaccgccggagcatcgtcgccgtcgtcaagccgaaggtcgacgccgcttcttcctcgacgccgtcgccgtccgttgatcttccgccgccgttttggtcgctggtgagttcgccgcgtcgccctctacgtcctggtgccctccgttcgcgccgccgcgccatcgttcgccggcgagcttgtgctcccgagccgccgcaggtggtgacgtcaccgctgacgtcatcgtcgtcgtctctcgtggtccggccgtggatcggagaagagtttgaagagttccaagggggtgattatgatccaggaaag

SEQ ID NO: 15109 - DNA, 3881 bp, Oryza sativa
  Clone ID: TFbOSC20818j.C1.o1.np
atggtgcactgtggtgagttgtgttgtgcgaagggtattgtcacgatttccccctttgcagctcctggtttggaatggtatattcctggtttggagatagaactgtacagccggatgtcgcgctacaagcctgagtacttgtttggtgttgagggatttgttcagaagttgcgtacgatgtcctttgtcataggatttgggactgcccctttttatgcccagattcctcatgatcgtcacgaagagaagtgccgagtcaaagtcaccttgaacagtaatagtgaagatatcccctcagtgatgttcgaggctggaggaagaaactacatccatgcatgtcaggaggtggcaaggatcgccataggagagctccgcgatcgctacagtgatcagttggccgacagtgagtatcgctaccatcctcgccaaccacagggaagtgaccgtggcagctacctagagaccgagggaattgagaatgatgctaccacaaagcatttggttgagatgctgtgggctatggatgaaacccgtgcggagactgtgttagcggctcaagatcgtgaagaccggaatcgtggtaagatttgcaagctagaggacaaagtggatcgtttggagaaggaactagccgcattaaagggagaagcaccgccgcagaaggccaggattcgtcttaccgcaaggaagagagctctatttgtccctcgctaccaattggcgccaaaggtccgtgtggtggagaaagaagttaccccagccctagcggatcctccggtcatcaacatggtgctcactcgcagcaacgggaatggccccaacaacaccaataataacaacaacaatggagagaatcccacacttgcccaagtcctggctcaacagacacagcttatgaacatgatgatgcagcaactccagaaccagcagaaccagggaaataaccatgcacctccccagaacaagttagcagaatttcttcgtgtgaggccgcctattttctctagtaccactaatcctgttgaagctggtgattggctgcatgccatagagaagaagttggatatgcttcaatgcacggatcaggagaaggtctcatttgcatcacaccagttgcatggccctgcctctgaatggtgggatcacttccgcctgaataggactactgctgaacctatcacttggcttgaattcaccgctgctttccggaagacgcatataccatcgggagtggtgtctctcaagaagaaggaattcaggtcgctcactcaggggtctcgctctgttacggagtatctgcacgagttcaatcgtctggctcgttatgctccagaagatgtgcacactgatgaagagcgccaagagaagttcttggaaggacttaatgatgagctttcttacccactcatgactggggattatcctgatttccagaagttggtggataaggctattcgtcaggaggacaagtacaatcgcatggagcagaagaaacgccggattgctcaattcaagacacaacaggggaataatcagaagccgcgtcttactttaggaccccagtctatgccacagggaggtttttcgtctgttgttcgtccgcagcgtcagttcttcaacaataacgcgggcaacaacatccgtaatcaagctccacgccctgttgcagctccaacacaacaacaacctgccaagaaggagcaaggcagcaagctcgtagtgtgtttcaactgtggagacccaggacattatgctgacaagtgtccgaagccccgacgcgtgaaggttgtccctgcccagagcaactctaccgcaccagcatcaaaggctcgtgtcaatcatgtcgctgctgcagaagctcaagatgctccagatgtgattttgggtacatttcttgttaacttagttcctgcaacagtgcttttcgattctggtgctacacattcattcttatctatgagttttgcgggaaatgatgggatggaagtagaagatcttagacgtcatttgatggttagtaccccaagtaatcaagcactctctttgcagcatagtccctctgtcagaatagaaattcaaggagtaccctttctggccaatcttatcctattagaatccaaagaccttgatgtcatcctagggatggactggttagccagacataaaggtgtgatagactgtgctaacagaaaagtaactctcaccagcaatgatggacgagttgtaactattcatgcattgtcatctgagtctttaaggccaagtctgaaccaaataactttggaagagattcctacagtccgggagtatcccgatgtgttcccagacgatttacctggtatgccgactaaaagggatatagagttcagaatagatttggtaccaggaacaactccgatccataagagaccttatagaatggcagccaatgaattagcagaagtcaagaggcaagtagacgatttgcttcagaaagggtacatcagaccgagttcatttccatggggagctccggttatttttgtggaaaagaaagatcatacccagaggatgtgtgtggattatcgtgcactaaatgatgtgactatcaagaataagtatccgctacccagaattgatgatttgtttgatcagcttaaaggtgccaccgttttctccaagatagatcttcgatcaaggtatcaccagttgagaattaaagaggaagatatacctaagacagcttttaccactaggtatggattgttcgaatgtactgttatgtcttttggacttaccattgcccccgctttcttcatgaacttgatgaataaggtgtttatggaatacctagacaagtttgtgttggtctttattgatgacattcttatctactctcgaacaaaagaagagcatgaagaacatcttcgccttgtactagagaagctacgagaacatcaactgtatgctaagtttagcaagtgtgaattttggttgtctgaagtgaagttccttggtcacgtcatctcagccggaggagttgccgttgatcctagtaatgtggaatccgtaaccaactggaaacaaccaaagacagtttcagagattcgtagtttcctaggcctcgcaggttattatcggaggtttatagagaatttttccaagattgctaagcccaggacacgattgcttcagaaagatgtgaagtacaagtggtcagaagaatgtgagcagagttttcaagagttgaagaatcgcttaatatcagctcctattttgattttgcctgatccaaagaagggtttccaagtgtattgcgatgcatccaaacatgggttaggttgtgttctgatgcaagatgggaaggtggttgcctatgcatctcgtcagttacgtccgcatgagaagaactaccctactcatgatcttgaattagctgcagtagttcatgcgttgaaaatttggcgtcattatcttttcggtactcgtacagaggtatataccgatcacaagagtttaaagtatatctttactcagccggatctgaacatgagacaacggagatggttggaattaattaaggattatgacatgggaattcattatcacccgggaaaggctaatgttgtagcagacgctcttagcaggaaaggctattgcaatgctacggaaggacgacagttgccattggaattatgcaaggaatttgaaagattaaatttgggaattgtccgaagaggtttcgttgcagccttagaagcgaagcccactctaattgatcaagttagagaagcccaaattaatgatcttgatattcaagaaatcaagaagaatatgagaagaggaaaagctatcggtttcatggaggatgagcaaggaactgtatggttgggtgagagaat

SEQ ID NO: 15110 - DNA, 3978 bp, Oryza sativa
  Clone ID: TFbOSC20854j.C1.o2.fg
atggtgatcactcgcagcaatgggaatggccccaacaaccccaataacaacaatgaagggaacccaacacttgctcaagttcttgctcaacagactcagttaatgaacatgatgatgcagcaacttcagaaccagcagaaccagggaaataaccatgcacctccccagaacaagttagcagaatttcttcgtgtgaggccgcctattttctctagtaccactaatcctgttgaagctggtgattggctgcatgccatagagaagaagttggatttgcttcaatgcactgatcaggaaaaggtctcatttgcatcacatcagttgcatggccctgcctctgaatggtgggatcacttccgccttaataggactactgctgaacctattacttggcttgaattcaccgctgctttccggaagacgcatataccatcgggagtggtgtctctcaagaagaaggaattcaggtcgctcactcaggggtctcgctctgtcacggagtatctgcacgagttcaatcgtctggctcgttatgctccggaagatgtgcgcaatgatgaagagcgccaggagaagttcttggaaggacttaatgatgagctttcttatccactcatggctggagattatcctgatttccagaagttagtggataaggctattcgtcaggaggacaaatacaatcgcatggaacagaagaaacgccggattgctcaattcaagacacaaccgggaaataatcaaaggccgcgtcttactttaggaccccagtccatgccacatggaggttcttcgtctgttgttcgtccgcggcgtcagttcttcaacaacaatgctggcaacaacatccgcaatcaagctccacgccctgttgcagtttcgacacagcaacagcctgccaagagggagcaaggcagcaagcccgtagtgtgcttcaactgtggagacccaggacattatgctgacaagtgtccgaagccccgacgcgtgaaggttgtccctgcccagagcaactctaccgcatcagcatcaaaggcccgtgtcaatcatgttgctgctgcagaagctcaagatgctccagatgtgattttggaatccaaagaccttgatgtcatcctagggatggactggttagccagacataaaggtgtgatagactgtgctaacagaaaagtaactctcactagcaatgatggtcgagttgtaactgttcatgcattgtcttctgagtctttaaggtcaagactgaaccagataactttggaagagattcctatagtccgggagtatcccgatgtgttcccagatgatttacctggtatgccgcctaaaagggatatagagttcagaatagatttggtacctggaacaactccgatccataagagaccttatagaatggcagccaacgagttggcagaagtcaaaaggcaagtagatgatttgcttcagaaaggatacatcagaccgagttcatcaccatggggagctccggttatttttgtgaaaaagaaagatcatacccagaggatgtgtgtggactatcgtgcactaaacgatgtgactatcaagaataagtatccactacccagaattgatgatttgtttgatcagcttaaaggtgccactgttttctccaagatagatcttcgatcagggtatcaccagttaagaatcaaagaggaagatatacctaagacagcttttaccactaggtatggattgtttgaatgtactgttatgtcttttggacttaccaatgcccctgctttcttcatgaacttgatgaataaggtatttatggaatacctagacaagttcgtggtggtctttattgatgacattcttatctgctcccgaaccaaagaagagcatgaagaacatcttcgccttgtactagagaagctacgagaacatcaactgtatgctaagtttagcaagtgtgaattttggttgtctgaagtgaagttccttggtcacgtcatctcagcaggaggagttgccgttgatcctagcaatgtggaatccgtaaccaactggaaacaaccaaagacagtttcagagattcgcagtttcctaggcctcgcaggatattaccggaggtttatagagaatttttccaagattgctaagcccatgacacgactgcttcagaaagatgtgaagtacaagtggtcggaagaatgtgagcagagttttcaagagttgaagaatcgcttgatatcagctcctattttgattttacctgatccaaagaagggtttccaagtgtattgcgatgcatccaaacttgggttaggttgcgttctgatgcaagatgggaaggtggttgcctatgcatctcgtcagttacgtccgcatgagaagaactaccctactcatgatattgagttagctgcagtggttcatgcgttgaagatttggcgtcattatctttttggtactcgtacagaggctaatgttgtagcagacgctcttagcaggaaaggctattgcaatgctacagaaggacgacagttgccattggaattatgcaaggaatttgaaagattaaatttgggaattgtcagtagaggttttgttgcagccttagaagcgaagcccacactaattgatcaagttagagaagcccaaattaatgatcctgatattcaagagatcaagaagaatatgagaagaggaaaagctatcggtttcttggaagatgagcaaggaactgtatggttaggtgagagaatttgcgtccccgacaacaaagatttaaaagatgcaattctgaaagaagctcatgatactttatactccattcatcctggtagtaccaaaatgtaccaggatctcaaggaacgattttggtgggcaagtatgaagcgtgaaatcgcagaatacgtagcagtatgtgatgtttgtcagcgcgtcaaggcagaacatcagaaacccgccggtttattgcagcctttgaagattcctgaatggaaatgggaagaaataggtatggattttatcactagtttacccagaacgtcatcaggccatgactctatttgggtgatagtcgacagacttaccaaagtggctcatttcattccggtaaagacaacttattctggaagtcggttggcggaattgtatatggccaggattgtgtgtttgcatggcgtccctaagaagatagtgtctgatcgaggcagtcagtttacttcaaatttttggaagaagcttcaggaagagatgggttctaagctgaactttagtactgcttatcatccgcagacagacggacaaaccgaaagggtgaatcagattttggaagatatgttgagagcttgtgctttagatttcggtggaagttgggataagaatctaccttatgcagaattttcgtacaacaacagttatcaagctagtcttcagatggccccttacgaagcactgtatggtcagaagtgccgcactccacttttgtgggatcaaacgggagaacgtcaggttttcgggactgatatcctgagggaagcagaagaaaaggtaaaaatcattcaagaaagattgcgtgtggcccagtcccgacataagagttatgccgacaatcgccgcagagatttgagttttgaagaaggagattatgtgtatcttcgtgtcacgcctcttcgaggggttcattgttttcacaccaaaggaaaattgtcaccgcgttttgtgggaccttataagatcgtcagtagaagaggagaggttgcttatcagttggagttacctcaatctttggcaggagtccataatgtgttccatgtgtcgcaattgaaaaagtgtttaagggtacctaccgaagaagctaatcttgaacagatagaagtccaagaggatctgacctatgttgagaaaccaatccgtatcttggaaacagatgagagaagaaccaggaatcaagttatccgtttttgtaaagttcaatggagtaatcactcggaagaataa

SEQ ID NO: 15111 - DNA, 5265 bp, Oryza sativa
  Clone ID: TFbOSC22342j.C1.o3.fg
atgaagataacatcgagcaagctaatcaggccggtgccagttcagcaggatcagtctcaagagaataacagtagtggaaggaagcagcagagcaccaggttgagaagtggcggagataagcccacgggggtcgctggggagtccatacctctggtttttgaggggatgactatgatccgggaatggtgcactgtgcatggttcattgcggggcaccagactgagaagtggcggagataagcccacgggggtcgctggggagtccatgcctctggtttttgagggggtgattatgatccaggaagctcctggtttggaatggttaattcctggtttggaggtagaactgtgcagccgggatggttgttcagaatggttgggcctatacaacaggatgccgcgctacaagcatgagtacctgtttggtgttgagggttttgttcaggagttgcgtacgatgtcctttgtcattggatttgggactgcccctttttatgctcagattcctcatgatcgtcatgaagaaaagtgccgagtcaaagtcaccttgaacagcaatagtgaagatgtcccctcagtgatgtttgaagctggaggaaggaactacatccatgcatgtcaggaggtggcaaggatagccataggagagctccgtgatcgctacagtgatcagttggccgacaccgagtatcgctaccatcctcgtcaaccccagggaagtgaccgtggcagctacctagagattgaaggaattgagaatgatgctaccacaaggcatttggttgagatgttgtgggctatggatgaaagtcgtgcggagactgtgttagcagcccaagatcgtgaagatcggaatcgtggtaagatttgcaagctagaagacaaggtggatcgtttggaaaaggaattagccgcattgaagggagaagcaccaccgcagaaggccaggattcgtctcaccgcaaggaagagagctctatttgtccctcgctatcaattggcgccaaagatggtgaatactcgcagcaatgggaatggccccaaccaccccaataacaataacaatggagagaacccaactctggcccaagttcttgctcaacagactcagctaatgaacatgatgatgcagcaatttcagaatcagcagaaccaaggaaataaccatgtacctccccagaacaagttagcagaatttcttcgtgtgaggccgcctgttttctctagcaccactaatcctgttgaagctggtgattggctgcatgccatagagaagaagttggatttgcttcaatgcactgatcaggagaaggtctcatttgcatcacatcagttgcatggccctgcatctgaatggtgggatcacttccgcttgaataggattaatgctgaacctatcacttggcttgaattcgccgctgctttccggaagacgcatataccatcgggagtggtgtctcttaagaagaaggagttcaggtcgcttactcagggatctcgctctgtcacggagtatttacatgagttcaatcgtcttgctcgttatgctccggaagatgtgcgcaatgatgaagagcgccaggagaagtttttgggaggactcaatgatgagctttcttatccactcatgggaggttcttcatctgttgttcgtccgcaacgtcagttcttcaacaacaatgctggcaacaacatccgcaatcaagctccacgccccgttgcagctccaacccagcaacagcctaccaagagggagcaaggcagcaagcccgtggtgtgtttcaactgtggagacccaggacattatgctgacaagtgtccgaagccccgacgcgtgaaggttgtccctgcccaaaataactctgctgtaccagcatcaaaagcccgtgtcaatcacgtcgctgctgcagaagctcaagatgctccagatgtgattttgggtacgtttcctgttaactcagttcctgcaacagtgcttttcgattctggtgctacacattcatttttatcaatgagttttgcgggaaataatgggatggaagtagaagatcttagacgtcctttgatggttagtaccccgagtaatcaagcactctctttgcaatgtagcccctctgtcagaatagaaattcaaggaataccctttctagccaatcttatcttgttagaatccaaagaccttgatgtcatcctagggatggactggttagccagacatagaggagtgatagactgtgctaacagaaaagtaactctcaccagtaatgatggtcgagttgtaactgttcatgcattgtcttcggagtctttaaggtcaagactgaaccagataactttggaagagattcctatagttcgggaatatcccgatgtgttcccagatgatttacctggtatgccgccaaaaagggatatagagttcagaatagatcttgtacctggaacaactccgatccataagagaccttatagaatggcagccaatgagttggcagaagtcaaaaggcaagtagatgatttgcttcagaaaggatacatcagaccaagttcatcaccatggggagctccagttatttttgtggaaaagaaagaccatacccagaggatgtgtgtggactatcgtgcattaaacgatgtgactatcaagaataagtatccgctaccccgaattgatgatttgtttgatcagcttaaaggtgccactgttttctccaaaatagatcttcgatcagggtatcaccagttgagaatcaaagaggaagatatacccaagaccgcttttaccactaggtatgggttgttcgaatgtactgttatgtcttttggacttaccaatgcccccgctttcttcatgaacttgatgaataaagtatttatggaatacctagacaagttcgtggtggtctttattgatgatattcttatctactcccgaaccaaagaagagcatgaagaacatcttcgccttgctttggagaagctacgagaacatcaactgtatgctaagtttagcaagtgtgaattttggttgtctgaagtgaagttccttggtcacgtcatctcagcaggaggagttgccgtcgatcctagtaacgtggaatctgtaaccaactggaaacaaccaaagacagtttcagagattcgcagtttccttggcctcgcaggatattatcggaggtttatagagaatttttccaagattgctaagcccatgactcgattgcttcagaaagatgtgaagtacaagtggtcagaagaatgtgagcaaagttttcaagagttgaaaagccgcttaatatcagctcctattttgattttgcctgatccaaagaagggttttcaagtgtattgcgatgcatccaaatttgggttaggttgtgtcctgatgcaagatgggaaggtggttgcctatgcatctcgtcagttacgtccgcatgagaagaactaccctactcatgatcttgagttagctgcagtagtacatgcgtttaagatttggcgtcattatcttttcggtactcgtacagaggtgtacaccgatcataagagtttaaagtatatctttactcagccggatctgaacatgagacaaaggagatggttggaattaattaaggattatgacatgggaattcattatcacccgggaaaggctaatgttgtagcagacgctcttagtaggaaaagctattgcaatgctacggaagggcgacagttaccattggaattatgcaaggaatttgaaagattaaatttgggaattgtcagtagaggtttcgttacagccttagaagcgaagcccactctaattgatcaagttagagaagcccaaattaatgatcctgatattcaagagatcaagaagaatatgagaagaggaaaagctatcggtttcttggaggatgagcaaggaactatatggttgggcgagagaatctgtgtccctgacaacaaagatttaaaggatgcaattctgaaagaagctcatgatactttatactccattcaccctggtagtactaagatgtaccaggatctcaaggaaagattttggtgggcaagtatgaagcgtgaaatcgcagagtacgtagcagtatgtgatgtttgtcagcgagtcaaggcagaacatcagaaacctgccggtttgctgcagcctttgaagattcctgaatggaaatgggaagaaatcggtatggattttatcactggtttacccagaacgtcatcaggccatgattctatttgggtaatagtcgatagacttaccaaagtggctcattttattccggtaaagacaacttattccgaaagtcggttggcagaattgtatatggcaaggattgtgtgttcgcatggcgtccctaagaaaatagtgtctgatcgaggcagtcagtttacttcaaatttttggaagaaacttcaggaagagatgggttctaagctgaactttagcactgcttatcatccacagacagacggacaaaccgaaagggtgaatcagattttggaagacatgttgagagcttgtgctttagatttcggtggaaattgggataagaatctaccttatgcagaattttcgtacaacaacagttatcaagctagtatacagatggctccttacgaagcactgtatggtcggaagtgccgcactccgcttttgtgggatcaaacgggagaacgtcaggttttcgggactgatatcctgagggaagcagaagaaaaggtaaagatcattcaagaaagattgcgagtggctcagtctcgtcataagagttatgccgacaatcgccgtagagatttgagttttgaagaaggagattatgtgtatcttcgtgtcacgccttttcgaggagttcatcgttttcacaccaaaggaaaattagcaccgcgttttgtgggaccttataagaacgttagtagaagaggagaggttgcttatcagttagagttacctcaatctttggcaggagtccataatgtgttccatgtgtcgcaattaaagaagtgtttaagagtacctaccgaagaagctaatcttgaacagatcgaagtccaagaggatctgacctatgttgagaaaccaatccgtatcttggaaacaaatgagagaagaaccaggaatcgagttatccgtttttgcaaagttcaatggagtaatcattcggaagaagaatcaacttgggaacgagaagatgaattgaagtcagctcatccgcatctattcgccagttcttccgaatctcgaggacgagattctgtttaa

SEQ ID NO: 15112 - DNA, 5131 bp, Oryza sativa
  Clone ID: TFbOSC23002j.C1.o1.np
aacctctcttctctctctcttcggcccagattccgtcgtttccggagagtccgttttcgcagaagaagagtttgaagagttccaaggccagcaaggcaactcctggtttggaatggtacattcctggtttggagatagaactgtgcagccggggtggttgttcagaatggttgggcctatacaacaggatgccgcgttacaagcctgagtacctgtttggtgttgagggttttgtccaggagttgcgtacgatgtcctttgtcattcgatttgggactgcccctttttatgcccagattcctcatgatcgtcatgaagagaagtgccgagtcaaagtcaccttgaacagtaatagtgaagatatcccctcagtgatgtttgaagctggaggaagaaactacatccatgcatgtcaggaggtggcaaggatcgccataggagagctccgtgatcgctacagtgatcaattggccgacactgagtatcgctaccatcctcgccaaccccagggaagtgaccgtggcagttaccttgagactgaaggaattgagaatgatgctaccacgaagcatttggttgagatgctgtgggctatggatgaaagtcgtgcggagactgtgttagcagctcaagatcgtgaagaccggaatcgtggtaagatttgcaagttagaagacaaggtggatcgtttagagaaggaattagccgcattgaagggagaagcaccgccgcagaaggccaggattcgtcttaccgcaaggaagagagctctatttgtccctcgctatcaactggcgccaaagatggtgaacactcgcagcaatgggaatggtcccaacaaccccaataacaacaacaatggagagaatcccactcttgctcaagttcttgctcaacagacacagcttatgaacatgatgatgcagcaatttcagaatcagcaaaaccaaggaaataatcatgcacctccacagaacaagttagcagaatttcttcgtgtgaggccgcctgttttctctagtaccactaatcctgttgaagctagtgattggctgcatgccatagagaagaagttggatttgcttcagtgtactgatcaggagaaggtctcatttgcatcacatcagttgcatggccctgcctctgaatggtgggatcacttccgcctgaataggattactgctgaacctatcacttggcttgaattcaccgctgctttccggaagacgcatataccatcaggagtagtgtctctcaagaagaaggagttcaggtcgcttacccagggatctcgctctgttacggagtatctgcacgagttcaatcgtcttgctcgttatgctccggaagatgtgcgcaatgatgaagagcgccaggagaagtttttgggaggacttaatgatgagctttcttacccactcatggttggagattatcctgatttccagaaattagtggataaggctattcgtcaggaggacaagtacaatcgcatggagcagaagaaacgtcggattgctcaattcaagacacaacagggaaataatcagaagccgcgtcttactttaggaccccagcccatgccacagggaggttcttcgtctgttgttcgtccgcagcgtcagttcttcaacaacaatgctggcaacaacatccgtaatcaagctccacgtcctgttgcagctccagcacagcaacaacctgccaagagggagcaaggcaacaagcccgtggtgtgtttcaactgtggagacccaggacattatgctgacaagtgtccgaagccccgtcgcgtgaaggttgtccctgtccagaataactctgctgtaccagcatccaaggctcgtgtaaatcatgtcgctgctgcagaagctcaagatgctccagatgtgattttgggtacgttccttgttaactcagttcctgcaacagtacttttcgattctggtgctacacattcattcctatctatgagttttgcgggaaatcatgggatggaagtagaagatcttagacgtcctttgatggttagtaccccaagtaatcaagcactctctttgcaacgtagcccctctgtcagaatagaaattcaaggagtaccatttctggccaatcttatcttgttagaatccaaagacctagatgtcatcctagggatggactggttagccagacataaaggtgtgatagactgtgccaacaaaaaagtaactctcaccagctatgatggtcgagttgtaactgttcatgcattgtcatctgagtctttaaggtcaagactgaaccagataactttggaagagattcctatagtccgggagtatcccgatgtgttcccagatgatttacctggtatgccgcctaaaagggatatagagttcagaatagatttggtacctggaacaactccgatccataagagaccttatcgaatggcagccaatgagttggcagaagttaagaggcaagtagatgatttgctacagaaaggatacatcagaccgagttcatcaccttggggagctccagttatttttgtggaaaagaaagaccatacccaaaggatgtgtgtggactatcgtgcactaaatgatgtgactatcaagaataagtatccgctacccagaattgatgatttgtttgatcagcttaaaggtgccactgtattctccaagatagatcttcgatcagggtatcaccagttgagaatcaaagaggaagatatacctaagacagcttttaccactaggtatgggttgttcgaatgtactgttatgtcttttggacttaccaatgcccctgctttcttcatgaacttgatgaataaggtgtttatggaatacttagacaagtttgtggtggtctttattgatgacattcttatctattctcgaaccaaagaagagcatgaggaacatcttcgccttgcactagagaagctacgagaacatcaattgtatgctaagtttagcaagtgtgaattttggttgactgaagtgaagttccttggtcacgttatctcagcaggaggagttgccgtcgatcctagtaatgtggaatccgtaaccaactggaaacaaccaaagacagtttcagagattcgcagtttcctaggtctcgcaggatattaccggaggtttatagagaatttttccaagattgctaagcccatgacacgactgcttcagaaagatgtaaagtacaagtggtcggaagaatgtgagcggagttttcaagagttgaaaagtcgcttaatatcagctcctattttgattttgcctgatccaaagaagggttttcaagtgtattgcgatgcgtccaaacttgggttaggttgtgttctgatgcaagatgggaaggtggttgcctatgcctctcgacagttacgtccgcatgagaagaactaccctactcatgatattgagttagctgccgtcgttcatgcattgaagatttggcgtcattaccttttcggtactcgtacagaagtgtacaccgatcacaagagtttaaagtatatctttactcagccggatctgaacatgagacaacggagatggttggaattaattaaggattatgacatgggaattcattatcatccgggaaaggctaatgttgtagcagacgctcttagcagcaaaggctattgcaatgctacagaaggtcgacagttgccattggaattatgcaaggaatttgaaagattaaatttggaaattgtcagtagaggtttcgttgcagccttagaagcgaagcccactctaattgatcaagttagagaagcccaaattaatgatcctgatattcaagagatcaagaagaatatgagaagaggaaaagctattggtttcttggaggatgagcaaggaactgtatggttgggtgagagaatctgtgtccccgacaacaaagatctaaaagatgcagttctgaaagaagctcatgatactttatactccattcaccctggtagtactaagatgtaccaggatctcaaggaaagattttggtgggcaagtatgaagcgtgaaatcgcagaatatgtagcagtatgtgatgtttgtcagcgagtcaaggcagaacatcagaaacccgccggtttgttgcagcctttgaagattcctgaatggaaatgggaagaaataggtatggattttattactggtttacccagaacgtcatcaggccatgattcttttgggtgatagtcgacagacttacaaaagtagctcatttcattccggtaaagacaacctattccggaagtcgcttggcggaattgtatatggcaaggattgtgtgtttgcatggcgtccctaagaagatagtgtctgatcgaggcagttagtttacttcaaatttttggaagaaacttcaggaagagatgggttctaagctgaactttagcactgcttatcatccgcagacagacggacaaaccgaaagggtgaatcagattttggaagacatgttgagagcttgtgctttagatttcggtggaagttgggataagaatctaccttatgcagaattttcatacaacaacagttatcaagctagtttacagatggctccttacgaagcactgtatggtcggaagtgccgcactccgcttttgtgggatcaaacgggagaacgtcaggtttttgggacggatatcctaagggaagcagaagaaaaggtgaaaatcattcaagaaagattgcgtgtggctcagtctcgtcataagagttatgccgacaatcgccgcagagatttgagttttgaggaaggagattatgtgtatcttcgtgtcacgcctcttcgaggggttcatcgttttcacaccaaaggaaaattggcaccgcgttttgtgggaccttataagattgtcagtagaagaggagaagttgcttatcagttggagttacctcaatctttggcaggattccataatgtgttccatgtgtcgcaattaaaaaaatgtttaaggatacctaccgaagaagctaatattgagcagatagaagtccaagaggatttgacttatgttgagaaaccaatccgtatcttggaaacaaatgagagaagaaccaggaatcgagttatccgtttctgcaaagttcaatggagtaatcactcggaagaa

SEQ ID NO: 15113 - DNA, 2301 bp, Oryza sativa
  Clone ID: TFbOSC23131j.C1.o2.fg
atggtgaacactcgcagcaacgggaatggccccagtaacaataacaatggagagaatcccactcttgctcaagttcttgctcaacagacacagctaatgaacatgatgatgcaacaactccagaaccagcagaaccaaggaaataatcatgtacctcctcagaataagttagcagaatttcttcgtgtgaggccgcctgttttctctagtaccactaatcctgttgaagctggtgattggctgcatgccatagagaagaagttggatttacttcagtgcactgatcaggagaaggtctcatttgcatcacatcagttgcaaggccctgcctctgaatggtgggatcacttccgcctgaataggattactgctgaacctatcacttggcttgaattcaccgctgctttccagaagacgcatataccatcgggagtggtgtctctgaagaagaaggagttcaggtcgcttacccagggatctcgctctgttacggagtatctgcacgagttcaatcgtctggctcgttatgctccggaagatgtgcgcaatggtgaagagcgtcaggagaagtttttggaaggacttaatgatgagctttcttacccactcatgactggagattatcatgatttccagaagctagtggataaggctattcgtcaggaggacaaatacaatcgcatggagcagaagaaacgtcggattgctcaattcaagacacaacaggggaataatcagaagccgcgtcttactttaagaccccagtccatgccacatggaggttcttcgtttgttgttcgtccgcagcgtcagttcttcaacaacaatgctggcaacaacatccgcaatcaagctccacgtcctgttgcagctccaacacagcaacaacctgccaagagggagcaaggcagcaagcccgtggtgtgtttcaactgtggagacccaggacattatgctgacaagtgtccgaagccccgacgcgtgaaggttgtccctacccagagcaactctacggtaccagcatcaaaggcccgtgtcaatcatgttgctgctgcagaagctcaagatgctccagatgtgattttgggtacgttccttgttaactcagttcctgcaacagtacttttcgattctggtgctacacattcattcttatctatgagttttgcgggaaatcatgggatggaagtagaagatcttagacgtcctttgatggttagtaccccaagtaatcaagcactctctttgcatcgtagcccctctgtcagaatagaaattcaaggagtaccatttctggccaatcttatcctgttagaatccaaagacctagatgtcatcctagggatggactggttagccagacataaaggtgtgatagactgtgctaacagaaaagtaactctcaccagcaatgatggtcgagttgtgactgtttatgcattgtcttctgagtctttaaggtcaagattaaaccaaataactttggaagagattcctatagtccgggagtatcccgatgtgttcccagatgatttacctggtatgccgcctaaaagggatatagagttcagaatagatctggtaccaggaacaactccgatccataagagaccttatagaatggcagccaatgagttggcagaagtcaagaggcacgtagatgatttgcttcagaagggatacatcagaccgagttcatcaccatggggagctccagttatttttgtggaaaagaaagaccatacccagagaatgtgtgtggattatcgtgcattaaacgatgtgactatcaagaataagtatccgctacccagaattgatgatttgtttgatcagcttaaaggtgccactgttttctccaagatcgatcttcgatcaggatatcaccagttgagaatcaaagaggaagatatacctaagacagcttttaccactaggtatgggttgttcgaatgtactgttatgtcttttggacttaccaatgcccctgctttcttcatgaacttgatgaataaggtgtttatggaatacctagacaagttcgtggtggtctttattgatgatattcttatctactcccgaaccaaagaagagcatgaagaacatcttcgccttgcattggagaagctacgagaacatcaactgtatgctaagtttagcaagtgtgaattttggttgtctgaagtgaagttccttggtcacgtcatctcagcaggaggagttgccgttgatcctagtaatgtggaatccgtaactaattggaagcaaccaaagacagtttcagagattccagttttctag

SEQ ID NO: 15114 - DNA, 2323 bp, Oryza sativa
  Clone ID: TFbOSC24830j.C1.o1.np
atgccgcgttacaagcctgagtacctgtttggtgttgagggttttgtccaggagttgcgttcgatgtcctttgtcattggatttgggactgcccctttttatgcccagattcctcatgatcgtcatgaagagaagtgccgagtcaaagtcaccttgaacagtaatagtgaagatatccccttagtgatgtttgaagctggaggaagaaactacatccatgcatgtcaggaggtggcaaggatcgccataggagagctccgtgatcgctacagtgatcaattggccgacactgagtatcgctaccatcctcgtcaaccccagggaagtgaccgtggcagctatcttgagactgaaggaattgagaatgatgctaccacgaagcatttggttgagatgttgtgggctatggatgaaagtcgtgcggagactgtgttagccgctcaagatcgtgaagaccggaatcgtggtaagatttgtaagttagaagacaaggtggatcgtttggagaaggaattagccgcattgaagggagaagcaccgccgcagaaggccaggattcgtcttaccgcaaggaagagagctctatttgtccctcgctatcaactggcgccaaaggttcgtgtggtggagaaagaagttgccccagctcaagcggatcctccggtcatcatcataagtagtgatgaagaagaagaatccaagcgcaacaattccaagattgagtgggtagcaactcaagatgataaagacgagccttcaatcgacctccgatgcttggaagaactagagtgactttttccccggtttctcttcttgtgccctgtccatgccaatggtgaacactcgcagcaacgggaatggtcccaacaaccccaataacaacaatggagagaatcccattctggcccaagttcttgctcaacagacacagcttatgaacatgatgatgcagcaatttcagaatcaggaaaaccaaggaaataaccatgcacctccccagaacaagttagcagaatttcttcgtgtgaggccacctgttttctctagtaccactaatcctgttgaagctagtgattggctgcatgccatagagaagaagttggatttacttcagtgcactgatcaggagaaggtctcatttgcatcacatcagttgcatggccctgcctctgaatggtgggatcacttccgccttaacaggactactgctgaacctatcatttggcttgaattcaccgctgctttccggaagacgcatataccatcaggagtagtgtctctcaagaagaaggagttcaggtcgcttacccagggatctcgctctgttacggagtatctgcacgagttcaatcgtcttgctcgttatctccggaagatgtgcgcaatgatgaagagcgccaggagagtttttgggaggacttaatgatgagctttcttacccactcatggttggagattatcctgatttccagaaattagtggataaggctattcgtcaggaggacaagtacaatcgcatggagcagaagaaacgtcggattgctcaattcaagacacgacagggaaataatcagaagccgcatcttactttaggaccccagcccatgccacagggaggttcttcgtctgttgttcgtccgcagcgtcagttcttcaacaacaatgctggcaacaacatccgtaatcaaggtccacgtcctgttgcagctccagcacagcaacaacctgtcaagagggagcaaggcagcaagcccgtggtgtgtttcaactgtggagatccaggacattatgctgacaagtgtccgaagccccgacgcgtgaaggttgtccctgcccagaataactctgctgtaccagcatccaaggctcgtgtaaatcatgtcgctgctgcagaagctcaagatgctccagatgtgattttgggtacgttccttgttaactcagttcctgcaacagtacttttcgattctggtgctacacattcattcttatctatgagttttgtgggaaatcatgggatggaagtagaagatcttagacgtcctttgatggttagtaccccaagtaatcaagcactctctttgcaacgtagcccctctgtcagaatagaaattcaaggagtaccatttctggccaatcttatcttgttagaatccaaagaccttgatgtcatcctagggatggactggttagccagacataaaggtgtgatagactgtgccaacaaaaaagtaactctcaccagctatgatggtcgagttgtaactgttcatgcattgtcatctgagtctttaaggtcaagactgaaccagataactttgga

SEQ ID NO: 15115 - DNA, 3898 bp, Oryza sativa
  Clone ID: TFbOSC25097j.C1.o1.fg
taccactaatcctgttgaagctggtgattggttgcatgccatagagaagaagttggatttgcttcagtgcactgatcaggagaaggcctcatttgcatcacatcagttgcatggccctgcctctgaatggtgggatcacttccgtctgaacaggactactgctgaacctatcacttggcttgaattcaccgctgctttccggaagacgcatataccatcgggagtggtgtccctcaagaagaaggaattcaggtcgctcacccagggatctcgctctgttacggagtatttgcacgagttcaatcgtctggctcgttatgctccggaggatgtgcgcaatgatgaagagcgccaggagaagttcttagaaggacttaatgatgagctttcttacccactcatgactggggattattctgatttccagaagttggtggataaggctattcgtcaagaggacaaatacaaccgcatggagcagaagaaacgccggattgctcaattcaagacacaacaggggaataatcagaggccgcgtcttactttaggaccccagtccatgccacatggaggttcttcgtctgttgttcgtccgcagcgtcagttcttcaacaacaatgctggcaacaacatccgcaatcaagctctacgccctgttgcagctccaacacagcaacagcctgccaagagggagcatggcagcaagcccgtggtgtgtttcaactgtggagacccaggacattacgctgacaagtgtccgaagccccgacgcatgaaggttgtccctgtccagagcaactctaccgcaccagcatcaaaggctcgtgtcaatcatgtcgctgcggcagaagctcaagatgctccagatgtgattttgggtacgttccttgttaacttagttcctgcaacagtgcttttcgattctggtgctacacattcattcttatctatgagttttgcgggaaatcatgggatgaaagtagaagatcttagacgtcctttgatggttagtaccccaagtaatcaagcactctctttgcaaggtagcccctctgtcagaatagaaattaaaggagtaccatttctggccaatcttatcctgttagaatccaaagacctagatgtcatcttagggatggactggttagccagacataaaggtgtgatagactgtgctaacagaaaagtaactctcaccagcaatgatggtcgagtggtaactgttcatgcattgtcttctgaatctttaaggtcaagactgaaccagataactttggaagagattcctatagtccgggagtatcccgatgtgttcccagatgatttgcctggtatgccgcctaaaagggatatagagttcagaatagatttggtaccaggaacaactccgatccataagagaccttatagaatggcagccaatgagttggcagaagtcaagaggcaaaaagatcatacccagaggatgtgtgtagactatcgtgcactaaatgatgtgactatcaagaataagtatccactacctagaattgatgatttgtttgatcagcttaaaggtgctactgttttctccaagatagatcttcgatcaggatatcaccagttgagaatcaaagaggaagatatacctaagacagcttttaccactaggtatgggttgttcgaatgtactgttatgtcttttggacttaccaatgcccctgctttcttcatgaacttgatgaatcaggtgtttatggaatacctagacaagttcgtggtggtctttattgatgatattcttatctactctcgaaccaaagaagagcatgaagaacatcttcgccttgcactagagaagctacgagaacatcaactgtatgctaagtttagcaagtgtgaattttggttgtctgaagtgaagttccttggtcacgtcatctcagccggaggagttgccgttgatcctagtaatgtggaatccgtaaccaactggaaacaaccgaagacagtttcagagatccgcagtttcttaggcctcgcaggatattaccggaggtttatagagaatttttccaagattgctaagcccttgacacgactgcttcagaaagatgtgaagtacaagtggtcggaagaatgtgagcagagttttcaagagttgaaaagtagcttaatatcagctcctattttgattttacctgatccaaagaagggtttccaggtgtattgtgatgcatccaaacttgggttaggttgtgtactgatgcaagatgggaaggtggttgcctatgcatctcgtcagttgggtccgcatgagaagaactaccctactcatgatattgagttggccgcagtagttcatgcgttgaaaatttggcgtcattatcttttcggtactcgtacagaggtatataccgatcacaagagtttaaagtatatctttactcagccggatctgaacatgagacaaaggagatggttggaattaattaaggattatgacatgggaattcattatcacccgggaaaggctaatgttgtagcagacgctcttagcaggaaaggctattgcaatgctacggaaggacgacatttgccattggaattatgcaaggaatttgaaagattaaatttgggaattgtcagtataggttttgttgcagccttagaagcgaagcccactctaattgatcaagttagagaagcccaaattaatgatcctgatattcaagatatcaagaagaataggagaagaggaaaagctatcggtttcttggaggatgagcacggaactgtatggttgggtgagagaatctgtgtccccgacaacaaagatttaaaagatgcaattctgaaagaagctcatgatactttatactccattcaccctggtagtactaagatgtaccaggatctcaaggaaagattttggtgggcaagtatgaggcgtgaaatcgcagaatacgtagcagtatgtgatgtttgtcagcgagtcaaggcagaacatcagaaacctgccggtttgctgcagcctttgaagattcctgaatggaagtgggaagaaatcggtatggattttatcactggtttacccagaacgtcatcaggccatgactctatttgggtgatagtcgacagacttaccaaagtggctcatttcattccagtaaagacaacctattccggaagtcgcttagcggaattgtatatggcaaggattacagacggacaaaccgaaagggtgaatcagattttggaagacatgttgagagcttgtgctttagacttcggtggaagttgggataagaatctaccctatgcggaattttcgtacaacaacagttatcaagctagtctacagatggctccttacgaagcactatatggtcagaagtgccgcactccgcttttgtgggatcaaacgggagaacgtcaagttttcgggacggatatcctaagagaagcagaagaaaagtctcgtcataagagttatgccgacaatcgccgcagagatttgagttttgaagaaggagattatgtgtatcttcatgtcacgccttttcgaggagttcatcgttttcataccaaaggaaaattggcaccgcgttttgtgggaccttataagatcgtcagtagaagaggagaggttgcttatcaattggaattacctcaatctttggcaggaatccataatgtgttccatgtttcgcaattgaaaaagtgtttaagggtacctaccgaagaagctaatcttgaacggatagaagtccaagaggatctgacctatgttgagaaaccaatccgtatcttggaaatagatgagagaagaaccaggaatcgggttatccgtttttgcaaagtccaatggagtaatcactcgcagaagagtcaacttgggaacgagaagatgaattga

SEQ ID NO: 15116 - DNA, 2420 bp, Oryza sativa
  Clone ID: TFbOSC26717j.C1.o1.fg
ctcctggtttggaatggtacattcctggtttggagatagaactgtgcagccgggatggttgttcagaatggttgggcctatacaacaggatgccgcgttacaagcctgagtacctgtttggtgttgagggttttgtccaggagttgcgtacgatgtcctttgtcattggattcgggactgcccctttttatgcccagattcctcatgatcgtcatgaagaaaagtgccgagtcaaagtcactttgaacagtaatagtgaagatatcccctcagtgatgtttgaagctggaggaagaaattacatccatgcatgtcaggaggtggcaaggatcgccataggagagctccgtgatcgctacagtgatcaattggccgacactgagtatcgttaccatcctcgtcaaccacagggaagtgaccgtggcagttatcttgagactgaaggaattgagaatgatgctaccacaaggcatttggttgagatgctgtgggctatggatgaaagtcgtgcggagactgtactagcagctcaagatcgtgaagaccggaatcgtggtaagatttgcaagttagaagacaaggtggatcgtttggagaaggaattagccgcattgaagggagaagcaccgccgcagaaggccaggattcgtcttaccgcaaggaagagagctttatttgtccctcgctatcaactggcgccaaagatggtgaacactcgcagcaatgggaatggtcccaacaaccccaataacaacaacaatggagagaatcccactctggcccaagttcttgctcaacagacacagcttatgaacatgatgatgcagcaatttcagaatcagcaaaaccaaggaaataatcatgcacctccccagaacaagttagcagaatttcttcgtgtgaggccgcctgttttctctagtaccactaatcctgttgaagctagtgattggctgcatgccatagagaagaagttggatttgcttcagtgtactgatcaggagaaggtctcatttgcatcacatcagttgcatggccctgcctctgaatggtgggatcacttccgcctgaataggattactgctgaacctatcacttggcttgaattcaccgctgctttccggaagacgcatataccatcaggagtagtgtctctcgagaagaaggagttcagcgccaggagaagttttttgggaggacttaatgatgagctttcttacccactcatggttggagattatcctgatttccagaaattagtggataaggctatacgtcaggaggacaagtacaattgcatggagcagaggaaacgtcggattgctcacttcaaggcacaacaggggagtaatcagaagccgcgtcttactttaggaccccagcccatgtcacagggaggttcttcgtctgttgttcgtccgcagcgtcagttcttcaacaacaatgctggcaacaacatccgtaatcaagctccacgtcctgttgcagctccagtacagcaacaacctgccaagagggagcaaggcagcaagcccgtggtgtgtttcaactgtggagacccaggacattatgctgacaagtgtccgaagccccgtcgcgtgaaggttgtccctgcccagagtaactctgctgtaccagcatcaaaggcccgtgtcaatcatgtcgctgctgcagaagctcaagatgctccagatgtgattttgggtacgttccttgttaactcagttcctgcaacagtgcttttcgattctggtgctacacattcattcttatctatgagttttgcgggaaatcatgggatggaagtggaagatcttagacgtcctttgatggttagtaccccaagtaatcaagcactctctttgcaacgtagcccctctgtcagaatagaaattaaaggagtaccatttctggccaatcttatcttgttagaatccaaagaccttgatgtcatcctagggatggactggttagccagacataaagatgatttacctggtatgccgcctaaaagggatatagagttcagaatagatttggtacctggaacaactccgatccataagagaccttatcgaatggcagccaatgagttggcagaagttaagaggcaagtagatgatttgctacagaaaggatacatcagaccgagttcatcaccatggggagctccggttatttttgtggaaaagaaagaccatactcagagaatgtgtgtggactatcgtgcactaaacgatgtgactattaagaataagtatccactacccaggattgatgatttgtttgatcaactgaaaggtgccactgttttctccaagatagatcttcgatcagggtatcatcagttgagaatcaaagaggaggatatacctaagacagcttttaccactaggtatgggttgttcgaaggtttatag

SEQ ID NO: 15117 - DNA, 3921 bp, Oryza sativa
  Clone ID: TFbOSC27739j.C1.o1.fg
atgtaccgtggtggtattgaggcacatgctcctggtttggaatggtacattcctggtttggagatagaactgtgcagccggggtggttgttcagaatggttgggcctatacaacaggatgccgtgttacaagcctgagtacctgtttggcgttgagggttttgtccaggagttgcgtacgatgtcctttgtcattggatttgggaatgctcctttttatgcccagattcgtcatgatcgtcatgaagaaaagtgccgagtcaaagtcaccttgaacagcaatagtgaagatatcccctcagtaatgtttgaagctggaggaagaaactacatccatgcatgtcaggaggtggcaaggatcgccataggagagctccgtgatcgctacagtgatcagttggtcgacactgagtatcgctatcatcctcgccaaccccagggaagtgaccgtggcagttaccttgagactgaaggaattgagaatgatgttaccacaagacatttggttgagatgttgtgggctatggatgaaagtcgtgcggagactgtgttagcagctcaagatcgtgaagatcggaatcgtggtaagatttgcaagctagaagacaaggtggatcgtttggagaaggaattagccgcattgaagggagaagcaccgccgcagaaggccaggattcgtcttaccgcaaggaagagagctttatttgtccctcgctatcaactggcgccaaaggttcgtgtggtggagaaagaagttgccccagctcaagcggatcctccggtcatcatcataagtagtgatgaagaagaagaatccaagcgcatcaattccaagattgagtgggtagcaactcaagatgatgaagatgagccttcaatcgacctcctatgctcggaagaactagagaagttggagagtttagtggtgtgggagtcttcagtttgtaataatgaaactcagttaagatcaataaaagttaaaatggtgaacactcgtagcaatgggaatggtcccaacaaccccaataataacatcaatggagagaatcccactctggcccaagttcttgctcagcagacacagcttatgaacatgatgatgcaacaatttcagaatcagcaaaaccaagggaataatcatgcacctccacagaacaagttagcagaatttcttcgtgtgaggccgcctgttttctctagtaccactaatcctgttgaagctagtgattggctacatgccatagagaagaagttggatttacttcagtgtactgatcaggagaaggtctcatttgcatcacatcagttgcatggccctgcctctgaatggtgggatcacttccgtcttaacaggactactgctgaacctatcacttggcttgaattcaccgctgctttccggaagacgcatataccatcgggggtagtgtctctcaagaagaaggagttcaggtcgcttacccagggatctcgctctgttacggagtatctgcacgagttcaatcgtcttgctcgttatgctccggaagatgtgcgcaatgatgaagagcgccaggagaagtttttgggaggacttaatgatgagctttcttacccacttatggttggagattaccctgatttccagaaattagtggataaggctattcgtcaggaagacaagtacaatcgcatggagcagaagaaacgtcggattgctcaattcaagacacaacagggaaataatcagaagccgcgtcttactttaggaccccagtccatgccacagggaggttcttcgtctgttgttcgtccgcaacgtcagttcttcaacaacaatgctggcaacaacatccgtaatcaagctccacgtcctgttgcagctccagcacagcaacaacctgccaagagggagcaaggcagcaagcccgtggtgtgtttcaactgtggagatccaggacattatgctgacaagtgtccgaagccccaacgcgtgaaggttgtccctgcccagagtaactctgctgtaccagcatcaaaggcccgtgtcaatcatattgctgctgcagaagctcaaggtgctccagatgtgattttgggtacgttccttgttaactcagttcctgcaacagtacttttcgattctggtgctacacattcattcttatctatgagttttgcgggaaatcatgggatggaagtagaagatcttagacgtcctttgatggttagtaccccaagtaatcaagcactctctttgcaacgtagcccctctgtcagaatagaaattcaaggagtaccatttctggccaatcttatcttgttagaatccaaagaccttgatgtcatcctagggatggactggttagccagacataaaggtgtgatagactgtgccaacagaaaagtaactctcaacagctatgatggtcgagttgtaaccgttcatgcattgtcttctgagtctttaaggtcaagactgaatcaaataactttggaagagattcatatagtccgggagtatcctgatgtgttcccagatgatttaccgggtatgccgcctaaaagggatatagagttcagaatagatttggtacctggaacaactccgatccataagagaccttatcgaatggcagccaatgagttggcagaagttaagaggcaagtagatgatttgctacagaaaggatacatcagaccgagttcatcaccatggggagctccggtaatttttgtggaaaagaaagaccatactcagagaatgtgtgtggactatcgtgcactaaacgatgtgactatcaagaataagtatccactacccaggattgatgatttgtttgatcagcttaaagacaagttcgtggtggtctttattgatgatattcttatctactctcgaaccaaagaagagcatgaggaacatcttcgccttgcattggagaagctacgagaacatcaactgtatgctaagtttagcaagtgtgaattttggttgtccgaagtgaaattccttggtcacgtcatctcagccggaggagttgccgttgatcctagtaacgtggaatccgtaaccaattggaagcaaccaaagacagtttcagagattcgcagtttcctaggccttgcaggatattatcggaggtttatagagaatttttctaagattgctaagcccatgacacgactgcttcagaaagatgtgaagtacaaatggtcggaagaatgtgagcggagttttcaagagttgaaaagtcgcttaatatcagctcctattttgattttgcctgatccaaagaagggtttccaagtatattgcgatgcatccaaacttgggttaggttgtgttctgatgcaagatgggaaggtggttgcctatgcatctcgtcagttacgtccgcatgagaagaactaccctactcatgatattgagttagctgcagtcgttcatgcattaaagatttggcgtcattatcttttcggtactcgtacagaagtgtacaccgatcacaagagtttaaagtatatctttactcagccggatctgaatatgagacaacggagatggttggaattaattaaggattatgacatgggaattcattatcatccgggaaaggctaatgttgtagcagacgctcttagcagaaaaggttattgcaatgctacagaaggacgacagttgccattggaattatgcaaggaatttgaaagattaaatttgggaattgtcggtagaggtttcgttgcagctttagaagcgaagcccactctaattgatcaagttagagaagcccaaattaatgatcctgatattcaagagatcaagaagaatatgagaagaggaaaagctattggtttcttggaagatgagcacggaactgtatggttgggtgaaagaatctgtgtctgtcacgtcctgataaattcatcccaaaattaa

SEQ ID NO: 15118 - DNA, 5082 bp, Oryza sativa
  Clone ID: TFbOSC27749j.C1.o1.fg
atgccgcgcttcaagcctgagtacctgtttggtgttgaaggatttgtccaggagttgcgtactatgtcctttgtcattggatttgggactgctcctttttatgcacagattcgtcatgatcgtcatgaagagaagtgccgagtcaaagtcaccttgaacagtaatagtgaagatatcccatcggtgatgttcgaagctggaggaagaaactacatccatgcgtgtcaggaggtggcaaggatcgccataggagagctccgtgatcgttacagtgatcagttggccgacactgagtatcgttaccatcctcgccaaccacagggaagtgaccgtggcagctaccttgagactgaaggaattgagaatgatgctactacaaggcatttggttgagatgctatgggctatggatgaaagttgtgcggagactgtgttagcggctcaagatcgggaagattggaatcgtggtaagatatgcaagctagaagacaaggtggatcgtttggagaaggagctagccgcgttgaagggagaagcaccgccgcagaaggccaggattcgtcttaccgcaaggaagagagctttatttgttcctcgttatcaattggcgccaaagatccgcgtggtggagaaagaagttgccccagctcaagcagatcctccggtcatcatcataagtagtgatgaagaagaagaatccaagcgcaacaattccaagattgagtgggcagctatcaaagatgaggaagatgagccgaacgagccttcaatcgacctcctatgctcggaagaactagagtttgcttgtgtgtgtgttggtcttgcatgtgatttacatcagtggtgggatatggtgaatactcgcagcaacgggaatggtcccaacctcaacaacctcaataacaacaacaatggagagaatccaacccttgctcaagttcttactcaacagactcagctaatgaacatgatgatgcaacaacttcagaatcagcagaaccaaggaaataaccatgcacctcctcagaacaagttagcagagtttcttcgtgtgaggccgcctattttctctagtaccactaatcctgtagaagctggtgattggctgcatgccatagagaagaagttggatttgcttcagtgcactgatcaggagaaggtctcttttgcatcacaccagttgcatggtcctgcttctgaatggtgggatcacttccgcttgaataggactactgctgaacctatcacttggcttgaattcaccgctgctttccggaagacgcatataccatcaggagtagtgtctctcaagaagaaggagttcaggtcgcttacgcagggatctcgctctgttacagagtatttgcacgagttcaatcgtctagcccgttatgctccggaagatgtgcgcaatgatgaagagcgtcaggagaagtttttggaaggacttaatgatgagctttcttacccactcatgactggagattattctgatttccagaaattagtggataaggctattcgtcaggaggacaagtacaatcgcatggagcagaagaaacaccggattgctcactttaaggcacaacaggggaataatcaaaggccacgtcttactttaggaccccagtctatgccacatggaggttcttcgtctgttgttcgtccgcagcgtcagatcttcaacaacaatgttggcaacaacatccgcaatcaagttccacgccctgttgcagctccaacacaacaacagcctgctaagagggagcaaggcagcaagcctgtggtatgtttcaactgtggagatccaggacattatgctgacaagtgtccgaagccccgtcgcgtgaaggttgttcctgctcagagcaactctactgtaccagcatcgaaggcccgtgtcaatcatgttgcagctgcagaagctcaagatgctccagatgtgattttgggtacgttccctgttaactcagttcctgcaacagtacttttcgattctggtgctacacattcattcttatctatgagttttgcgggaaatcatgggatggaagtagaagatcttagacgtcctttgatggttagtaccccaagtaatcaagcactttctttgcatcgtagcccctctgtcagaatagaaattcaaggagtaccatttctggccaatcttatcttgttagaatccaaagaccttgatgtcatcctagggatggactggttagccagacataatggtgtgatagactgtgccaacagaaaagtaactctcaccagccatgatggtcaagttgtaaccgttcatgcattgtctactgagtctttaaggtcaagactgaaccagataactttgggagagattcctatagtccgggagtatcctgatgtgttcccagatgatttacctggtatgccgcctaaaagggatatagagttcagaatagatttggtacctggaacaactccgatccataagagaccatatagaatggcagcaaatgagttggcagaagttaagaggcaagtcgacgatttacttcagaaaggatacatcagaccgagttcgtcaccatggggagctccagttatttttgtggaaaagaaagatcatacccaaaggatgtgtgtggactatcgtgctctaaacgatgtgactatcaagaataagtatccgctacccagaattgatgatttgtttgatcagcttaaaggtgccactgttttctccaagatagatcttcgatcagggtatcatcagttgagaatcaaagaagaagatatacctaagacagcttttaccactaggtatgggttgttcgaatgtactgttatgtcttttggacttacgaatgcccccgctttcttcatgaacttgatgaataaggtgtttatggaatacctagacaagttcgtggtggtctttattgatgacattcttatctactctcgaaccaaagaagagcatgaagaacatcttcgccttgcattagagaagctacgagaacatcaactgtatgctaagtttagcaagtgtgaattttggttgtctgaagtgaagttccttggtcacgtcatctcagcaggaggagttgccgtcgatcctagcaatgtggaatccgtaaccaactggaaacaaccaaagacagtttcagagattcgcagtttcttaggcctcgcaggatattatcggagttttatagagaatttttccaagattgttaagcccatgacacgactgcttcagaaagatgtgaagtacaagtggtcagaagattgtgagcagagttttcaagagttgaagaatcgcttagtatcagctcctattttgattctacctgatccaaagaagggtttccaagtgtattgcgatgcatccaaacttgggttaggttgtgttctgatgcaagatgggaaggtggttgcctatgcatctcgtcagttacgtccgcatgagaagaactaccctactcatgatcttgagttagctgcagtagttcatgcgttgaagatttggcgtcattatcttttcggaactcgtacagagatgtataccgatcacaagagtttaaagtatatctttactcagccggatctgaacatgagacaaaggagatggttggaattaattaaggattatgacatgggaattcattaccacccaggaaaggctaatgttgtagcagacgctcttagcaggaaaggctattgcaatgttacggaaggacgacagttgccattggaattatgcaaggaatttgaaagattaaatttgggaattgtcagtagaggtttcgttgcagccctagaagtgaagcccactctaattgatcaagttagaaaagcccaaattaatgattctgatattcaagaaatcaagaagaatatgagaagaggaaaagctatcggtttcttggaggatgagcaaggaactcgagtcaaggcagaacatcagaaacccgccggtttgttgcagcctttgaagattcctgaatggaaatgggaagaaatcgatatggactttatcactggtttacccagaacatcatcaagtcatgactctatttgggtgatagtcgatagacttaccaaagtggctcatttcattccggtaaagacaacttattccggaagtcgcttggcggaattgtatatggcaaggatcgtgtgtttgcatggcgttcctaagaagatagtgtctgatcgaggcagtcagtttacttcaaatttttggaagaaacttcaggaagagatgggttctaagctgaactttagtactgcttatcatccgcagacagacggacaaactgaaagggtgaatcagattttggaagacatgttgagagcttgtgctttagatttcggtggaagttgggataagaatctaccttatgcagaattttcgtacaacaacagttatcaagctagtcttcagatggctccgtacgaagcactgtatggtcggaagtgccgcactccgcttttgtgggatcaaacgggagaacgtcaggttttcgggacggatatcctaagggaagcagaagaaaaggtgaaaatcattcaagaaagattgcgagtggctcagtctcgtcataagagttatgccgacaatcgccgcagagatttgagttttgaagaaggagattatgtgtatcttcgtgtcacgcctctacgaggagttcatcgttttcagaccaaaggcaaattggcaccgcgttttgtgggaccttataagattgtcagtagaagaggagaagttgcttatcagttggagttacctcaatctttggcaggagtccataatgtgttccatgtgtcgcaattgaagaaatgtttaagggtacctactgaagaagctaatcttgaacagatagaagtccaagaggatctgacctatgtggagaaaccaatccgtatcttggaaacaagtgagagaaggaccaggaatcgagttatccgcttttgcaaagtccagtggagtaatcactcggaagaagagtcaacttgggaacgagaagatgaattgaagtcagctcatccgtatctgtttgccagttcttccgaatctcgaggacgagattctgtttaa

SEQ ID NO: 15119 - DNA, 870 bp, Oryza sativa
  unsure (1)..(870): unsure at all n locations
  Clone ID: TFbOSC27749j.C1.o2.np
atgacgtcaccgacgacggcggcgactcggcgaagaagacggctcgggcggcggacactcgccggcgaacggcggcaccacggcaccaacggagggcaccagcacgtagaggacaacgcggcgaacacaccggtgaccaaaacggcggcggaaaaggaacggacggcgacggcgacgagaaggaagcggcggctaccttcgggttgacgacggcgacgatgctccggcgggttccgacggctgcgaaggggcggacgaggacggcggcgacttggcgagcacgacgacggtcttcccgagcggcgccgacagctggagcgacggcggagcacggctgaagcggcggcggcgacggcgaagctagggcacacggcgctagagctcttccgacgacgagaggcgaaggcgagggtggcggcggaaagagaagggcatggggatccttttaaaggggctcggaggcgacggcgaaggcccacggcgacggcaacggcgaaggaaactcgcggcttggaaagagggaaaaccgatccgaatcgaactcgattccaacgctttccaaagcgatttagccgaagattccaaaggagaaaaggtagaggagatcccggagatcatttcccctctattgattcggccggagaaggaaagaggcggccggatttggaaggaaacagcggcggcggctcggcggcggcacgctagggtttcggcccgaggaagacgacgggcctgacaggtgggacccacctgtcagcggctgcaagggcgcgcgcgcgcgcggccgncttcggactgggccggctgggccgagaagagagagaaggcggttttgggccgactttcggcccaaagccaaaagaagacttt

SEQ ID NO: 15120 - DNA, 4860 bp, Oryza sativa
  Clone ID: TFbOSC29666j.C1.o1.gm
gccccaagcaacctggtaacgacatcgacgtgtacctaagaccactggtcgaagatcttaaacaattgtggaagaaagaaggtgtccccgtgtgggacgaggacaaacaggaggagtttaacctacgagcgctgctgttcgtaaccatcaacgattggcctgcacttagcaacctatccggacagtccaacaaggggtacaaggcttgcactcactgtatggatgaaacagaaagtacgtatcttaagcactgtaggaaggttgtatacatgggtcatcgtcgattccttgcagcaaaccacccggtacggaagaaaggcaagcacttcgaacataaggccgaccaccgtacgaagcctaaacatcgcagcgggaaaacaatgtttgctatggttaaagatcttaaagtagtgttcggaaaggggcctggaagccagcatatagagagcgaagatggtcacgcggcgatgtggaaaaagaactctatattttgggagttaccatattgggaattcttggacgtacgccacgcaatcgacgtgatgcacctcactaagaacctttgcgtaaaccttcttggcttcctaggtgtatacggaaagtcgaaagatacactggaagcacgtaatgatctgaagcatatggaacaacgcggcgaccttcacccggaaccaaaggagaaaggaagccattacttgagtccagccagctacactcttagcaaggcagagaaggaaagtatgtttgaatgcttggagagcataaaggtaccgtctggatactccacgaatatcaagcgaataataagcacgaaggagaagaagttcacaaacctaaagtctcatgactgtcacgtgttgatgacacaactgctaccagttataataaggggtatccttccagacaatgtccgggcaacaataacaaagctatgtgcattcatgaacgcaatttcgcagaaggtcatcgatccggatagattagaagcccttcagaatgaagtggtgcaatgtctcgtcagttttgagttgatatttccaccttcatttttcaatataatgacgcatctgctttgtcaccttgtgaaagagatccgtattctcgggcctatgtacctacacaacatgtttcctttcaagaggtacatgggcgttctgaagaagtatgttcgtaaccgtgctcgtccagaggcaagcatcgccaagggttatggaacagaggaggtcatcgaattttgtgtagaatttatcgaagaccttcgcccaatcggggtacttgaatcacgccatgaagggagactacggggaaagggaactctcggaaggaaagcaataatgacggtagacaacaatttattctgtaaagcccatttcactgttctgcaacactcttcattggtagctccttacatcgaggagcacttggctctagttcgcgccaggaacatcggtaagtccgatgcatggattacacggcatcacattgatactttccccgcgtggctacgacaacatctcatgggtaacgagtcgatcaaccaacaacttgccttcctggcgaggggaccgtctgggtcgatcgcgacattccagggatatgacatcaatgggtacacattctacacgagagcccaagacatgaagagcacgaaccaaaacagctttgttcgtgtcgatgccatgggacacgatggaacaactgccacgtattacggtgccatcgaggacatatgggaacttgactatggtcctctcaaggttcctctgttccggtgccaatgggttaggttgactggtggaggcgtaatgattgatgacagtgggatgacaactgttgaccttaacaaggttggatactcggacgaaccttttgtccttgccaatgatgtaacgcaagtctttttcgtgaaggacatgtctagcaaaggaaagaagggcagagggcctgatgagcctaagcgtcaagtggttctcccaggcaaaagaaaaatcgtcggagttgaggacaagactgacgaggattacgatcagttggatggcgatcacaaggagggaacaatagtgaggagaaagtacgtgcggtcaaccgtcaccgccgatccgtgcgccgccgtcgtttcagccgtcgccgtcgctcgagaagaccaccgtcgtgctcgccaagtcgtcgccgtcctcgtccaccacttcgccgtcgccggagatcaccagagcagcatcgccgtcatcgacccgaaggtttccgccgcttcctcctcgtcgccgtcgccgcccgttggtcttccgccgccgttttggtcaccggtgagttcgccgcgttgtcctctccgtcttggtgccctccgtttgcgtcctagcgccgccgttcgccggcgagcgtgcgccgttcgagccgtctcctccgccgagccgccgccgctgtcggtgacgtcaccgctgacgtcatcggggtcgtccgccatgccacgcttcaagcctgagtacctgtttggtgttgagggttttgtccaggagttgcgtacgatgtcctttgccattggatttgggactgcccctttttatgcccagattcttcatgatcgtcatgaagagaagtgccgagtcaaagtcaccttgaacagcaatagtgaagaggtcccctcagtaatgtttgaagctggaggaagaaactacatccatgcatgtcaggaggtggcaaggatcgccataggagagctccgcgatcgctacagtaatcagttggccgacactgagtatcgctaccatcctcgccaaccccagggaagtgaccgtggcagttaccttgagactgaaggaattgagaataacgctaccacaaggcatttggtcgagatgctgtgggctatggatgaaagtcgtgcggagactgtgttagcagctcaagatcgtgaagatcggaatcgtggtaagatttgcaagctagaagacaagatggatcgtttggagaaggaactagccgcattgaagggagaagcaccaccgcagaaggccaggattcgtctcaccgcaaggaagagagctctatttgtccctcgctaccaattggcgccaaaagttcgtgtggtggagaaagaagttgccccaaccttagcagatcctccggttatcatcataagtgatgatgaagaagaagaatccaagcgcaaccattccaagattgagtgggtagcaactcaagatgatgaagacgagccgaacgagccttcaatcgacctccgatgctcggaagaactagacaccactaatcctgttgaagctggtgattggctgcatgccatagagaagaagttggatttgcttcagtgtactgatcaggagaaggtctcatttgcatcacaccagttgcatggccctgcctctgaatggtgggatcacttccgcctgaataggattactgctgaacctatcacttggcttgaattcaccgctgctttccgaaagacgcatataccatcaggagtagtgtctctcaagaagaaggagttcaggtcgcttacccagggatctcgctctgttacggagtatttgcacgagttcaatcgtctggctcgttatgctccagaagatgtgcgcaatgatgaagagcgccaagagaagttcttggaaggacttaatgatgagctttcttacccactcatgactggagattattctgatttccagaagttagtggataaggctattcgtcaggaggacaagtataatcgcatggagcagaagaaacgccggatggctcacttcaaggcacaacaggggagtaatcagaagccgcgtcttactttaggaccccagtctgtgccacaaggaggttcttcgtctgttgttcgtccgcagcgtcagttcttcaacaacaatgctggcaataacatccgtaatcaagtcccacgtcctgttgcagcctcgacacagcaacaacctgccaagagggagcaaggcagcaagcccgtggtgtgtttcaactgtggagacccaggacattatgctgacaagtgtccgaagccccgtcgcgtgaaggttgtccctgcccagagcaactctacagtacctgtgccaaaggcccgtgtcaatcatgttgctgctgcagaagctcaagatgctccagatgtgattttggtccgggagtatcccgatgtgttcccagatgatttacctgccaatgagttggcagaagtcaagaggacagtggacgatttgcttctgaaaggatacatcagaccgagttcgtcaccatggggagctccggttatttttgtggaaaagaaagatcatacccagaggatgtgtgtggattatcgtgcactaaatgatgtgactatcaagaataagtatccactacccagaattgatgatttgtttgatcagcttaaaggtgccactgttttctccaagatagatcttcgatctgggtatcaccagttgagaatcaaagaggaagatatacctaagaccgcttttaccactaggtatggcatccacaacgtgttccacgtctctcagttgaagaaatgtttgagagttcctgaggaacaggcaagtccggatcacatcgaaattcaggaagatctgacgtatgtggagaagccgactcgtatcctcgaaaccagcgagagaaggaccagaaacaaagtaataagattctgcaaggttcagtggagccaccactcagaggaagaggccacttgggaaagagaagatgagttgaaggccacccacccgcacctcttcgccagctcttccgaatctcgggtcgccgccgtcgcgctcaccgagcccgcccgcacctcggccaccattcggttgccgccaatcgtcgccgaagcgccgtttccctcgcacgccg

SEQ ID NO: 15121 - DNA, 3875 bp, Oryza sativa
  Clone ID: TFbOSC29996j.C1.o1.fg
atgtgcgcaatgatgaagagcgccaggagaagttcttggaaggacttaatgatgagctttcttacccactcatgactggagattattatgatttccagaagttagtggataaggctattcgccaggaggacaagtacaatcgcatggagcaaaagaaacgccggattgctcaattcaagacacaacaggggaataatcagaagccacgtcttactttaggaccccagtctatgccacagggaggttcttcgtctgttgttcgtccgcagcgtcagttcttcaacaacaatgctggcaacaacatccgcaatcaagctctacgtcctgttgcagtttcgacacagcaacaacctgccaagaaggagcaaggcagcaagcccgtggtgtgtttcaattgtggagacccaggacattacgctgacaagtgtccgaagccccgacgcgtgaaggttgtccctgcccagagcaactctaccgcaccagcatcaaaggcccgtgtcaatcatgttgctgctgcagaagctcaagatgctccagatgtgattttgggtacgttccttgttaactcagttcctgcaacagtgcttttcgattctggtgctacacattcattattatctatgagttttgcgggaaatcatgggatggaagtagaagatcttagacgtcctttgatggttagtaccccaagtaatcaagcactctctttgcaacgtagcccctctgtcagaatagaaattcaaggagtatcatttctggccaatcttatcctgttagaatccaaagaccttgatgtcatcctagggatggactggttagctagacataaaggtgtgatagactgtgccaatagaaaagtaactctcaccagcaatgatggtcgagttgtgactgttcatgcattgtcttctgagtctttaaggtcaagactgaaccagataactttggaagagattcctatagtccgggagtatcctgatgtgttcccagatgatttacctggtatgccgcctaaaagggatatagagttcagaatagatttggtaccaggaacaactctgatccataagagaccttatcgaatggcagccaatgagttggcagaagtcaaaaggcaagtagacgatttgcttcagaaaggatacatcagaccgagttcatctccatggggagctccggttatttttgtggaaaagaaagaccatacccagagaatgtgtgtggactatcgtgcactaaatgatgtgactatcaagaataagtatccactacccagaattgatgatttgtttgatcagcttaaaggtgccaccattttttccaagatagatcttcgatcagggtatcaccagttgagaatcaaagaggaagatatacctaagacaacttttaccactaggtatgggttgttcgaatgtactgtgatgtcttttggacttaccaatgcccctgctttctttatgaacttgatgaataaggtgtttatggaatacctagacaagtttgtggtggtctttattgatgacattcttatctactcccgaaccaaagaagagcatgaagaacatcttcgccttgcactagagaagttacgagaacatcaactgtatgctaagtttagcaagtgtgaattttggttgtccgaagtgaagttccttggtcacgtcatctcagcgggaggagttgccgttgatcctagtaatgtggaatccgtaaccaactggaaacaaccgaagacagtttcagagattcgcagtttcctaggcctcgcaggatattaccggaggtttatagagaatttttccaagattgctaagcccatgacacgactgcttcagaaagatgtgaagtacaagtggtcagaagaatgtgagcaaagttttcaagagttgaagaatcgcttgatatcagctcctattttgattttaccttatccaaagaagggtttccaagtgtattgcgatgcatccaaacttgggttaggttgtgttctgatgcaagatgggaaggtggttgcctatgcatctcgtcagttgcgtccgcatgagaagaactaccctactcatgatcttgagttagctgcagtagttcatgcgttgaagatttggcgtcattatcttttcggtactcgtacagaggtatataccgatcacaagagtttaaagtatatctttactcagtcggatctaaacatgagacaacggagatggttggaattaattaaggattatgacatgggaattcattatcacccgggaaaggctaatgttgtagcagacgctcttagcaggaaaggctattgcaatgctacggaaggacggcagttgccattggaattatgcaaggaatttgaaagattaaatttgggaattgtcagtagaggtttcattgcagccttagaagcgaagcccactctaattgatcaagttagagaagcccaaattaatgatcctgatattcaagagatcaagaagaatatgagaagaggaaaagctatcagtttcttggaagatgagcaaggaactgtatggttgggtgaaagaatctgcgtccccgacaacaaagatttaaaagatgcaattctgaaagaagctcatgataccttatactccattcaccctggtagtaccaagatgtaccaggatctcaaggaaagattttggtgggcaagtatgaagcgtgaaatcgcagaatacgtagcagtatgtgatgtttgtcagcgagtcaaggcagaacatcagaaacccgccgggttgttgcagcctttgaagattcctgaatggaaatgggaagaaatcggtatggattttatcactggtttacccagaacgtcatcaggccatgactctatttggataatagtcgacagacttaccaaagtggctcatttcatcccggtaaagacaacctattccggaagccggttagcggaattgtatatggccaggattgtgtgtttgcatggcgttcctaagaaaatagtgtctgatcgaggcagccagtttacttcaaatttttggaagaaacttcaggaagagatgggttctaagctgaactttagtactgcttatcatccgcaaacagacggacaaaccgaaagggtgaatcagattttggaagacatgttgcgagcttgtgctttagacttcggtggaagttgggataagaatctaccttatgcagaatttttgtataacaacagttatcaagctagtcttcagatggctccttacgaagcactgtatggtcggaagtgccgcactccgcttttgtgggatcaaacgggagaacgtcaggttttcgggacggatatcctaagggaagcagaagaaaaggtgaaaatcattcaagaaagattgcgtgtggctcagtctcgtcataagagttatgccgacaatcgccgcagagatttgagttttgaagaaggagattatgtgtatcttcgtgtcacgcctcttcgaggagttcatcgttttcacaccaaaggaaaattggcaccgcgttttgtgggaccttataagattatcagtagaagaggagaggttgcttatcagttggagttacctcaatctttggcaggagtccataatgtgttccatgtgtcgcaattgaaaaagtgtttaagggtacctaccgaagaagctaatcttgaacagatagaagtccaagagcatctgacctatgttgagaaaccaatccgtattttggaaatagatgagagaagaaccaggaatcgagttatccatttttgcaaagtccagtggagtaatcactcggaagaagaatcaacttgggaacgagaagatgaattgaagtcagctcatccgcatctattcgccagttcttccgaatctcgaggacgagattctgtttaa

SEQ ID NO: 15122 - DNA, 427 bp, Oryza sativa
  Clone ID: TFbOSC29996j.C1.o2.np
acacggggggtccttttaaaggggttagaaggcgccgccgaaggcccacgccgcctggcgacgagatgaaaagctcgagctcgcagagagaaaagctgatccgattcgaactcgaatccatcgatttccaaaccgatttagccgatgtttccaaaggagaaaaggtagaggagatctcggggatcatttcccctctttcaattcggccggagaaggaaatgagcggccggatttggaaaggaacggcggcggcgcgaaactacggtttcgggcggcggcggcgcgacgaagacgacgaccctgacaggtggggcccacctgtcagcgggagagagagaagagcggcggctcggactgggccgtctgggccgaggagagagagagcggttttgggccgactttcggcccaaagccaaaagaagacttt

SEQ ID NO: 15123 - DNA, 1207 bp, Oryza sativa
  Clone ID: TFbOSC30786j.C1.o1.fg
aataagttagcagaatttcttcgtgtgaggccgcctattttctctagtaccactaatcctgttgaagctgctgattggctgcatgccatagagaagaagttggatttgcttcagtgcactgatcaggaaaaggtctcatttgcatcgcatcagttgcatggccctgcctctgaatggtgggatcacttccgtctgaataggactactgctgaacctatcacttggcttgaattcaccgctgcttttcggaagacgcatataccatcgggagtggtgtctctcaagaagaaggagttcaggtcgcttacccagggatctcgcactgttacggagtatctacacgagttcaatcgtctagcccgttatgctccggaaaatgtacgcaatgatgaagagcgtcaggagaagttcttggaaggacttaatgatgagctttcttacccactcatgactggagattattctgatttccagaaattagtggataaggctattcgtcaggaggacaagtataatcgcatggagcagaagaaacgccagattgctcaattcaagacgcaacaggggaataatcagaggccgcgtcttactttaggaccccagtctatgccacatggaggttcttcgtctgtcgttcgtccgcagcgtcagttcttcaacaacaatgttggcaacaacatccgcaatcaagttccacgtcctgttgcagctccaacacaacaacagcctgccaagagggagcaaggtagcaagcccgtggtgtgtttcaactgtggagacccgggacattacgctgacaagtgtccgaagccccgacgcgtgaaggttgtccctgtccagagcaactctaccgcaccagcatcagaggctcgtgtcaatcatgttgcagctgcagaggctcaagatgctccagatgtgattttgggtacgttccttgttaactcagttcctgcaacagtgcttttcgattctggtgctacacattcatttctatctatgagttttgcgggaaatcatgggatggaagtagaagatcttagacgtcctttgatggttagtaccccaagtaatcaagcactctctttgcaacgtagcccctctgtcagaatagaaattaagggagtaccatttctagccaatcttatcttgttagaatccaaagaccttgatgtcatcctagggatggattggttagctagacataaag

SEQ ID NO: 15124 - DNA, 1890 bp, Oryza sativa
  Clone ID: TFbOSC31037j.C1.o5.gm
atggtgaatactcgcagcaacgggaatggtcccaacaaccccaataataacaacaatggagagaatcccactctggcccaagttcttgctcaacagacacagcttatgaacatgatgatgcagcaatttcagaatcagcaaaaccaaggaaataaccatgcacctcctcagaataagttagcagaatttcttcgtgtgaggccgcctgttttctctagtaccactaatcctgttgaagctagtgattggctgcatgccatagagaagaagttggatttacttcagtgtactgatcaggagaaggtctcatttgcatcacatcagttgcatggccctgcctctgaatggtgggatcacttccgccttaacaggactactgctgaacctatcacttggcttgaattcaccgctgctttccggaagacgcatataccatcgggagtagtgtctctcaagaagaaggagttcaggtcgctttcccagggatctcgctctgttacggagtatctgcacgagttcaatcgtcttgctcgttatgctccggaagatgtgcgcaatgatgaagagcgccaggagaagtttttgggaggacttaatgatgagctttcttacccactcatggttggagattaccctgatttccagaaattagtggataaggctattcgtcaggaggacaagtacaattgcatggagcagaggaaacgtcggattgctcacttcaaggcacaacaggggagtaatcagaagccgcgtcttactttaggaccccagtctatgccacagggaggttcttcgtctgttgttcgtccgcaacgtcagttcttcaacaacaatgttggcaacaacatccgtaatcaagctccacgtcctgttgcagctccagcacagcaacaacctgccaagagggagcaaggcaacaagcccgtggtgtgtttcaactgtggagacccaggacattatgctgacaagtgtccgaagccccgacgcgtgaaggttgtccctgcccagaataactctgctgtatcagcatccaaggctcgtgtaaatcatgttgctgctgcagaagctcaagatgctccagatgtgattttggtccgggagtatcctgatgtgttcccagatgatttacctgaaaggatacatcagaccgagttcatcaccatggggagctccggatattatcggaggtttatagagaatttttccaagattgctaagcccatgacacgactgcttcagaaagatgtgaagtacaagtggtcggaagaatccttagaagcgaagcccactctaattgatcaagttagagaagcccaaattaatgatcctgatattcaagagatcaagaagaatatgagaagaggaaaagctattggtttcttggaggatgagcacggaactccgtgctccgccgtcgctccagctgtcgccgtcgctcgggaagaccgccgtcatgctcgccaagtcgccgccgtcctcgtccgccccttcgcagccgtcggaacccgccggagctttgtcgccgtcgacaacccgaagcgccgccgttcgccggtgagtgtccgccgcccgagccgtcttcttcgccgagccgccgccgtcgtcggtgatgtcattgttgacgtcatcgggatcctctcccgtgagccgcatgggtcactgccgggcaccagactgagaagtggcggagataagcccacgggggtcgctggggagtccatcccttgttttataaggggaaattccgggcgtgacattgactcccagtccgacgtagtaatcttggaaatcggcgctgatgaactgggagccgttatccgttatgatgcggatgtccagaaaggtgctgggttcgagtggctctcgtctggacgcacgccgtgctag

SEQ ID NO: 15125 - DNA, 6953 bp, Oryza sativa
  Clone ID: TFbOSC31039j.C1.o1.fg
acaagttcgtggtggtctttattgatgatattcttatctactctcgaaccaaagaagagcatgaggaacatcttcgccttgcattggagaagctacgagaacatcaactgtatgctaagtttagcaagtgtgaattttggttgtctgaagtgaaattccttggtcacgtcatctcagccggaggagttgccgtcgatcctagtaacgtggaatccgtaaccaattggaagcaaccaaagacagtttcagagattcgcagtttcctaggcctcgcaggatattatcggaggtttatagagaatttttccaagattgctaagcccatgacacgactgcttcagaaagatgtgaagtacaagtggtcggaagaatgtgaacagagttttcaagaattgaaaagtcgcttaatatcagctcctattttgattttgcctgatccaaagaagggttttcaagtgtattgtgatgcatccaaacttgggttaggttgtgttctgatgcaagatggaaaggtggttgcctatgcctctcgacagttacgtccgcatgagaagaactaccctactcatgatattgagttagctgcagtcgttcatgcattgaagatttggcgtcattatcttttcggtactcgtacagaagtgtacaccgatcacaagagtttaaagtatatctttactcagccggatctgaacatgagacaacggagatggttggaattaattaaggattatgacatgggaattcattatcatccgggaaaggctaatgttgtagcagacgctcttagcagaaaaggctattgcaatgctacagaaggacgacagttgccattggaattatgcaaggaatttgaaagattaaatttgggaattgtcggtagaggtttcgttgcagccttagaagcgaagcccactctaattgatcaagttagagaagcccaaattaatgatcctgatattcaagagatcaagaagaatatgagaagaggaaaagctattggtttcttggaggatgagcacggaactcgagtcaaggcagaacatcagaaacccgccggtttgttgcaacctttgaagattcctgaatggaaatgggaagaaattggtatggattttattactggtttacccagaacgtcatcaggccatgactctatttgggtgatagtcgacagacttaccaaagtggctcatttcattccggtaaagacaacttattccggaagtcgcttagcggaattgtatatggcaaggattgtgtgtttgcatggcgtccctaagaagatagtgtctgatcgaggcagtcagtttacttcaaatttttggaagaaacttcaggaagagatgggttctaagctgaactttagtactgcttatcatccgcagacagacggacaaaccgaaagggtgaatcaaattttggaagacatgttgagagcttgtgctctagatttcggtggaagttgggataagaatctaccctatgcagaattttcgtacaacaacagttatcaagctagtctacagatggctccgtacgaagcactgtatggtcggaagtgccgcactccgcttttgtgggatcaaacgggagaacgtcaggttttcagaacggatatcctaagggaagcagaagaaaaggtaaagatcattcaagaaagattgcgtgtggctcagtctcgtcataagagttatgccgacaatcgccgcagagatttaagttttgaagagggagattatgtgtatcttcgtgtcacgcctctacgaggagttcatcgttttcataccaagggaaaattggcaccgcgttttgtgggaccttataagattgtcagtagaagaggagaggttgcttatcagttggagttacctcaatctttggcaggagttcataatgtgttccatgtttcgcaattgaaaaagtgtttaagggtacctaccgaacaagctaatcttgaccagatagaagtccaagaggatttgacttatgttgagaaaccaatccgtatcctggaaacaactcctggtttggaatggtacattcctggtttggagatagaactgtgcagccggggtggttgttcagaatggttgggcctatacaacaggatgccgcgttacaagcctgagtacctgtttggtgttgagggttttgtccaggagttgcgtacaatgtcctttgtcattggatttgggactgcccctttttatgcccagattcctcatgatagtcatgaagagaagtgccgagtcaaagtcaccttgaacagtaatagtgaagatatcccctcagtgatgtttgaagctggaggaagaaactacatccatgcatgtcaggaggtggcaaggatcgccataggagagctccgtgatcgctacagtgatcaattggccgacactgagtatcgctaccatcctcgccaaccccagggaagtgaccgtggcagttaccttgagactgaaggaattgagaatgatgttaccacgaaacatttggttgagatgttgtgggctatggatgaaagtcgtgcggagactgtgttagcagctcaagatcgtgaagatcggaatcgtggtaagatttgcaagctagaagacaaggtggatcgtttggagaaggaattagccgcattgaagggagaagcaccgccgcagaaggccaggattcgtcttaccgcaaggaagagagctctatttgtccctcgctatcaactggcgccaaagatggtgaatactcgcagcaacgggaatggtcccaacaaccccaataataacaacaatggagagaatcccactctggcccaagttcttgctcaacagacacagcttatgaacatgatgatgcagcaatttcagaatcagcaaaaccaaggaaataaccatgcacctcctcagaataagttagcagaatttcttcgtgtgaggccgcctgttttctctagtaccactaatcctgttgaagctagtgattggctgcatgccatagagaagaagttggatttacttcagtgtactgatcaggagaaggtctcatttgcatcacatcagttgcatggccctgcctctgaatggtgggatcacttccgccttaacaggactactgctgaacctatcacttggcttgaattcaccgctgctttccggaagacgcatataccatcgggagtagtgtctctcaagaagaaggagttcaggtcgctttcccagggatctcgctctgttacggagtatctgcacgagttcaatcgtcttgctcgttatgctccggaagatgtgcgcaatgatgaagagcgccaggagaagtttttgggaggacttaatgatgagctttcttacccactcatggttggagattaccctgatttccagaaattagtggataaggctattcgtcaggaggacaagtacaattgcatggagcagaggaaacgtcggattgctcacttcaaggcacaacaggggagtaatcagaagccgcgtcttactttaggaccccagtctatgccacagggaggttcttcgtctgttgttcgtccgcaacgtcagttcttcaacaacaatgttggcaacaacatccgtaatcaagctccacgtcctgttgcagctccagcacagcaacaacctgccaagagggagcaaggcaacaagcccgtggtgtgtttcaactgtggagacccaggacattatgctgacaagtgtccgaagccccgacgcgtgaaggttgtccctgcccagaataactctgctgtatcagcatccaaggctcgtgtaaatcatgttgctgctgcagaagctcaagatgctccagatgtgattttgggtacgttccttgttaactcagttcctgcaacagtacttttcgattctggtgctacacattcattcttatctatgagttttgcgggaaatcatgggatggaagtagaagatcttagacgtcctttgatggtcagtaccccaagtaatcaagcactctctttgcaacgtagcccctctgtcagaatagaaattcaaggagtaccatttctggccaatcttatcttgttagaatccaaagaccttgatgtcatcctagggatggactggttagccagacataaaggtgtgatagactgtgccaacagaaaagtaactctcaacagctatgatggtcgagttgtaactgttcatgcattgtcatctgagtctttaaggtcaagactgaaccagataactttggaagagattcctatagtccgggagtatcctgatgtgttcccagatgatttacctggtatgccgcctaaaagggatatagagttcagaatagatttggtaccaggaacaactccgatccataagagaccttatcgaatggcagccaatgagttggcagaagttaagaggcaagtagatgatttgctacagaaaggatacatcagaccgagttcatcaccatggggagctccggttatttttgtggaaaagaaagaccatactcagagaatgtgtgtggactatcgtgcactaaacgatgtgactattaagaataagtatccactacccaggattgatgatttgtttgatcagcttaaaggtgccactgttttctccaagatagatcttcgatcagggtatcatcagttgagaatcaaagaggaagatatacctaagacagcttttaccactaggtatgggttgttcgaatgtactgttatgtcttttggacttaccaatgcccctgctttcttcatgaacttgatgaataaggtgtttatggaatacttagacaagttcgtggtggtctttattgatgatattcttatctactctcgaaccaaagaagagcatgaggaacatcttcgccttgcattggagaagctacgagaacatcaactgtatgctaagtttagcaagtgtgaattttggttgtctgaagtgaaattccttggtcacgtcatctcagccggaggagttgccgtcgatcctagtaacgtggaatccgtaaccaattggaagcaaccaaagacagtttcagagattcgcagtttcctaggcctcgcaggatattatcggaggtttatagagaatttttccaagattgctaagcccatgacacgactgcttcagaaagatgtgaagtacaagtggtcggaagaatgtgaacagagttttcaagaattgaaaagtcgcttaatatcagctcctattttgattttgcctgatccaaagaagggttttcaagtgtattgtgatgcatccaaacttgggttaggttgtgttctgatgcaagatggaaaggtggttgcctatgcctctcgacagttacgtccgcatgagaagaactaccctactcatgatattgagttagctgcagtcgttcatgcattgaagatttggcgtcattatcttttcggtactcgtacagaagtgtacaccgatcacaagagtttaaagtatatctttactcagccggatctgaacatgagacaacggagatggttggaattaattaaggattatgacatgggaattcattatcatccgggaaaggctaatgttgtagcagacgctcttagcagaaaaggctattgcaatgctacagaaggacgacagttgccattggaattatgcaaggaatttgaaagattaaatttgggaattgtcggtagaggtttcgttgcagccttagaagcgaagcccactctaattgatcaagttagagaagcccaaattaatgatcctgatattcaagagatcaagaagaatatgagaagaggaaaagctattggtttcttggaggatgagcacggaactcgagtcaaggcagaacatcagaaacccgccggtttgttgcaacctttgaagattcctgaatggaaatgggaagaaattggtatggattttattactggtttacccagaacgtcatcaggccatgactctatttgggtgatagtcgacagacttaccaaagtggctcatttcattccggtaaagacaacttattccggaagtcgcttagcggaattgtatatggcaaggattgtgtgtttgcatggcgtccctaagaagatagtgtctgatcgaggcagtcagtttacttcaaatttttggaagaaacttcaggaagagatgggttctaagctgaactttagtactgcttatcatccgcagacagacggacaaaccgaaagggtgaatcaaattttggaagacatgttgagagcttgtgctctagatttcggtggaagttgggataagaatctaccctatgcagaattttcgtacaacaacagttatcaagctagtctacagatggctccgtacgaagcactgtatggtcggaagtgccgcactccgcttttgtgggatcaaacgggagaacgtcaggttttcagaacggatatcctaagggaagcagaagaaaaggtaaagatcattcaagaaagattgcgtgtggctcagtctcgtcataagagttatgccgacaatcgccgcagagatttaagttttgaagagggagattatgtgtatcttcgtgtcacgcctctacgaggagttcatcgttttcataccaagggaaaattggcaccgcgttttgtgggaccttataagattgtcagtagaagaggagaggttgcttatcagttggagttacctcaatctttggcaggagttcataatgtgttccatgtttcgcaattgaaaaagtgtttaagggtacctaccgaacaagctaatcttgaccagatagaagtccaagaggatttgacttatgttgagaaaccaatccgtatcctggaaacaagtgagagaagaaccaggaatcgagttatccgtttttgcaaagtccagtggagtaatcactcggaagaagaatcaacttgggaacgagaagatgaattgaagtcagctcatccgcacctgttcgccagttcttccgaatctcgaggacgagattctgtttaa

SEQ ID NO: 15126 - DNA, 323 bp, Oryza sativa
  Clone ID: TFbOSC31560j.C1.o1.hg
gaccccagcccatgccacagggaggttcttcgtctgttgttcgtccgcaacgtcagttcttcaacaacaatgctggcaacaacatccgtaatcaagctccacgtcctgttgcagctccagcacagcaacaacctgccaagagggagcaaggcagcaagcccgtggtgtgtttcaactgtggagacccaggacattatgctgacaagtgtccgaagccccgtcgcgtgaaggttgtccctgcccagaataactctgctgtaccagcatccaaggctcgtgtaaatcatgtcgctgctgcagaagctcagatgctccagatgtga

SEQ ID NO: 15127 - DNA, 4638 bp, Oryza sativa
  Clone ID: TFbOSC31871j.C1.o1.fg
atgggctcctacgaaagcactgtatggtcggaagtgcagcactcgccttttgtgggatcatacggaagacgtcaggttttcgaaccgcatatcgtaagggaagcagaagtaaaggtaaagctcattcaagaaagattgcgtgtggctcagtctcgtcataagagttatgccaacaatcgccgcagagatttgagttttgaaaagggagattatgtgtatcttcgtgtcacgcctcttcgaggagttcatcgttttcataccaaagcaaaattggcaccgcgttttgtgggaccttataagattgtcagtagaacaggagaggttgcttatcagttggagttacctcaatctttggcaggagtacataatgtgttccatgtgtcgcaattgaaaaagtgtttaagggtacctaccgaagaagctaatattgagcagatagaagtccaagaggatttgacttatgttgagaaaccaatccgtatcctggaaacaactcctggtttggaatggtacattcctggtttggagatagaactgtgcagccggggtggttgttcagaatggttgggcctatacaacaggatgccgcgttacaagcctgagtacctgtttggtgttgagggttttgtccaggagttgcgtacgatgtcctttgtcattggatttgggactgcccctttttatacccagattcctcatgatcgtcatgaagagaagtgccgagtcaaagtcaccttgaacagcaatagtgaagatattccctcagtgatgttcgaagctggaggaagaaactacatccatgcatgtcaggaggtggcaaggatcgccataggagagctccgtgatcgctacagtgatcaattggccgacactgagtatcgttaccatcctcgccaaccccagggaagtgaccgtggcagttatcttgagactgaaggaattgagaattatgttaccacaagacatttggttgagatgttgtgggctatggatgaaagtcgtgcggagactgtgttagcagctcaagatcgtgaagaccggaatcatggtaagatttgcaagttagaagacaaggtggatcgtttggagaaggaattagccgcattgaagggagaagcaccgccgcagaaggccaggattcgtcttaccgcaaggaagagagctctatttgtccctcgctatcaactggcgccaaagatggtgaacactcgtagcaatgggaatggtcccaacaaccccaataacaacaatggagagaatcccactcttgctcaagttcttgctcaacaaacacagcttatgaacatgatgatgcagcaatttcagaatcagcaaaaccaagggaataatcatgcacctccccagaacaagttagcagaatttcttcgtgtgaggccgcctgttttctctagtaccactaatcctgttgaagctagtgattggctgcatgccatagagaagaagttggatttacttcagtgcactgatcaggagaaggtatcttttgcatcacatcagttgcatggccctgcctctgaatggtgggatcacttccgccttaacaggactactgctgaacctatcacttggcttgaattcaccgctgctttccgaaagacgcatataccatcgggagtagtgtctctcaagaagaaggagttcaggtcgcttactcagggatctcgctctgttacggagtatctgcacgagttcaatcgtcttgctcgttatgctccggaagatgtgcgcaatgatgaagagcgccaggagaagtttttgggaggacttaatgatgagctttcttacccactcatggttggagattatcctgatttccagaaattagtggataaggctattcgtcaggaggacaagtataatcgcatggagcagaagaaacgtcggattggtcaattcaagacacaccagggaaatattcagaagccgcgtcttactttaggaccccagtctatgccacaggtaggttcttcgtctgttgttcgtccgcaacgtcagtttttcatcaacaatgctgccaacaacatccgtaataaagctccacgtcctgttgcagctccagtacagcaacaacctgccaagagggagcaaggcagcaagcccgtggtgtgtttcaactgtggagacccaggacattatgctgacaagtgtccgaagccccgtcgcgtgaaggttgtccctgcccagagtaactctgctgtaccagtatccaaggctcgtgtaaatcatgtcgctgctgcagaagctcaagatgctccagatgtaattttgggtacgttccttgttaactcagttcctgcaacagtacttttcgattctggtgctacacattcattcttatctatgagttttgcgggaaatcatgggatggaagtagaagatcttagacgtcctttgatggttagtaccccaagtaatcaagcactctctttgcaacgtagcccctcggtcagaatagaaattaaaggagtaccatttctggccaatcttatcttgttagaatccaaagaccttgatgtcatcctagggatggactggttagccagacataaaggtgtgatagactgtgccaacagaaaagtaactctcaacagctatgatggtcgagttgtaactgttcatgcattgtcatctgagtctttaaggtcaagactgaaccagataactttggaagagattcctatagtccgggagtattctgatgtgttcccagatgatttacctggtatgccgcctaaaagggatatagagttcagaatagatttggtacctggaacaactccgatccataagagaccttatcgaatggcagctaatgagttggcagaagttaagaggcaagtagatgatttgctacagaaaggatacatcagaccgagttcatcaccatggggagctccggttatttttgtggaaaagaaagaccatactcagagaatgtgtgtggactatcgtgcactaaacgatgtgactatcaagaataagtatccactacccaggattgatgatttgtttgatcagcttaaaggtgccactgttttctccaagatagatcttcgatcagggtatcatcagttgagaatcaaagaggaagatatacctaagacagcttttaccactaggtatgggttgttcgaatgtactgttatgtcttttggacttaccaatgcccctgctttcttcatgaacttgatgaataaggtgtttatggaatacttagacaagttcgtggtggtctttattgatgatattcttatctactctcgaaccaaagaagagcatgaggaacatcttcgccttgcattggagaagctacgagaacatcaactgtatgctaagtttagcaagtgtgaattttggttgtccgaagtgaaattccttggtcacgtcatctcagccggaggagttgccgtcgatcctagtaacgtggaatccgtaaccaattggaagcaaccaaagacagtttcagagattcgcagtttcctaggcctcgcaggatattatcggaggtttatagagaatttttccaagattgctaagcccatgacacgactgcttcagaaagatgtgaagtacaagtggtcggaagaatgtgaacagagttttcaagaattgaaaagtcgcttaatatcagctcctattttgattttgcctgatccaaagaagggttttcaagtgtattgcgatgcatccaaacttgggttaggttgtgttttgatgcaagatgggaaggtggttgcctatgcctctcgacagttacgtccgcatgagaagaactaccctactcatgatattgagttagctgcagtcgttcatgcattgaagatttggcgtcattatcttttcggtactcgtacagaagtgtacaccgatcacaagagtttaaagtatatctttactcagccggatctgaacatgagacaacggagatggttggaattaattaaggattatgacatgggaattcattatcatccgggaaaggctaatgttgtagcagacgctcttagcagaaaaggctattgcaatgctacagaaggacgacagttgccattggaattatgcaaggaatttgaaagattaaatttgggaattgtcggtagaggtttcgttgcagctttagaagcgaagcccactctaattgatcaagttagagaagcccaaaataatgatcctgatattcaagagatcaagaagaatatgagaagaggaaaagctattggtttcttggaggatgagcacggaacggtatggttgggtgagagaatctgtgtccccgacaacaaagatttaaaggatgcaattctgaaagaagctcacgatactttatactccattcaccctggtagtactaagatgtaccaggatctcaaggaaagattttggtgggcaagtatgaagcgtgaaatcgcagaatacgtagcagtatgtgatgtttgtcagcgagtcaaggcagaacatcagaaacccgccggtttgttgcaacctttgaagattcctgaatggaaatgggaagaaattggtatggattttattactggtttacccagaacgtcatcaggccatgactctatttgggtaatagttgacagacttaccaaagtggctcatttcattccg

SEQ ID NO: 15128 - DNA, 5164 bp, Oryza sativa
  Clone ID: TFbOSC400036j.C1.o50.np
acctctcttctctctcctcggcccaaattccgtcgtttccggagagtccgttttcgcagaagaagagtttgaagagttccaaggccagcaaggcaactcctggtttggaatggtacattcctggtttggagatagaactgtgcagccggggtggttgttcagaatggttggcctatacaacaggatgccgcgttacaagcctgagtacctgtttggtgttgagggttttgtccaggagttgcgtacaatgtcctttgtcattggatttgggactgcccctttttatgcccagattcctcatgatcgtcatgaagagaagtgccgagtcaaagtcactttgaacagtaatagtgaagatatcccctcagtgatgtttgaagctggaggaagaaactacatccatgcatgtcaggaggtggcaaggatcgccataggagagctccgtgatcgctacagtgatcaattggccgacactgagtatcgttcccatcctcgtcaaccccagggaagtgaccgtggtagttaccttgagactgaaggaattgagaatgatgctaccacgaagcatttggttgagatgttgtgggctatggatgaaagtcgtgcggagattgtgttagcagctcaagatcgtgaagaccggaatcgtggtaagatttgcaagttagaagacaaggtggatcgtttggaaaaggaattagccgcattgaagggagaagcaccgccgcagaaggccaggattcgtctcaccgcaaggaagagagctctatttgtccctcgctatcaactggcgccaaagatggtgaatactcgcagcaacgggattggtcccaacaaccccaataacaacaacaatggagagaatcccactctagctcaagttcttgctcaacagacacaacttatgaacatgatgatgcaacaacttcagaatcagcaaaaccaaggaaataatcatgcacctccccagaacaagttagcagaatttcttcgtgtgaggccgcctgttttctctagtaccactaatcctgttgaagctagtgattggctgcatgccatagagaagaagttggatttacttcagtgcactgatcaggagaaggtatcatttgcatcacatcagttgcatggccctgcctctgaatggtgggatcatttccgccttaacaggactactgctgaacctatcacttggcttgaattcaccgctgctttccggaagacgcatataccatcaggagtagtgtctctcaagaagaaggagttcaggtcgcttactcagggatctcgctctgttacggagtatctgcacgagttcaatcgtcttgctcgttatgctccggaagatgtgcgcaatgatgaagagcgccaggagaagtttttgggaggacttaatgatgagctttcttacccactcatggttggagattatcctgatttccagaaattagtggataaggctatacgtcaggaggacaagtacaattgcatggagcagaggaaacgtcggattgctcacttcaaggcacaacagggaaataatcagaagccgcgtcttactttaggaccccagtccatgccacatggaggttcttcgtctgttgttcgtccgcagcgtcagttcttcaacaacaatgctggcaacaacatccgtaatcaagctccacgtcctgttgcagctccagcacagcaacaacctgccaagagggagcaaggcaacaagcccgtggtgtgtttcaactgtggagacccaggacattatgctgacaagtgtccgaagccccgtcgcgtgaaggttgtccctgcccagaataactctgctgtaccagcatcaaaggcccgtgtcaatcatgttgcggctgcagaagctcaagatgctccagatgtgattttgggtatgttccctgttaactcagttcctgcaacagtgcttttcgattctggtgctacacattcattcctatctatgagttttgcgggaaatcatgggatggaagtagaagaccttagacgtcctttgatggttagtaccctaagtgatcaagcactttctttgcaacgtagcccctctgtcagaatagaaattcaaggagtaccatttctggccaatcttatcttgttagaatccaaagaccttgatgtcatcctagggatggactggttaaccagacataaaggtgtgatagactgtgccaacaaaaaagtaactctcaccagcaatgttggtcgagttgtaactgttcatgcattgtcatctgagtctttaaggtcaagactgaaccagataactttggaagagattcctatagtccgggagtatcctgatgtgttcccagatgatttacctggtatgccgcctaaaagggatatagagttcagaatagatttggtacctggaacaactccgatccataagagaccttatcgaatggcagccaatgagttggcagaagttaagaggaaagtagatgatttgctacagaaaggatacatcagaccgagttcatcaccatggggagctccggttatttttgtggaaaagaaagaccatactcagagaatgtgtgtggactatcgtgcactaaacgatgtgactatcaagaataagtatccactacccaggattgatgatttgtttgatcaacttaaaggtgccactgttttttccaagatagatcttcgatcagggtatcatcagttgagaatcaaagaggaagatatacctaagacagcttttaccactaggtatgggttgttcgaatgtactgttatgtcttttggacttaccaatgcccctgctttcttcatgaacttgatgaataaggtgtttatggaatacctagacaagttcgtggtggtctttatagatgatattcttatctactctcgaaccaaagaagagcatgaggaacatcttcgccttgcattggagaagctacgagaacatcaactgtatgctaagtttagcaagtgtgaattttggttgtctgaagtgaagttccttggtcacgtcatctcagccggaggagttgccgtcgatcctagtaacgtggaatccgtaaccaattggaagcaaccaaagacagtttcagagattcgcagtttcctaggcctcgcaggatattaccggaggtttatagagaatttttccaagattgctaagcccatgacacaactgcttcagaaagatgtaaagtacaagtggtcgaaagaatgtgagcggagttttcaagagttaaaaagtcgcttaatatcagctcctattttgattttgcctgatccaaagaagggttttcaagtgtattgcgatgcgtccaaacttgggttaggttgtgttctgatgcaagatgggaaggtggttgcctatgcatctcgtcagttacgtccgcatgagaagaactaccctactcatgatattgagttagctgcagtcgttcatgcattgaagatttggcgtcattatcttttcggtactcgtacagaagtgtataccgatcacaagagtttaaagtatatctttactcagccagatctgaacatgagacaacggagatggttggaattaattaaggattatgacatgggaattcattatcatccgggaaagactaatgtagtagcagacgctcttagcagaaaaggctattgcaatgctacagaaggacgacagttgccattggatttatgcaaggaatttgaaagattaaatttgggaattgtcggtagaggtttcgttgcagccttagaagcgaagcccactctaattgatcaagttagagaagcccaaattaatgatcctgatattcaagagatcaagaagaatatgagaagaggaaaagctattggtttcttggaagatgagcaaggaactgtatggttgggtgagagaatctgtgtccccgacaacaaagatttaaaagatgcaattctgaaagaagctcacgatactttatactccattcaccctggtagtactaagatataccaggatctcaaggaaagattttggtgggcaagtatgaagcgtgaaatcgcagagtacgtagcagtatgtgatgtttgtcagcgagtcaaggcggaacatcagaaacccgccggtttgctgcaacctttgaagattcctggatggaaatgggaagaaatcggtatggattttatcactggtttgcctagaacgtcatcaggccatgactctatttgggtaatagtcgacagacttaccaaagtggctcattttattccggtaaagacaacctattccggaagtcgcttggcggaattgtatatggcaaggattgtgtgtttgcatggcgtccctaagaagatagtgtctgatcgaggcagtcagtttacttcaaatttttggaagaaacttcaggaagagatgggttctaagctgaactttagcactgcttatcatccgcagacagacggacaaaccgaaagggtgaatcaaattttggaagacatgttgagagcttgtgctttagatttcggtggaagttgggataagaatctaccttatgcagaattttcgtacaacaacagttatcaagctagtcttcagatggctccttacgaagcactgtatggtcggaagtgtcgcactccgcttttgtgggatcaaacgggagaacgtcaggttttcgggacggatatcctaagagaagcagaagaaaaggtaaagatcattcaagaaagattgcgtgtggctcagtctcgacataagagttatgccgacaatcgccgcagagatttgagttttgaagaaggagactatgtgtatcttcgtgtcacgcctcttcgaggagttcatcgttttcacaccaagggaaaattggcaccgcgttttgtgggaccttataagattgtcagtagaagaggagaggtcgcttatcagttggagttacctcaatctttggcaggagtccataatgtgttccatgtgtcgcaattgaagaagtgtttaagagtacctaccgaagaagctaatcttgaccagataagtgagagaagaaccaggaatcgagttatccgtttttgcaaagtccagtggagtaatcactcggaagaagagtcaacttgggaacgagaagatgaattgaagtcagctcatccgcatctgttcgccagttcttccgaatctcgaggacgagattctgtt

SEQ ID NO: 15129 - DNA, 4911 bp, Oryza sativa
  Clone ID: TFbOSC400074j.C1.o16.fg
atgtctttcatgattagtctcacccttctcaccacagtaaatgatgctataactggtaatagtttgattagctcctggtttggaatgatgccgcgctacaagcctgagtacttgtttggtgttgagggttttgtccaagagttgcgtacgatatcctttgtcattggatttgggactgcccctttttatgcccagattcctcatgatcgtcatgaagagaagtgccgagtcaaagtcaccttgaacagtaatagtgaagatatcccctcagtgatgttcgaagctggaggaagaaactacatccatgcatgtcaggaggtggcaaggatcgccataggagagctccgcgatcgttatagtgatcagttggccgacactgagtatcgctaccatcctcgtcaaccccagggaagtgaccgtggcagttaccttgagactgaaggaattgagaatgatgctaccacaaggcatttggtcgagatgctgtgggctatggatgaaagtcgtgcggagactgtgttagcggctcaagatcgtgaagaccggaatcgtggtaagatttgcaagttagaagacaaggtggatcgtttggagaaggaattagccgcgttgaagggagaagcaccaccgcagaaggccaggattcgtcttaccgcaaggaagagagctctatttgtccctcgctatcaattggcgccaaagtttcccccggtgtctcttcttgtgccctgtccatgccagatggtgaacactcgcagcaatgggaatggccccagtaacaataacaatgaagggaatcccactcttgctcaagttcttgctcaacagactcagttaatgaacatgatgatgcagcaacttcagaaccagcagaaccaaggaaataaccatgcacctccccataacaagttagcagaatttcttcgtgtgaggccgcctattttctctagtaccactaatcctgttgaagctggtgattggttgcatgccatagagaagaagttggatttgcttcagtgcactgatcaggagaaggcctcatttgcatcacatcagttgcatggccctgcctctgaatggtgggatcacttccgtctgaacaggactactgctgaacctatcacttggcttgaattcaccgctgctttccggaagacgcatataccatcgggagtggtgtccctcaagaagaaggaattcaggtcgctcacccagggatctcgctctgttacggagtatttgcacgagttcaatcgtctggctcgttatgctccggaggatgtgcgcaatgatgaagagcgccaggagaagttcttagaaggacttaatgatgagctttcttacccactcatgactggggattattctgatttccagaagttggtggataaggctattcgtcaagaggacaaatacaaccgcatggagcagaagaaacgccggattgctcaattcaagacacaacaggggaataatcagaggccgcgtcttactttaggaccccagtccatgccacatggaggttcttcgtctgttgttcgtccgcagcgtcagttcttcaacaacaatgctggcaacaacatccgcaatcaagctctacgccctgttgcagctccaacacagcaacagcctgccaagagggagcatggcagcaagcccgtggtgtgtttcaactgtggagacccaggacattacgctgacaagtgtccgaagccccgacgcatgaaggttgtccctgtccagagcaactctaccgcaccagcatcaaaggctcgtgtcaatcatgtcgctgcggcagaagctcaagatgctccagatgtgattttgggtacgttccttgttaacttagttcctgcaacagtgcttttcgattctggtgctacacattcattcttatctatgagttttgcgggaaatcatgggatgaaagtagaagatcttagacgtcctttgatggttagtaccccaagtaatcaagcactctctttgcaacgtagcccctctgtcagaatagaaattaaaggagtaccatttctggccaatcttatcctgttagaatccaaagacctagatgtcatcctagggatggactggttagccagacataaaggtgtgatagactgtgctaacagaaaagtaactctcaccagcaatgatggtcgagtggtaactgttcatgcattgtcttctgaatctttaaggtcaagactgaaccagataactttggaagagattcctatagtccgggagtatcccgatgtgttcccagatgatttgcctggtatgccgcctaaaagggatatagagttcagaatagatttggtaccaggaacaactccgatccataagagaccttatagaatggcagccaatgagttggcagaagtcaagaggcaaaaagatcatacccagaggatgtgtgtagactatcgtgcactaaatgatgtgactatcaagaataagtatccactacctagaattgatgatttgtttgatcagcttaaaggtgctactgttttctccaagatagatcttcgatcaggatatcaccagttgagaatcaaagaggaagatatacctaagacagcttttaccactaggtatgggttgttcgaatgtactgttatgtcttttggacttaccaatgcccctgctttcttcatgaacttgatgaatcaggtgtttatggaatacctagacaagttcgtggtggtctttattgatgatattcttatctactctcgaaccaaagaagagcatgaagaacatcttcgccttgcactagagaagctacgagaacatcaactgtatgctaagtttagcaagtgtgaattttggttgtctgaagtgaagttccttggtcacgtcatctcagccggaggagttgccgttgatcctagtaatgtggaatccgtaaccaactggaaacaaccgaagacagtttcagagatccgcagtttcttaggcctcgcaggatattaccggaggtttatagagaatttttccaagattgctaagcccttgacacgactgcttcagaaagatgtgaagtacaagtggtcggaagaatgtgagcagagttttcaagagttgaaaagtagcttaatatcagctcctattttgattttacctgatccaaagaagggtttccaggtgtattgtgatgcatccaaacttgggttaggttgtgtactgatgcaagatgggaaggtggttgcctatgcatctcgtcagttgggtccgcatgagaagaactaccctactcatgatattgagttggccgcagtagttcatgcgttgaaaatttggcgtcattatcttttcggtactcgtacagaggtatataccgatcacaagagtttaaagtatatctttactcagccggatctgaacatgagacaaaggagatggttggaattaattaaggattatgacatgggaattcattatcacccgggaaaggctaatgttgtagcagacgctcttagcaggaaaggctattgcaatgctacggaaggacgacatttgccattggaattatgcaaggaatttgaaagattaaatttgggaattgtcagtataggttttgttgcagccttagaagcgaagcccactctaattgatcaagttagagaagcccaaattaatgatcctgatattcaagatatcaagaagaataggagaagaggaaaagctatcggtttcttggaggatgagcacggaactgtatggttgggtgagagaatctgtgtccccgacaacaaagatttaaaagatgcaattctgaaagaagctcatgatactttatactccattcaccctggtagtactaagatgtaccaggatctcaaggaaagattttggtgggcaagtatgaggcgtgaaatcgcagaatacgtagcagtatgtgatgtttgtcagcgagtcaaggcagaacatcagaaacctgccggtttgctgcagcctttgaagattcctgaatggaagtgggaagaaatcggtatggattttatcactggtttacccagaacgtcatcaggccatgactctatttgggtgatagtcgacagacttaccaaagtggctcatttcattccagtaaagacaacctattccggaagtcgcttagcggaattgtatatggcaaggattacagacggacaaaccgaaagggtgaatcagattttggaagacatgttgagagcttgtgctttagacttcggtggaagttgggataagaatctaccctatgcggaattttcgtacaacaacagttatcaagctagtctacagatggctccttacgaagcactatatggtcagaagtgccgcactccgcttttgtgggatcaaacgggagaacgtcaagttttcgggacggatatcctaagagaagcagaagaaaagtctcgtcataagagttatgccgacaatcgccgcagagatttgagttttgaagaaggagattatgtgtatcttcatgtcacgccttttcgaggagttcatcgttttcataccaaaggaaaattggcaccgcgttttgtgggaccttataagatcgtcagtagaagaggagaggttgcttatcaattggaattacctcaatctttggcaggagtccataatgtgttccatgtttcgcaattgaaaaagtgtttaagggtacctaccgaagaagctaatcttgaacagatagaagtccaagaggatctgacctatgttgagaaaccaatccgtatcttggaaatagatgagagaagaaccaggaatcgggttatccgtttttgcaaagtccaatggagtaatcactcggaagaagagtcaacttgggaacgagaagatgaattgaagtcagctcatccgcatctgttcgccagttcttccgaatctcgaggacgagattctgtttaa

SEQ ID NO: 15130 - DNA, 4704 bp, Oryza sativa
  Clone ID: TFbOSC400179j.C1.o21.fg
atggcgatgcggcggaggcgcgcggtcgccggcgacgacaaccagcggcaggcgatgccgcgctacaagcctgagtacttgtttggtgttgagggttttgtccaggagttgcgtacgatgtcctttgtcataggatttgggactgtccttttttatgcccagattcctcatgatcgtcatgaagagaagtgccgagtcaaagtcaccttgaacagtaatagtgaagatatcccctcagtgatgttcgaagctggaggaagaaactacatccatgcatgtcaggaggtggcaaggatcgccataggagagctccgcgatcgctacagtgatcagttggccgacactgagtatcgctaccatcctcgccaaccacagggaagtgatcgtggcagctaccttgagactgagggaattgagaatgatgctaccacaaggcatttggttgagatgctgtgggctatggatgaaacccgtgcggagacagtgttagcggctcaagatcgtgaagaccggaatcgtggtaagatttgcaagttggaggacaaggtggatcgtttggagaaggaactagccgcgttgaagggagaagcaccaccgcagaaggccaggattcgtcttaccgcaaggaagagagctctatttgtccctcgttaccaattggcgctaaagatggtgaacactcgcgccagtggaagtggaaacaataacaatgaagggaacccaactcttgcccaagtcctggctcaacaggcacagcttatgaacatgatgatgcagcaactccagaaccagcagaaccaaggaaataaccatgcacctccccagaacaagttagcagaatttcttcgtgtgaggccgcctactttctctagcaccactaatcctgttgaagctggtgattggttgcatgctatagagaagaagttggatttgcttcaatgcaccgatcaggagaaggtctcatttgcatcacatcagctgcatggccctgcctctgaatggtgggatcacttccgcctgaataggactactgctgaacctatcacttggcttgaattcaccgctgctttccggaagacgcatataccatcgggagtggtgtctctcaagaagaaggaattcaggtcgctcactcaggggtctcgctctgttacggagtatctgcacgagttcaatcgtcttactcgttatgctccagaagatgtgcgcactgatgaagagcgccaggagaagttcttggaaggacttaatgatgagctttcttacccactcatgactggggattatcctgatttccagaagttggtggataaggctattcgccaggaagacaagtacaatcgcatggagcaaaagaaacgccggattgctcaattcaagacacaacagggaaataatcagaagccgcgtcttactttaggaccccagtctatgccacagggaggttcttcgtctgttgttcgtccgcagcgtcagttcttcaacaacaatgctggcaacaacatccgcaatcaagctccacgccctgttgcagtttcgacacagcaacaacctgccaagagggagcaaggcagcatgcccgtggtgtgtttcaactgtggagacccaggacattatgctgacaagtgtccgaagccccgacgcgtgaaggttgtccctgcccagagcaactctaccgcacctgcgtcaaaggcccgtgtcaatcatgttgcggctgcagaagctcaaggtgctccagatgtgattttgggtacgttccttgttaactcagtttctgcaacagtgcttttcgattctggtgctacacattcattcttatctatgagttttgcgggaaatcatgggatggaagtagaagatcttagacgtcctttgatggttagtaccccaagtaatcaagcactctctttgcaacgtagcccctctgtcagaatagaaattaaaggagtaccatttttggccaatcttatcctgttagaatccaaagaccttgatgtcatcctatggatggactggttagccagacataaaggtgtgatagactgtgctaacagaaaagtaactctcaccagcaatgatggtcgagttgtaactgttcatgcattgtcttctgagtctttaaggccaagtctaaaccaaataactttggaagagattcctatagtccgggagtatcctgatgtgttcccagatgatttacctggtatgccgcctaaaagggatatagagttcagaatagatttggtaccaggaacaactccgatccataagagaccttatagaatggcagccaatgagttggcagaagtcaagaggcaagtagatgatttgcttcagaaaggatacatcagaccgagttcatctccatggggagctccaattatttttgtggaaaagaaagaccatacccagaggatgtgtgtggactatcgtgcactaaatgatgtgactatcaagaataagtatccgctacccagaattgatgatttgtttgatcagcttaaaggtgccactgttttctccaagatagatcttcgatcagggtatcaccagttgagaattaaagaggaagatatacctaagacagcttttaccactaggtatgggttgtttgaatgtactgttatgtcttttggacttaccaatgcccccgctttcttcatgaacttgatgaataaggtgtttatggaatacctagacaagttcgtggtggtctttattgatgacattcttatctactcccgaaccaaagaagagcatgaagaacatcttcgccttgcactagagaagctacgagaacatcaactgtatgctaagtttagcaagtttgaattttggttgtctgaagtgaagttccttggtcacgtcatctcagccggaggagttgccgtcgatcctagtaatgtggaatccgtaaccaattggaaacaaccaaagacagtttcagagattcgcagtttcttaggcctcgcaggatattatcggaggtttatagagaatttttccaagattgctaagcccatgacacgattgcttcagaaagatgtgaagtacaagtggtcggaagaatgtgagcagagttttcaagagttgaagaatcgcttgatatcagctcctattttgattttgcctgatccaaagaagggtttccaagtgtattgcgatgcatccaaacttggggtaggttgtgttctgatgcaagatgggaaggtggttgcctatgcatctcgtcagttacgtccgcatgagaagaactaccctactcatgatcttgagttagctgcagtagttcatgcgttgaaaatttggcatcattatcttttcggtactcgtacagaagtatataccgatcacaagagtttaaagtatatctttactcagccggatctgaacatgagacaacggagatggttggaattaattaaggattatgacatgggaatacattatcacccgggaaaggctaatgttgtagcagacgctcttagcaggaaaggctattgcaatgctacggaaggacgacagttgccattggaattatgcaaggaatttgaaagattaaatttgggaattgtcagtagaggtttcgttgcagccttagaagcgaagcccactctaattgatcaagttagagaagcccaaattaatgatcctgatattcaagaaatcaagaagaatatgagaagaggaaaagctattggtttcttggaagatgagcaaggaactgtgtggttgggtgagagaatctgcgtccccgacaacaaagatttaaaagatgcaattctgaaagaagctcatgatactttatactccattcaccctggtagtactaaaatgtaccaggatctcaaggaaaggttttggtgggcaagtatgaagcatgaaatcgcagaatacgtagcagtatgtgatgtttgtcagcgcgtcaaggcagaacatcagaaacccgcagtcgacagacttaccaaagtggctcatttcatcccagtaaagacaacctattccggaagtcggttagcggaattgtatatggcaaggattgtgtgtttgcatggcgtccctaagaaaatagtgtctgatcgaggcagtcagtttacttcaaatttttggaagaagcttcaggaagagacagacgaacaaaccgaaagggtgaatcagattttggaagacatgttgagagcttgtgctttagacttcggtggaagttgggataagaatctaccctatgcagaattttcatacaacaacagttatcaagctagtcttcagatggctccttacgaagcactgtatggtcgaaagtgtcgcactccgcttttgtgggatcaaacgggagaacgtcaggttttcgggacggatatcctaagggaagcagaagaaaagccgtgcgccgccgccgttccagtcgtcgccgtcgctcgggaaggtcgtcatcgtggtcgccaagtcgtcgccgtcctcgtccgccccttcgccgtcgctgtagaccgccggagcaccgtcgccgccgtcgacccgatcttctccgccgcttcgacctcgacgccgtcgccgtccgttgatcttccgccgcttctttggtcaccgattccgacgtttccggagagtccgttttcgcaggagaagaatttgaagagttccaaggccagcaaggcaagtcacacagatcccaaacaaccctttgagcatgttgatcctatttaa

SEQ ID NO: 15131 - DNA, 1827 bp, Oryza sativa
  Clone ID: TFbOSC400398j.C1.o3.gm
atgccgcgttacaagcctgagtacctgtttggtgttgagggttttgtccaggagttgcgtacgatgtcctttgtcattggatttggaactgcccctttttatgcccagattgctcatgatcgtcatgaagagaagtgccgagtcaaagtcaccttgaacagtaatagtgaagatatcccctcagtgatgtttgaagctggaggaagaaactacatccatgcatgtcaggaggtggcaaggatcgccataggagagctccgtgatcgctacagtgatcaattggccgacactgagtatcgctaccatcctcgccaaccacagggaagtgaccgtggcagttaccttgagactgaaggaattgagaatgatgttaccacaaagcatttggttgagatgttgtgggctatggatgaaagtcgtgcggagactgtgttagcagcccaagatcgtgaagattggaatcgtggtaagatttgcaagttagaagacaaggtggatcgtttggagaaggaattagccgcattaaagggagaagcaccgccgcagaaggccaggattcgtcttaccgcaaggaagagagctctatttgttcctcgctatcaattggcgccaaaggttcgtgtggtggagaaagaagttgccccagctcaagcggatcctccggtcatcatcataagtagtgatgaagaagaagaatccaagcgcaacaattccaagattgagtgggtagcaacccaagttgataaagacgagccttcaatcgacctccgatgcttggaagaactagagactactgctgaacctatcacttggcttgaattcaccgctgctttccggaagacgcatataccatcaggagtagtgtctctcaagaagaaggagttcaggtcgcttacccagggatctcgctctgttacggagtatctgcacgagttcaatcgtcttgctcgttatgctccggaagatgtgcgcaatgatgaagagcgccaggagaagtttttgggaggacttaatgatgagctttcttacccactcatggttggagattatcctgatttccagaaattagtggataaggctatacgtcaggaggacaagtacaatcacatggagcagaagaaacgtcggattgctcacttcaaggcacaacagggaaataatcagaagccgcgtcttactttaggaccccagtccatgccacagggaggttcttcgtctgttgttcgtccgcagcgtcagttcttcaacaacaatgctggcaacaacatccgtaatcaagctccacgtcctgttgcagctccagcacagcaacaacctgccaagagagagcaaggcagcaagcccgtggtgtgtttcaactgtggagacccaggacattatgctgacaagtgtccgaagccccgacgcgtgaaggttgtccctgcccagaataactctgctgtaccagcatccaaggctcgtgtaaatcatgtcgctgctgcagaagctcaagatgctccagatgtgattttccttgttaactcagttcctgcaacagtacttttcgattctgccaatgagttggcagaagttaagaggcaagtagatgatttgcttcagaagggatacatcagacctagttcatctccatggggagctccgccgtcgccgtcgctcgggaagaccaccgtcgtgctcgccaagtcgtcgccgtcctcgttcgccccttcgccgtcgccggagatcaccggagcagcttcgccgtcgtcgacccgaaggttcccgccgcttcctccttgtcgccgtcgccgtccgttggtcttccgccgccgtttaggtcaccggtga

SEQ ID NO: 15132 - DNA, 3000 bp, Oryza sativa
  Clone ID: TFbOSC400446j.C1.o26.fg
atggacatctctaggacaaatgaaggctacacgagctgcggcccggtaatcgagatgtcatggcacagggctggtgtcctgctgctaggggctcaatcctgcctacctgtcccggaggttccggccgtaggtggggttgggtcggtactcttgtctatggctaggatgggttggaaactatgtcatgtctcccgtccaaatgccgtggtgcctgccaagagggagcaaggcagcaagcccgtggtgtgcttcaactgtggagacccaggacattatgctgacaagtgtccgaagccccgacgcgtgaaggttgtccctgcccagagcaactctaccgcaccagcatcgaaggcccgtgtcaatcatgttgcagctgcagaagctcaagatgctccagatgtgattttgggtacgttccttgttaactcagttcctgcaacagtacttttcgattctggtgctacacattcattcttatctatgagttttgcgggaaatcatgggatggaagtagaagatcttagacgtcctttgatggttagtaccccaaataatcaagcactctctttgcaacgtagcccctctgtcagaatagaaattaaaggagtaccatttctggccaatcttatcttgttagaatccaaagaccttgatgtcatcctagggatggactggttagccagacataaaggtgtgatagactgtgccaacagaaaagtaactctcaccagcaatgatggtcgagttgtaactgttcatgcattgtcttctgagtctttaaggtcaagactgaaccagataactttggaagagattcctatagtccgggagtattccgatgtgttcccagatgatttacctggtatgccgcctaaaagggatatagagttcagaatagatttggtacctggaacaactccgatccataagagaccttatagaatggcagccaatgagttggcagaagtcaagaggcaagtagacgatttgcttcagaaaggatacatcagaccgagttcgtcaccatggggagctccggttatttttgtggaaaagaaagaccatacccagagaatgtgtgtggattatcgtgcactaaatgatgtgactatcaagaataagtatccgctacccagaattgatgatttgtttgatcagcttaaaggtgccactgttttctccaagatagatcttcgatcagggtatcaccagttgagaatcaaagaggaagatatacctaacacaacttttaccactaggtatggattgttcgaatgtactgttatgtcttttggacttaccaatgcccccgctttcttcatgaacttgatgaataaggtgtttatggaatacctagacaagtttgtggtggtctttattgatgacattcttatctactctcgaaccaaagaagagcatgaagaacatcttcgccttgcgttggagaagctacgagaacatcaactgtatgctaagtttagcaagtgtgaattttggctgtctgaagtgaagttccttggtcacgtcatctcagcaggaggagttgccgttgatcctagtaatgtggaatctgtaaccaactggaaacaaccaaagacggtttcagagattcacagattcctaggcctcgcaggatattatcggaggtttatagagaatttttccaagattgctaagcccatgacacgactgcttcagaaagatagttttcaagagttgaaaagtcgcttaatatcagctcctattttgattttgcctgatccaaagaagggtttccaagtgtattgcgatgcatcaaaacttgggttaggttgtgttctgatgcaagatggaaaggtggttgcctatgcatctcgtcagttacgtccgcatgagaagaactaccctactcatgatcttgaattggccgcagtggttcatgcgttgaaaatttggcgtcattatcttttcggtactcgtacagaggtgtataccgatcacaagagtttaaagtatatctttactcagccggatctgaacatgagacaaaggagatggttggaactaattaaggattatgacatgggaattcattatcacccaggaaaggctaatgttgtagcagacgctcttagcaggaaaggctattgcaatgctacggaaggacgacagttgccattggaattatgcaaggaatttgaaagattaaatttgggaattgtcagtagaggtttcgttgcagccttagaagcgaagcccactctaattgatcaagttagagaagcccaaattaatgatcctgatattcaagaaatcaagaagaatatgagaagaggaaaagctatcggtttcttggaggatgagcacggaactgtatggttgggtgagagaatctgtgtccccgacaacaaagatttaaaagatgcaattctgaaagaagctcatgatactttatactccattcaccctggtagtactaagatgtaccaggatctcaaggaaagattttggtgggcaagtatgaagcgtgaaatcgcagaatacgtagcagtatgtgacgtttgtcagcgagtcaaggcagaacatcagaaacccgccggtttgttgcagcctttgaagattcctgaatggaagtgggaagaaatcggtatggattttatcactggtttacccagaacgtcatcaggtcatgactctatttgggtgatagtcgacagacttaccaaagtagctcatttcattccggtaaagacaacctattccggaagtcgcttagcggaattgtatatggcaaggattgtgtgtttgcatggcgtccctaagaaaatagtgtctgatcgaggcagtcagtttacttcaaatttttggaagaaacttcaggaagagatgggttctaagctgaactttagtactgcttatcatccgcagacagacggacaaaaggaccgtataaggaccggtcttcgggcctctgttgcaaagcactaccgtacttccacatgtctagtgggtaaggcttag

SEQ ID NO: 15133 - DNA, 4230 bp, Oryza sativa
  Clone ID: TFbOSC400591j.C1.o10.fg
atgccgcgctacaagcctgagtacctgtttggtgttgagggttttgtccaggagttgcgtacaatgtcctttgccataggatttgggactgcccctttttatgctcagattcctcatgatcgtcacgaagagaagtgccgagtcaaagtcactttgaacagtaatagtgaagatatcccctcagtgatgttcgaagctggaggaagaaactacatccatgcatgtcaggaggtggcaaggatcgccataggagagctccgtgatcgctacagtgatcagttggccgacatggagtatcgctatcatcctcgccaaccccagggaagtgaccgtggcagttatcttgagactgaaggaattgagaatgatgctaccacaaggcatttggttgagatgctgtgggctatggatgaaagtcgtgcagagactgtgttagcggctcaagatcgtgaagaccggaatcgtggtaagatttgcaagctagaagacaaggtggatcgtttggagaaggaattagccgcattaaagggagaagcaccgccgcagaaggccaggattcgtcttaccgcaaggaagagagctctatttgtccctcgctaccaattggcgccaaaggtccgtgtggtggagaaagaagttaccccagccctagcggatcctccggtcgtcaatatggtgaatactcgcagcaacgggaatggccccaacaacaacaataacaacaacaatggagagaatcccacacttgcccaagttctggctcaacagactcagttaatgaacatgatgatgcagcaacttcagaaccagcagaaccaaggaaataaccatgcacctcctcagaataagttagcagaatttcttcgtgtaaggccgcctactttctctagcaccactaatcctgttgaagctggtgattggttgcatgccatagagaagaagttggatttgcttcagtgcactgatcaggagaaggtctcatttgcatcacatcagttgcatggccctgcctctgaatggtgggatcatttccgcctgaataggactactgcggaacctatcacttggcttgaattcaccgctgctatccggaagacgcatataccatcgggagtggtgtctctcaagaagaaggaattcaggtcgctcacccagggatctcgctctgttacggagtatctgcacgagttcaatcgtctggctcgttatgctccggaagatcgtcagttcttcaacaacaatgctggcaacaacatccgcaatcaagctccacatcctgttgcagcttcgacacagcaacagcctgccaagagggagcaaggcagcaagcccgtggtgtgtttcaactgtggagacccaggacattatgctgacaagtgtccgaagccccgacgcgtgaaggttgtccctacccagagcaactctaccgtaccagcatcaaaggcccgtgtcaatcatgtcgctgctgcagaagctcaagatgctccagatgtgattttgggtacgttccttgttaacttagttcctgcaacagtgcttttcgattctggtgctacacattcattcttatctatgagttttgcgggaaatcatgggatggaagtagaagatcttagacgtcctttgatggttagtaccccaagtaatcaagcactctctttgcaacgtagcccctctgtcaaaatagaaattaaaggagtaccatttctggccaatcttatcttgttagaatccaaagaccttgatgtcatcctagggatggactggttagccagacataaaggtgtgatagactgtgctaacagaaaagtaactctcactagcaatgatggtcgagttgtaactgttcatgcaatgtcttctgagtcgttaaggtcaagactgaaacagataactttggaagagattcctatagtccgggagtatcccgatgtgttccccgatgatttgcctggtatgccgcctaaaagggatatagagttcagaatagatttggtaccaggaacaactccgatccataagagaccttatagaatggcagccaatgagttggcagaagtcaagaggcaagtggacgatttgcttcagaaagggtacatcagaccgagttcatctccatggggagctccggttatttttgtggaaaagaaagatcatacccagaggatgtgtgtggactatcgtgcactaaatgatgtgactatcaagaataagtatccgctacccagaattgatgatttgtttgatcagcttaaaggtgccactgttttctccaagatagatcttcgatcagggtatcaccagttgagaatcaaagaggaagatatacctaagacagcttttaccactaggtatggattgttcgaatgtactgttatgtcttttggacttaccaatgcccctgctttcttcatgaatttgatgaataaagtgtttatggaatacctagacaagttcgtggtagtctttattgatgatattcttatctactcccgaaccaaagaagagcatgaagaacatcttcgccttgcactagagaagctacgagaacatcagttgtatgccaagtttagcaagtgtgaattttggttgtctgaagtgaagttccttggtcacgtcatctcagcagaaggagttgccgtcgatcctagtaatgtggaatccgtaaccaactggaaacaaccaaagacagttccagagattcgcagtttcctaggcctcgcaggatattaccggaggtttatagagaatttttccaagattgctaagcccatgacacgactgcttcagaaagatgtgaagtacaagtggtcggaagaatgtgagcagagttttcaagagttgaagaatcgcttgatatcagctcctattttgattttacctgatcaaaagaagggtttccaagtgtattgcgatgcatctaaacttgggttaggttgtgttctgatgcaagatgggaaggtggttgcctatgcatctcgtcagttacgtccgcatgaaaagaactaccctactcatgatcttgagttagctgcagtagttcatgcgttgaaaatttggcgtcattatcttttcggtactcgtacagaggtatataccgatcacaagagtttaaagtatatctttactcagccggatctgaacatgagacaaaggagatggttggaattaattaaggattatgacatgggaattcattatcacccgagaaaggctaatgttgtagcagacgctcttagcaggaaaggctattgcaatgctacggaaggacgacagttgccattggaattatgcaaggaatttgaaagattaaatttgggaattgtcagtagaggttttgttgcagccttagaagcgaagcccactctaattgatcaagttagagaagcccaaattaatgatcccgatattcaagagatcaagaagaatatgagaagaggaaaagctatcggtttcttggaggatgagcacggagctgtatggttgggtgagagaatctgcgtccccgacaacaaagatttaaaagatgcaattctgaaagaagctcacgatactttatactctattcaccctggtagtactaagatgtaccaggatctcaaggaaagattttggtgggcaagtatgaagcgtgaaatcgcagaatacgtagcagtatgtgatgtttgtcagcgagtcaaggcagaacatcagaaacctgccggtttgttgcagcctttgaagattcccgaatggaaatgggaagaaatcggtatggattttattactggtttacccagaacgtcatcgggtcatgactctatttgggtgatagtcgacagacttacaaaagtagctcatttcattccggtaaagacaacttattccggaagtcggttggcggaattgtatatggcaaggatcgtgtgtttgcatggcgtccctaagaaaatagtgtctgatcgaggcagtcaatttacttcaaatttttggaagaagcttcaggaagagatgggttctaagctgaactttagtactgcttatcatccgcagacagacggacaaaccgaaagggtgaatcaggttttggaagacatgttgagagcttgtgctttagacttcggtggaagttgggataagaatctaccttatgcagaattttcgtacaacaacagttatcaagctagtctacagatggaaatcgttggatttgagttcgaatcggattcgtctctctcctccgaaccctaa

SEQ ID NO: 15134 - DNA, 5469 bp, Oryza sativa
  Clone ID: TFbOSC400610j.C1.o8.fg
atgacctcagtgatgacggtgggggcgggcggcggcggcgagctcaggcgcgacggatctggtggcggcacggtggatccggctcaggcgtggcagatccggcagcggcgcgatggatccgacgcggtggcgagtggcagcggcgagctcgggcgctggcggattccgtcgtttccggagagtccgttttcgcagaagaagagtttgaagagttccaaggccagcaaggcaactcctggtttggaatggtatattcctggtttggagatagaactgtgcagccggggtggttgttcagaatggttgggcctatacaacaggatgccgcgttacaagcctgagtacctgtttggtgttgagggttttgtccaggagttgcgtacgatgtcctttgtcattggatttgggactgcccctttttatgcccagattcctcatgatcgtcatgaagagaagtgccgagtcaaagtcaccttgaacagtaatagtgaagatatcccctcagtgatgtttgaagctggaggaagaaactacatccatgcatgtcaggaggcggcaaggatcgccataggagagctccgtgatcgctacagtgatcagttggccgacactgagtatcgctaccatcctcgccaaccccagggaagtgaccgtgacagttaccttgagactgaaggaattgagaatgatgctaccacgaagcatttggttgagatgttgtgggctatggatgaaagtcgtgcggagactgtgttagccgctcaagatcgtgaagaccggaatcgcggtaagatttgcaagttagaagacaaggtggatcgtttggagaaggaattagccgcattgaagggagaagcaccgccgcagaaggccaggattcgtcttaccgcaaggaagagagctctatttgtccctcgctatcaactggcgccaaaggttcatgtgatggagaaagaagttgccccagctcaagcggatcctccggtcatcatcataagtagtgatgaagaagaagaatccaagcgcaacaattccaagattgagtggatggtgaacactcgcagcaatgggaatggtcccaacaaccccaataacaacaacaatggagagaatcccactcttgctcaagttcttgctcaacagacacagcttatgaacatgatgatgcagcaatttcagaatcagcaaaaccaaggaaataatcatgcacctccacagaacaagttagcagaatttcttcgtgtgaggccgcctgttttctctagtaccactaatcctgttgaagctagtgattggctgcatgccatagagaagaagttggatttacttcagtgtactgatcaggacaaggtctcatttgcatcacatcagttgcatggccctgcctctgaatggtgggatcacttccgccttaacaggactactgctgaacctatcacttggcttgaattcaccgctgctttccggaagacgcatataccatcaggagtagtgtctctcaagaagaaggagttcaggtcgcttacccagggatctcgctctgttacggagtatctgcacgagttcaatcgtcttgctcgttatgctccggaagatgtgcgcaatgatgaagagcgccaggagaagtttttgggaggacttaatgatgagctttcttacccactcatggttggagattatcctgatttccagaaattagtggataaggctgttcgtcaggaggacaagtacaatcgcatggagcagaagaaacgccggattgctcaattcaagacacaacaggggaataatcagaagccgcgtcttactttaggaccccagtctgtgccacagggaggttcttcgtctgttgttcgtccgcagcgtcagttcttcaacaacaatgctggcaacaacatccgtaatcaagctccacgtcctgttgcagttccagcacagcaacaacctgccaagagggagcaaggcaacaagcccgtggtgtgtttcaactgtggagatccaggacattatgctgacaagtgtccgaagccccgacgcgtgaaggttgtccctgcccagaataactctgctgtaccagcatccaaggctcgtgtaaatcatgtcgctgctgcagaagctcaaggtgctccagatgtgattttgggtacgttccttgttaactcagttcctgcaacagtacttttcgattctggtgctacacattcattcctatctatgagttttgcgggaaatcatgggatggaagtagaagatcttagacgtcctttgatggttagtaccccaagtaatcaagcactctctttgcaacgtagcccctctgtcagaatagaaattcaaggagtaccatttctggccaatcttatcttgttagaatccaaagaccttgatgtcatcctagggatggactggttagccagacataaaggtgtgatagactgtgccaacaaaaaagtaactctcaccagctatgatggtcgagttgtaactgttcatgcattgtcatctgagtctttaaggtcaagactgaaccagataactttggaagagattcctatagtccgggagtatcctgatgtgttcccagatgatttacctggtatgccgcctaaaagggatatagagttcagaatagatttggtacctggaacaactccgatccataagagaccttatcgaatggcagccaatgagttggcagaagttaagaggcaagtagatgatttgctacagaaaggatacatcagaccgagttcatcaccatggggagctccggttatttttgtggaaaagaaagaccatactcagagaatgtgtgtggactatcgtgcactaaacgatgtgactatcaagaataagtatccactacccaggattgatgatttgtttgatcagcttaaaggtgccactgttttctccaagatagatcttcgatcagggtatcatcagttgagaatcaaagaggaagatatacctaagacatcttttaccactaggtatgggttgttcgaatgtactgttatgtcttttggacttaccaatgcccctgctttcttcatgaacttgatgaataaggtgtttatggaatacctagacaagttcgtggtggtctttattgatgatattcttatctactctcgaaccaaagaagagcatgaggaacatcttcgccttgcattggagaagctacgagaacatcaactgtatgctaagtttagcaagtgtgaattttggttgtctgaagtgaaattccttggtcacgtcatctcagccggaggagttgccgtcgatcctagtaacgtggaatccgtaaccaattggaagcaaccaaagacagtttcagaaattcgcagtttcctaggcctcgcaggatattatcggaggtttatagagaatttttccaagattgctaagcccatgacacgactgcttcagaaagatgtgaagtacaagtggtcggaagaatgtgagcagagttttcaagagttgaaaagtcgcttaatatcagctcctattttgattttgcctgatccaaagaagggttttcaagtgtattgcgatgcatccaaacttgggttaggttgtgttctgatgcaagatgggaaggtggttgcctatgcctctcgacagttacgtccacatgagaagaactaccctactcatgatattgagttagctgcagtcgttcatgcattgaagatttggcgtcattatcttttcggtactcgtacagaagtgtacaccgatcacaagagtttaaagtatatctttactcagccggatctgaacatgagacaacggagatggttggaattaattaaggattatgacatgggaattcattatcatccgggaaaggctaatgttgtagtagacgctcttagcggaaaaggctattgcaatgctacagaaggacgacagttgccattggaattatgcaaggaatttgaaagattaaatttgggaattgtcggtagaggtttcgttgcagccttagaagcgaagcccactctaattgatcaagttagagaagcccaaattaatgatcctgatattcaagagatcaagaagaatatgagaagaggaaaagctattggtttcttggaggatgagcaaggaactgtatggttgggtgagagaatctgtgtccccgacaacaaagatctaaaagatgcagttctgaaagaagctcatgatactttatactccattcaccctggtagtactaagatgtaccaggatctcaaggaaagattttggtgggcaagtatgaagcgtgaaatcgtagaatatgtagcagtatgtgatgtttgtcagcgagtcaaggcagaacatcagaaacccgccggtttgttgcagcctttgaagattcctgaatggaaatgggaagaaataggtatggattttattactggtttacccagaacgtcatcaggccatgattctatttgggtgatagtcgacagacttaccaaagtggctcattttattccggtaaagacaacctattccggaagtcgtttggcggaattgtatatggcaaggattgtgtgtttgcatggcgtccctaagaagatagtgtctgatcgaggcagtcagtttacttcaaatttttggaagaaacttcaggaagagatgggttctaagctgaactttagtactgcttatcatccacagacagacggacaaaccgaaagggtgaatcagattttggaagacatgttgagagcttgtgctttagatttcggtggaagttgggataagaatctaccttatgcagaattttcatacaacaacagttatcaagctagtttacagatggctccttacgaagcactgtatggtcggaagtgccgcactccgcttttgtgggatcaaacgggagaacgtcaggttttcgggacggatatcctaagggaagcagaagaaaaggtaaaggtcattcaagaaagattgcgagtggctcagtctcgacataagagttatgccgacaatcgccgtagagatttgagttttgaagaaggagactatgtgtatcttcgtgtcacgcctcttcgaggagttcatcgttttcacaccaagggaaaattggcaccgcgttttgtgggaccttataagattgtcagtagaagaggagaggttgcttatcagttagaattacctcaatctttggcaggagtccataatgtgttccatgtgtcacaattgaaaaaatgtttaagggtacctaccgaagaagctaatattgagcagatagaagtccaagaggatttgacttctgttgagaaaccaatccgtatcctggaaacaaatgagagaagaaccaggaatcgagttatccgtttctgcaaagttcaatggagtaatcactcggaagaagaatcaacttgggaacgagaagatgaattgaagtcagctcatccgcacctgttcgccagttcttccaaatctcgaggacgagattctgtttaa

SEQ ID NO: 15135 - DNA, 5170 bp, Oryza sativa
  unsure (1)..(5170): unsure at all n locations
  Clone ID: TFbOSC400652j.C1.o1.np
atgtctttcgtgattagtctcacacttctcaccataataaatgatctgtacagccgggtatggttgttcagaatggttgggcctatacaacaggatgccgcgctacaagcctgagtacttgtttggtgttgagggatttgtccaggagttgcgtacgatgtcctttgccataggatttgggactgctcctttttatgctcagattcctcatgatcgtcatgaagagaagtgccgagtcaaagtcaccttgaacagtaatagtgaagatgtcccctcagtgatgttcgaagctagaggaagaaactacaccatgcatgtcaggaggtggcaaggatcgccataggagagctccgcgatcgctatagtgatcagttggccgacactgagtatcgctaccatcctcgccaaccccagggaagtgaccgtggcagctacctagagactgaaggaattgagaatgatgctaccacaaggcatttggttgagatgctgtgggctgtggatgaaacccgtgcggagactgtattagcagctcaagatcgtgaagaccggaatcgtggaaagatttgcaagctagaggacaaggtggatcgtttggagaaggaattagccgcattgaagggagaagcaccaccgcagaaggccaggattcgtcttaccgcaaggaagagagctctttttgtccctcgctaccaattggcgccaaagttttccccggtttctcttcttgtgtcctgcccatgccagatggtgctcactcacagcaatgggaatggcccccaacaacaataacaacaacaacaacaatggagagaatcccacacttgcccaagtcctggctcaacagacacaacttatgaacatgatgatgcagcaactccagaaccagcagaaccaggggaataaccatgcacctccccagaacaagttagcagaatttcttcgtgtgaggccgcctattttctctagtaccactaatcctgttgaagctggtgattggctgcatgccatagagaagaagttggatttgcttcagtgcaccgatcaggagaaggtctcatttgcatcacaccagttgcatggccctgcctctgaatggtgggatcactttcgccttaacaggactattgctgaacctatcacttggcttgaattcaccgctgctttccggaagacgcatatagcatcgggagttgtgtctctcaagaagaaggaattcaggtcgctcactcaggggtctcgctctgttacggagtatctgcacgagttcaatcgtctggctcgttatgctccggaagatgtgcgcaatgatgaagagcgctaggagaagttcttggaaggacttaatgatgagctttcttactcactcatgactggggattatcttgatttccagaagttagtggataaggctattcgtcaggaggacaagtacaatcgcatggaacagaagaaacgccggattgctcaattcaagacacaacaggggaataatcaaagaccgggttttactttaggacccccatccatgccacaaggaggttttttgtctgttgtttgtccgcagggtcagtttttcaacaacaatgctggcaacaacatccggtaatcaagctccacgccctgttgcagcttcgacacagcaacaacctgccaagaaggagcaaggcagcaagcccgtggtgtgtttcaactgtggagacccaggacattacgctgacaagtgtccgaagccccgacgcgtgaaggttgtccctgcccagagcaactctaccgcaccagcgccaaaggcccgtgtcaatcatgttgctgctgcagaagctcaaggtgctccagatgtgattttgggtacgttccttgttaacttagttcctgcaacagtgcttttcgattctggtgctacacattcattcttatctatgagttttgcgggaaatcatgggatggaagtagaagatcttagacgtcctttgatggttagtacccaagtaatcaagcactctctttgcaacgtagcccctctgtcagaatagaaattaaaggagtaccatttctggccaatcttatcctgttagaatccaaagaccttgatgtcatcctaaggatggactggttagccagacataaaggtgtgatagactgtgccaatagaaaagtaactctcaccagcaatgatggtcgagttgtaactgttcatgcattgtcttctgagtttttaaggtcgagactgaaccaaatanctttggaagagattcctatagtccgggagtatcccgatgtgttcccagatgatttacctggtatgccgcctaaaagggatatagagttcagaatagatttggtaaccaggaacaactccgatccataagagaccttatagaatggcagccaatgagttggcagaagtcaagaggcaagtagacgatttgcttcagaaaggatacatcagaccgagttcatctccatggggagctccagttatttttgtggaaaagaaagatcatacccagaggatgtgtgtggactatcgtgcactaaatgatgtgactatcaagaataagtatccgttgcccagaattgatgatttgtttgatcagcttaaaggtgccaccgttttctccaagatagatcttcgatcaggatatcaccagttgagaatcaaagaggaagatatacctaagacagcttttaccactaggtatgggttgttcgaatgtactgttatgtcttttggactcaccaatgcccctgctttcttcatgaacttgatgaataaggtgtttatggaatacctagacaagttcgtggtggtctttattgatgatattcttatctactcccgaaccaaagaagagcatgaagaacatcttcgccttgcactagagaagctacgaggacatcaactgtatgctaagtttagcaagtgtgaattttggttgtctgaagtgaagtttcttggtcacgtcatctcagccggaggagttgccgttgatcccagtaatgtggaatccgtaaccaactggaaacaaccaaagacagtttcagagatccgcagtttcctaggcctcacaggttattatcggaggtttatagagaatttttccaagattgctaagcccatgacacggttgcttcagaaagatgtgaagtacaagtggtcagaagaatgtgagcagagttttcaagagttgaagaatcgcttgatatcagctcctattttgattttacctgatccaaagaagggtttctaagtgtactgcgatgcatccaaacttgggttaggttgtgttctgatgcaagatgggaaggtggttgcctatgcatctcgtcagttacgtccgcatgagaagaactaccctactcatgatcttgagttagctgcagtggttcatgcgttgaagatttggcgtcattatcttttcggtactcgtacagaggtatataccgatcacaagagtttaaagtatatctttactcagccggatctgaacatgagacaacggagatggttggaattaattaaggattatgacatgggaattcattatcatccgggaaaggctaatgttgtagcagacgctcttagtaggaaaggctattgcaaagctacggaaggatgacagttgccattggaattatgccaggaagttgaaagattgaatttgggaattgtccgaaggggtttcgttgcagccttagaagcgaagcccactctaattgatcaagttagagaagcccaaattaatgatcctgatattcaagaaatcaagaagaatatgagaggaggaaaagctattggtttcttggaagatgagcaaggaactgtatggttgggtgagagaatctgcgtccccgacaacaaagatttaaaagatgcaattctgaaagaagctcatgatactttatactccattcaccctggtagtaccaaaatgtaccaggatctcaaggaaagattttggtgggcaagtatgaagcgtgaaatcgcagaatacgtagcagtatgtgatgtttgtcagcgagtcaaggcagaacatcagaaacccgccggtttgttgcagcctttgaagattcctgaatggaaatgggaagaaatcggtatggattttatcactggtttacccagaacgtcaacaggccatgactctatttgggtgatagtcgacagatttatcaaagtggctcatttcattccagtaaagacaacctattccggaagtcagttagcggaattgtatatggcaaggattgtgtgtttgcatggcgtccctaagaaaatagtgtctgatcgaggcagtcagtttacttcaaatttttggaagaagcttcaggaagagatgggttctaagctgaactttagtactgcttatcatccggagacagacggacaaaccgaaagggtgaatcagattttggaagacatgttaagagcttgtgctttagacttcggtggaagttgggataagaatctaccttatgcagaatttttgtacaacaacagttatcaagctagtcttcagatggctccttacgaagcactgtatggtcggaagtgccgcactccgcttttgtgggatcaaacgggagaacgtcaggttttcgggatggatatcctaagggaagcagaagaaaaggtaaagatcattcaagaaggattgcgagtggctcagtctcgtcataagagttatgccgacaatcgccgcagagatttgagttttgaagaaggagattatgtgtatcttcgtgtcacgcctcttcgaggagttcatcgtttccacaccaaaggaaattggcaccgcgttttgtgggaccttataagattgtcagtagaagcggagaggttgcttatcagttggagttacctcaatctttggcaggagtccataatgtgttccatgtgtcgcaattgaaaaagtgtttaagggtacctaccgaagaagctaatcttgaacagatagaagtccaagaggatctgacctatgttgagaaaccaatccgtatcttggaaatagatgagagaagaaccagaaatcgagttatccgcttttgcaaagtccaatggagtaatcactcggaagaagaatcaacttgggaacgagaagatgaattgaagtcagctcatccgcatttgttcgccagttcttccgaatctcgaggacgagattctgtt

SEQ ID NO: 15136 - DNA, 5205 bp, Oryza sativa
  Clone ID: TFbOSC400655j.C1.o23.np
cccttctctctctcctcggcccagattccgtcgtttccggagagtccgttttcgccggagaagagtttgaagagttccaaggccagcaaggcaactcctggtttggaatggtacattcctggtttggagatagaactgtgcagccgggatggttgtttagaatggttgggcctatacaacaggatgccgcgctacaagcctgagtacctgtttggtgttgagggttttgtccaggagttgcgtacgatgtcctttgtcattggatttgggactgcccctttttatgcccagattcctcatgatcgtcatgaagagaagtgccgagtcaaagtcaccttgaacagtaatagtgaagatatcccctcagtgatgttcgaagctgtaggaagaaactacatccatgcatgtcaggaggtggcaaggatcgccataggagagctacagtgatcagttggccgacacggagtatcgctaccatcctcgtcaaccacagggaagtgaccgtggcgttaccttgagactgaaggaattgagaatgatgctaccacaaggcatttggtcgagatgctgtgggctatggatgaaagtcgtgcggagactgtgttagcagctcaagatcgtgaagaccggaatcgtggtaagatttgcaagctagaagacaaggtggattgtttggagaaggaactagccgcattaaagggagaagcaccgccgcagaaggccaggattcgtctcaccgcaaggaagagagctctatttgtccctcgctatcaattggcgccaaagatggtgaacactcgcagcaacgggaatggccccaacaaccccaataacaacaacaatggagagaatcccactcttgctcaagttcttgctcaacagactcagttaatgaacatgatgatgcagcaacttcagaatcagcagaaccagggaaataaccatgcacctccccagaacaagttagcagaatttcttcgtgtgaggccgcctattttctctagtaccactaatcttgttgaagctggtgattggttgcatgccatagagaagaagttggatttgcttcagtgcactgatcaggagaaggtctcatttgcatcacatcagttgcatggccctgcctctgaatggtgggatcacttccgtctgaacaggactactgctgaacctatcacttggcttgaattcactgctgctttccggaagacgcatataccatcgggagtggtgtctctcaagaagaaggaattcaggtcgctcactcagggatctcgctctgttacggagtatttgcacgagttcaatcgtctggctcgttatgctccggaagatgtgcgcaatgatgaagagcgccaggagaagttcttggaaggacttaatgatgagctttcttacccactcatgactggagattattctgatttccagaagttagtggataaggctattcgtcaggaagacaagtacaaccgcatggagcagaagaaacgccggattgctcaattcaagacacaacaggggaataatcagaagccgcgtcttactttaggaccccagtccgtgccacagggaggttcttcgtctgttgttcgtccgcagcgtcagttcttcaacaacaatgctggcaacaacatccgcaatcaagctccacgtcctgttgcagctccaacacagcaacaacctgccaagagggagcaaggcagcaagcccgtggtgtgtttcaactgtggagacccaggacattatgctgacaagtgtccgaagccccgacgcgtgaaggttgtccctgctcagagcaactctactgtaccagcatcaaaggcccgtgttaatcatgttgctgctgcagaagctcaagatgctccagatgtgattttgggtacgtttcttgttaactccgttcctgcaacagtgcttttcgattctggtgctacacattcattcttatctatgagttttgtgggaaatcatgggatggaagtagaagatcttagacgtcctttgatggttagtaccccaagtaatcaagcactctctttgcaacgtagcccctcggtcagaatagaaattcaaggaataccatttctggccaatcttatcttgttagaatccaaagaccttgatgtcatcctagggatggactggttagccagacataaaggtgtgatagactgtgctaacagaaaagtaactctcaccagcaatgatggtcaagttgtaactgttcatgcattgtcttctgagtttttaaggtcaagactgaaccaaataactttggaagagattcctatagtccgggagtatcccgatgtgttcccagatgatttacctggtatgccacctaaaagggatatagagttcagaatagatttggtaccaggaacaactctgatccataagagaccttatagaatggcagccaatgagttggcagaagtcaagaggcaagtagatgatttgcttcagaaaggatacatcagaccaagttcatcaccatggggagctccggttatttttgtggaaaagaaagaccatacccagagaatgtgtgtggactatcgtgcactaaatgatgtgactatcaagaataagtatccactacccagaattgatgatttgtttgatcagcttaaaggtgctactattttctccaagatagatcttcgatcagggtatcaccagttaagaatcaaagaggaagatatacctaagacagcttttaccactaggtatggattgttcgaatgtactgttatgtcttttggacttaccaatgcccccgctttcttcatgaacttgatgaataaggtgtttatggaatacctagacaagttcgtggtggtctttattgatgacattcttatctactcccgaaccaaagaagagcatgaagaacatcttcgccttgcactagagaagctacgagaacatcaactgtatgctaagtttagcaagtgtgaattttggttgtctgaagtgaagttccttggtcacgtcatctcagccgggggagttgccgttgatcccagtaatgtggaatccataaccaactggaaacaaccgaagacagtttcagagatccgcagtttcctaggcctcgcagggtattatcggaggtttatagagaatttttccaagattgctaagcccatgacacgactgcttcagaaagatgtaaagtacaagtggtcagaagaatgtgagcagagttttcaagagttgaagaatcgcttgatatcagctcctattttgattttgcctgatccaaagaagggtttccaagtgtattgcgatgcatccaaacttgggttaggttgtgttctgatgcaagatgggaaggtggttgcctatgcatctcgtcagttacgtccgcatgagaagaactaccctactcatgatcttgagttagctgcagtagttcatgcattgaaaatttggcgtcattatcttttcggtactcgtacagaggtatataccgatcacaagagtttaaagtatatctttactcagccggatctgaacatgagacaaaggagatggttggaattaattaaggactatgacatgagaattcattatcacccgggaaaggctaatgttgtagcagatgctcttagcagaaaaggcaattgcaatgctacggaaggacgacagttgccattggaattatgcaaggaatttgaaagattaaatttgggaattgtcagtagaggtttcgttacagccttagaagcgaagcccactctaattgatcaagttagaaaagcccaaattaatgatcctgatattcaagagatcaagaagaatatgagaagaggaaaagctatcggtttcttggaggatgagcacggaactgtatggttgggtgagaaaatctgtgtccccgacaacaaagatttaaaagatgcaattctgaaagaagctcatgatactttatactccattcaccctggtagtactaagatgtaccaggatctcaaggaaagattttggtgggcaagtatgaagcgtgaaatcgcagaatacgtagcagtatgtgatgtttgtcagcgagtcaaggcagaacatcagaaacctgccggtttgctgcagcctttgaagattcctgaatggaagtgggaagaaatcggtatggattttatcactggtttacccagaacgtcatcgggtcatgactctatttgggtgatagtcgacagacttaccaaagtggctcatttcattccggtaaagacaacttattccggaagtcgcttagcggaattgtatatggcaaggattgtgtgtttgcatggcgtccctaagaaaatagtgtctgatcgaggcagtcagtttacttcaaatttttggaagaaacttcaggaagagatgggttctaaattgaactttagtactgcttatcatccgcagacagacggacagaccgaaagggtgaatcagattttgaaagacatgttgagagcttgtgctttagacttcggtggaagttgggataagaatctaccttatgcagaattctcgtataacaacagttatcaagctagtctacagatggctccttacgaagcactgtatggtcgaaagtgccgcactccgcttttgtgggatcaaacgggagaatgtcaggttttcgggacggatatcctaagggaagcagaagaaaaggtgaaaatcatccaagaaagattgcgtgtggctcagtctcgacataagagttatgccgacaatcgccgcagagatttgagttttgaagaaggagattatgtgtatcttcgtgtcacgcctcttcgaggagttcatcgtttccacaccaaaggaaaattggcaccgcgttttgtgggaccttataagattgtcagtagaagaggagaggttgcttatcagttggagttacctcaatctttggcaggagtccataatgtgttccatgtttcgcaattgaaaaagtgtttaagggtacctaccgaagaagctaatcttgaacagatagaggtccaagaggatctgacctatgttgagaaaccaatccgtatcttggaaatagatgagagaagaaccagaaatcgagttatccgtttttgcaaagtccaatggagcaatcactcggaagaagaatcaacttgggaacgagaagatgaattgaagtcagctcatccgcatctgttcgccagttcttccgaatctcgaggatgagattctgtt

SEQ ID NO: 15137 - DNA, 5208 bp, Oryza sativa
  Clone ID: TFbOSC400676j.C1.o13.fg
atgcgccgcccgagccgtccgctccgccgagccgccgccgctgtcggtgacgtcattgccgacgtcatcggggtcgtccgccctcctggtttggaatggtacattcctggtttggagatagaactgtgcagccgggatggttgttcagaatggttgggcctatacaacaggatgccgcgctacaagcctgagtacctgtttggtgttgagggttttgtccaggagttgcgtacgatgtcctttgccattggatttgggactgcccctttttatgcccagattcctcatgatcgtcatgaagagaagtgccgagtcaaagtcaccttaaacagcaatagtgaagaggtcccctcagtgatgttcgaagctggaggaagaaactacgtccatgcatgtcaggaagtggcaaggatcgccataggagaactccgtgatagctacagtgatcagttggccgacactgagtatcgctaccatcctcgtcaaccccagggaagtgaccgtggcagctaccttgagactgaaggaattgagaatgatgctaccacaaggcatttggttgagatgctgtgggctatggatgaaagtcgtgcggagactgtgttagcagctcaagatcgtgaagaccggaatcgtggtaagatttgcaagctagaagacaaggtggatcgtttggagaaggagctagccgcattgaagggagaagcaccaccgcagaaggccaggattcgtcttaccgcaaggaagagagctctattcgtccctcgctatcaattggcgccaaagatggtgaatactcgcagcaacgggaatggtcccaacaaccccaataacaataacaatggagagaacccaactctggcccaagttcttgctcaacagacacagcttatgaacatgatgatgcagcaacttcagaatcagcagaaccaaggaaataaccatgcacctccccagaacaagttagcagaatttcttcgtgtgaggccgcctattttctctagtaccactaatcctgttgaagctggtgattggctgcatgccatagagaagaagttggatttacttcagtgcactgatcaggagaaggtatcttttgcatcacatcagttgcatggctctgcctctgaatggtgggatcacttccgcctgaataggactactgctgaacctatcacttggcttgaattcactgctgctttccggaagacgcatataccatcaagagtagtgtctctcaagaagaaggagttcaggtcgcttactcagggatctcgctctgttacggagtatctgcacgagttcaatcgtcttgctcgttatgctccggaagatgtgcgcaatgatgaagagcgccaggagaagtttttgggaggacttaatgacgagctttcttacccactcatggttggagattatcctgatttccagaaattagtggataaggctatacgtcaggaggacaagtacaattgcatggagcagaggaaacgtcggattgctcacttcaaggcacaacaggggagtaatcagaagccgcgctttactttaggaccccagtctatgccacagggaggttcttcgtctgttgttcgtccgcagcgtcagttcttcaacaacaatgctggcaacaacatccgcaatcaagctccacgtcctgttgcagctccaacacagcaacagcctgccaagagggagcaaggcagcaagcccgtggtgtgtttcaactgtggagacccaggacattatgctgacaagtgtccgaagccccgtcgcgtgaaggttgtccctgcccagagtaactctgctgtaccagcatcaaaggcccgtgtcaatcatgtcgctgctgcagaagctcaagatgctccagatgtgattttgggtacgttccctgttaactcagttcctgcaacagtacttttcgattcaggtgctacacattcattcttatctatgagttttgcgggaaatcatgggatggaagtagaagatcttagacatcctttgatggttagtaccccaagtaatcaagcactctctttgcagcgtagcccctcggtcagaatagaaattaaaggagtaccatttgtggccaatcttatcttgttagaatccaaagaccttgatgtcatcctagggatggactggttagccagacatagaggtgtgatagactgtgccaacagaaaagtaactctcaccagtaatgatggtcgagtggtaactgttcatgcattgtcttctgagtctttaaggtcaagactgaatcaaataactttggaagagattcctatagtccgggagtatcccgatgtgttcccagatgatttacctggaatgccgcccaaaagggatatagagttcagaatagatctggtaccaggaacaactccaatccataagagaccttatcgaatggcagccaatgagttggcagaagtcaagaggcaagtggacgatttgcttcagaaaggatacatcagaccgagttcatcaccatggggagctccggttatttttgtggaaaagaaagatcatacccagaggatgtgtgtggactatcgtgcattaaatgatgtgactatcaagaataagtacccgttacccagaattgatgatttgtttgatcagcttaaaggtgctaccgttttctccaagatagatcttcgatcagggtatcaccagttgagaatcaaagaggaagatatacctaagacagcttttaccactaggtatggattgttcgaatgtacggttatgtcttttggacttaccaatgcccccgctttcttcatgaacttgatgaataaggtgtttatggaatacctagacaagttcgtggtggtctttattgatgacattcttatctactctcgaaccaaagaagaacatgaagaacatcttcgccttgcattggagaagctacgagagcatcaactgtatgctaagttcagcaagtgtgaattttggttgtctgaagtgaagttccttggtcacgtcatctcagcaggaggagttgccgttgatcctagtaatgtggaatccgtaaccaactggaaacaaccgaagacagtttcagagattcgcagtttcctaggcctcgcaggatattaccggaggtttatagagaatttttccaagattgctaagcccatgacacgactgcttcagaaagatgtgaagtacaagtggtcggaagaatgtgagcagagttttcaagagttgaaaagtcgcttaatatcagctcctattttgattttacctgatccaaagaagggtttccaagtgtattgcgatgcatccaaacttgggttaggttgtgttttgatgcaagatgggaaggtggttgcctatgcatctcgtcagttacgtccgcatgagaagaactaccctactcatgatcttgagttagccgcagtagttcatgcgttgaagatttggtgtcattatcttttcggtactcgtacagaggtatataccgatcacaagagtttaaagtatatctttactcagccggatctgaacatgagacaaaggagatggttggaattaattaaggattatgacatgggaattcattatcacccgggaaaggctaatgttgtagcagacgctcttagcaggaaaggctattgcaatgctaccgaaggacgacagttgccattggagttatgcaaggaatttgaaagattaaatttgggaattgtcagtagaggtttcgttgcagccttagaagcgaagcccactctaattgatcaagttagagaagcccaaattaatgatcctgatattcaagaaatcaagaagaatatgagaagaggaaaagctatcggtttcttggaggatgagcaaggaactgtatggttgggtgaaagaatctgcgtccccgacaacaaagatttaaaagatgcaattctgaaagaagctcatgatactttatactccattcaccctggtagtactaaggtgtaccaggatctcaaggaaagattttggtgggcaagtatgaagcgtgaaatcgcagaatacgtagcagtatgtgatgtttgtcagcgagtcaaggcagaacatcagaaacctgccggtttgctgcagcctttgaagattcctgaatggaagtgggaagaaatcggtatggattttatcactggtttacccagaacgtcatcaggccatgactctatttgggtaatagtcgacagacttaccaaagtggctcatttcattccggtaaagacaacttattctggaagtcgattggcggaattgtatatggcaaggattgtgtgtttgcatggcgtccctaagaagatagtgtctgatcgaggcagtcagtttacttcaaacttttggaagaagcttcaggaagagatggtttctaagctgaattttagtactgcttatcatccgcagacagacggacaaaccgaaagggtaaatcagattttggaagacatgttgagagcttgtgctctagatttcggtggaagttgggataagaatctaccctatgcagaattttcgtacaacaacagttatcaagctagtcttcagatggctccttacgaagcactgtatggtcggaagtgccgcactccgcttttgtgggatcaaacgggagaacgtcaggttttcgggacagatatcctaagggaagcagaagaaaaggtgaaaataattcaggaaagattgcgagtggctcaatctcgtcataagagttatgccgacaatcgccgtagagatttgagttttgaagaaggagattatgtgtatcttcgtgtcacgccttttcgaggagttcatcgttttcataccaaaggaaaattggcaccgcgttttgtgggaccctataagattgtcagtagaagaggagaggttgcttatcagttggagttacctcaatctttggcaggagtccataatgtgttccatgtgtcgcaattgaaaaagtgtttaagggtacctaccgaagaagctaatcttgaacagatagaagtccaagaggatttgacctatgttgagaaaccaatccgtatcttggcaacaagtgagagaagaaccagaaatcgagttatccgtttttgcaaagtccagtggagtaatcactcggaagaagaatcaacttgggaacgagaagatgaattgaagtcagctcatccgcatctgttcgccagttcttctgaatctcgaggacgagattctgtttag

SEQ ID NO: 15138 - DNA, 4728 bp, Oryza sativa
  Clone ID: TFbOSC400686j.C1.o2.fg
atgagggttcacacacatatgccgcgctacaagcctgagtacttgtttggtgttgagggatttgtccaggagttgcgtacgatgtcctttgccataggatttgggactgcccctttttatgcccagattcctcatgatcatcacgaaaagaagtgccgagtcaaagtcaccttgaacagtaatagtgaggatatcccctcagtgatgttcgaagctggaggaagaaactgcatccatgcatgtcaggaggtggcaaggatcgccataggagagcttcacgatcgctacagtgatcagttggccgacactgagtatcgctaccatcctcgtcaaccacagggaagtgaccgtggcagctaccttgagactgagggaattgagaatgatgctaccacaaggcatttggttgagatgctgtgggctatggatgaaacccgtgcggagactgtgttagcagctcaagatcgtgaagaccggaatcgtggtaagatttgcaagctagaggacaaagtggatcgtttggagaaggaactagccgcattgaagggagaagcaccaccgcagaagtccaggattcgtcttaccgcaaggaagagagctctatttgtccctcgctaccaattggcgccaaaggtccgtgtggtagaaaaagaagttaccccagccctagcagatcctccggtcgtcaacatggtgctcactcgcagcaacgggaatggccccaacaacaacaataacaacaacaacaacaatggagaaaatcccacacttgcccaagtcctgtctcaacaggcacagcttatgaacatgatgatgcagcaactccagaaccagactactgctgaacctatcacttggcttgaattcaccactgctttccggaagacgcatataccatcgggagtggtgtctctcaagaagaaggaattcaggtcgctcacccagggatctcgctctgttgccgagtatctgcacgagttcaatcgtctggctcattatgctccggaagatgtgcgcactgatgaagagcgccaggagaggttcttggaaggacttaatgatgagctttcttatccactcatgactggggattattctgatttccagaagttggtggataaggctattcgccaggaggacaagtacaaccgcatggagcaaaagaaacgccggattgctaaattcaaggcacaacaggggaatagtcaaaggccgcgtcttactttaggaccccagtctatgccacagggaggttcttcgtctgttgctcgtccgcagcgtcaattcttcaacaacaacgcggtcaacaacatccgcaatcaagctccacgtcctgttgcagcctcgacacagcaacaacctgccaagagggagcaaggcagcaagcccgtggtgtgtttcaactgtggagacccaggacattacgctgacaagtgtccgaagccccgacgcgtgaaggttgtccctgtccagagcaactctaccgtaccagcatcaaaggcccgtgtcaatcatgttgctgctgcagaagctcaagatgctccagatgtgattttgggtacgtttcttgttaacttagttcctacaacagtgcttttcgattctggtgctacacattcattcttatctatgagttttgcgggaaatcatgggatggaagtagaagatcttagacgtcctatgatggttagtactccaagtaatcaggcactctctttgcaacgtagcccctctgtcaaaatagaaattcaaggcgtaccatttctggccaatcttatcctgttagaatccaaagaccttgatgtcatcttagggatggactggttagccagatataaaggtgtgatagactgtgccaacagaaaagtaactatcaccagtaatgatggtcgagttgtaactgttcatgcattgtcttctgagtctttaaggtcaagactgaaccaaataactttggaagagattcctatagtccgggagtatcctgatgtgttcccagatgatttacctggtatgcctcctaaaagggatatagagttcagaatagatttggtaccaggaacaactccgatccataagagaccttatagaatggcagccaatgagttggcagaagtcaagaggcaagtagacgatttgcttcagaaaggatacatcagaccgagttcatctccatggggagctccggttatttttgtggaaaagaaagatcatacccagaggatgtgtgtagactatcgtgcactaaatgatgtgactatcaagaataagtatccgctgcccagaattgatgatttgtttgatcagcttaaaggtgccaccgttttctctaagatagatcttcgatcagggtatcaccagttgagaatcaaagaggaagatatacctaagacagctttaatagaagagcatgaagaacatcttcgccttgcactagagaagctacgagaacatcaactgtatgctaagtttagcaagtgtgaattttggttgtctgaagtgaagttccttggtcacgtcatctcagcaggaggagttgccgtcgatcctagtaatgtggaatccgtaaccaactggaaacaaccgaagaccgttttagagattcgcagtttcctaggcctcgcaggatattatcggaggtttatagaaaatttttccaagattgctaagcccatgacacgtctgcttcagaaacatgtgaagtacaagtggtcagaagaatgtgagcagagttttcaagagttgaagaatcgcttaataacagctcctattttgattttgcctgatctaaagaagggtttccaagtgtattgtgatgcatccaaacttgggttaggttgtgttctgatgcaagatgggaaggtggttgcctatgcatctcgtcagttacgtccgcatgaaaagaactaccctactcatgatcttgagttagctgcagtagttcatgcgttgaagatttggcgtcattatcttttcggtactcgtacagaggtgtataccgatcacaagagtttaaagtatatttttactcagccggatctgaacatgagacaacggagatggttggaattaattaaggattacgacatgggaattcattatcacccggggaaggctaatgttgtagcagacgctcttagcagaaaaggctattgcaatgctacggaaggacgacagttgccattggaattatgcaaggagtttgaaagattaaatttggaaattgttagtagaggtttcgttgcagccttagaagcgaagcccactctaattgatcaagttagagaagcccaaattaatgatcttgatattcaagaaatcaagaagaatatgagaagaggaaaggctatcggtttcttggaagatgagcaaggaactgtatggttgggcgagagaatctgtgtccccaacaacaaagatttaaaagatgcaattctgaaagaagctcatgatactttatattccattcaccctggtagtaccaagatgtaccaggatctcaaggaaagattttggtgggcaagtatgaagcgtgaaatcgcagaatacgtagcagtatgtgatgtttgtcagcgagtcaaggcagaacatcagaaacccgccggtttgctgcagcctttgaagattcctgaatggaaatgggaggaaatcggtatggatttcatcactggtctacccagaacgtcatcaggccatgactctatttgggtgatagtcgacagacttaccaaagtggctcatttcattccagtaaagacaacttattctggaagtcggttggcggaattgtatatggccaggattgtgtgtttgcatggcgtccctaagaaaatagtgtctgatcgaggtagtcagtttacttcaaatttttggaagaagcttcaggaagagatgggttctaagctgaactttagtactgcttatcatccgcaaacagacggacaaaccgaaagggtgaatcagattttggaagacatgttgagagcttgtgctttagatttcggtggaagttgggataagaatctaccttatgcagaattttcgtacaacaacagttatcaagctagtcttcagatggctccttacgaagcactgtatggtcggaagtgtcgcactccgcttttatgggatcaaacgggagaacgtcaggttttcgggacggatatcctgagggaagcagaagaaaaggtgaaaatcattcaagaaagattgcgtgtggcccaatctcatcataagagttatgccgacaatcgccgcagagatttgagttttgacgaaggagattatgtgtaccttcgtgtcacgcctcttcgaggagttcatcgttttcacaccaaaggaaaattggcaccgcgttttgtgggaccttataaggttgtcagtagaagaggagaggttgcttatcagttggagttacctcaatctttggcaggagtccataatgtgttccatgtgtcgcaattgaaaaagtgtttaagggtacctaccgaagaagctaatcttgaacagatagaagtccaagaggatctgacctatgttgagaaaccaatccgtatcttggaaacaaatgagagaagaaccagaaatcgagttatccgtttttgcaaagtccaatggagtaatcactcggaagaagaatcaacttgggaacgagaagatgaattgaagtcagctcatccgtatctgttcgccagttcttctgaatctcgaggacgagattctgtttaa

SEQ ID NO: 15139 - DNA, 2430 bp, Oryza sativa
  Clone ID: TFbOSC400718j.C1.o122.gm
atgaagatcggcatgctcggcgttggccaggacagtgccgttctcagtataaaagatgacggcgctcccaataaattgccatcaacgccgcaagccctagcttcgcagtcgccgccgccgttccagccgtgctccgccgccgttccagacgccgccgtcgctcgggaagaccgccgtcgtcatcgccgttgcgtcgccgtcctcgtccgccccttcgccgccgccgaagaccgccggagcaccctcgtcaccgtcgacccgaagagcttcgccgcttcctcctcgtcgccgtcgccgtccgttgatcttccgccgccgttttggtcaccgatgccgcgctacaagcctgagtacctgtttggtgttgagggttttgtccaggagttgcgtacgatgtcctttgccattggatttgggactgcccctttttatgcccagattcctcatgatcgtcatgaagagaagtgccgagtcaaagtcaccttaaacagcaatagtgaagaggtcccctcagtgatgttcgaagctggaggaagaaactacatccatgcatgtcaggaagtggcaaggattgccataggagagctccgtgatcgctacagtgatcagttggccgacactgagtatcgctaccatcctcgtcaaccccagggaagtgaccgtggcagctaccttgaaactgaaggaattgagaatgatgctaccacaaggcatttggttgagatgctgtgggctatggatgaaagtcgtgcggagactgtgttagcggctcaagatcgtgaagaccggaatcgtggtaagatttgcaagctagaagacaaggtggatcgtttggaaaaggaactagccgcgttgaagggagaagcaccgccgcagaaggccaggattcgtctcaccgcaaggaagagagctctattcgtccctcgctatcaattggcgccaaaggtccgtgtggtggagaaagaagttgccccagctcaagcggatcctccggtcatcatcataagtgatgaagaagaagaagaatccaagcgcaaccattccaagattgagtgggtagcaactcaagatgatgaagacgagccgaacgagccttcaatcgacctccgatgctcggaagaactagataccactaatcctgttgaagctggtgattggctgcatgccatagagaagaagttggatttacttcagtgcactgatcaggagaaggtctcatttgcatcacatcagttgcatggccctgcctctgaatggtgggatcacttccgcctgaataggattactgctgaacctatcacttggcttgaattcactgctgctttccggaagacgcatataccatcaggagtagtgtctctcaagaagaaggagttcaggtcgcttactcagggatctcgctctgttacggagtatctgcacgagttcaatcgtcttgctcgttatgctccggaagatgtgcgtaatgatgaagagcgtcaggagaagtttttgggaggacttaatgatgagctttcttacccactcatggttggagattatcctgatttccagaaattagtggataaggctatacgtcaggaggacaagtacaattgcatggagcagaggaaacgtcggattgctcacttcaaggcacaacaggggagtaatcagaagccgcgccttactttaggaccccagtctatgccacagggaggttcttcgtctgttgttcgtccgcagcgtcagttcttcaacaacaatgctggcaacaacatccgcaatcaagctccacgtcctgttgcagctccaacacagcaacaacctgccaagagggagcaaggcagtaagtccgtggtgtgtttcaactgtggagacccaggacattatgctgacaagtgtccgaagccccgtcgcgtgaaggttgtccctgctcagaataactctaccgtaccagcatcaaaagcccgtgtcaatcatgtcgctgctgcagaagctcaagatgctccagatgtgattttggtccgggagtatcccgatgtgttcccagatgatttacctggatattaccggaggtttatagagaatttttcaaagatcgctaagcccatgacacgactgcttcagaaagatgtgaagtacaagtggtcggaagaatcgccgcaagccctagcttcgcagtcgccgccgccgctccagccgtgctccgccgccgttccagacgccgccgtcgctcgggaagaccgccgtcgtgatcgccgttgcgtcgccgtcctcgtccgccccttcgccgccgccgaagaccgccggagcaccctcgtcaccgtcgacccgaagagcttcgccgcttcctcctcgtcgccgtcgccgtccgttgatcttccgccgccgttttggtcaccggtgagttcgccgcgtcgtcctctacgtgctggtgcccttcgttag

SEQ ID NO: 15140 - DNA, 5478 bp, Oryza sativa
  Clone ID: TFbOSC400719j.C1.o1.np
atgccgcgctacaagcctgagtatctttttggtgttgagggttttgtccaggagttgcgtacgatgtcctttgtcattggatttgggactgtccctttttatgcccagattcgtcatgatcgtcatgaagagaagtgccgagtcaaagtcaccttgaacagtaatagtgaagatattccctcagtgatgttcgaagctggaggaagaaactacatccatgcatgtcaggaggtggcaaggatcgccataggagagctccgtgatcgctacagtgatcagttggccgacactgagtatcgctaccatcctcgccaaccccagggaagtgaccgtggagactgaaggaattgagaatgatgctaccacaaggcatttggttgagatgctgtgggccatggatgaaagtcgtgcagagactgtgttagcagctcaagatcgtgaagatcggaatcgtggtaagatttgcaagttagaagacaaggtggatcgtttggagaaggaattagccgcattgaagggagaagcaccacctcagaaggccaggattcgtcttaccgcaaggaagagagctttatttgtccctcgctatcaattggcgccaaaggttcgtgtggtggagaaagaagttgccccagcagatcctccggtcatcatcataagtagtgatgaagaagaagaatccaagcgcaactgttccaagattgagtgggtagcaacccaagatgatgaagacgagccgaacgagccttcaatcgacctccgatgctcggaagaactagacaacgggaatggtcccaacctcaacaaccccaataacaataacaatggagagaatccaacccttgctcaagttcttgctcaacagactcagctaatgaacatgatgatgcagcaacttcagaaccagcagaaccaaggaaataaccatgcaccccctcagaataagttagcagaatttcttcgtgtaaggccgcctgttttctctagtaccactaatcctgttgaagctggtgattggttgcatgccatagagaagaagttggatttgcttcagtgcactgatcaggagaaggtctcatttgcatcacaccagttgcatggccctgcctctgaatggtgggatcacttccgcctgaataggactactgctgaacctatcacttggcttgaattcaccgctgctttccggaagacgcatataccatcgggagtggtgtctctcaagaagaaggaattcaggtcactcactcaaggatctcgctctgttacggagtatttgcacgaattcaatcgtcttgcccgttatgctccggaagatgtacgcaatgatgaagagcgtcaggagaagttcttggaaggacttaatgatgagctttcttacccactcatgactgaagattattctgatttccagaaattagtggataaggctattcatcaggaggacaagtacaatcgcatggagcagaagaaacgccggattgctcacttcaaggcacaacaggggaataatcagaagccgcgtcttactttaggaccccagtctatgccacatggaggttcttcgtctgttgttcgtccgcagcatcagttcttcaacaacaatgctggcaacaacatccgtaatcaagctccacgtcctgttgcagcttcgacacagcaacaacctgccaagagggagcaaggcagcaagcctgtggtatgtttcaactgtggagacccaggacattatgctgacaagtgtccaaagccccgacacgtgaaggttgtccctgcccagagcaactctgctgtaccagcatcaaaggcccgtgtcaatcatgttgcagctgcagaagctcaagatgctccagatgtgattttgggtacgttccttgttaactcagttcctgcaacagtgcttttcgattctggtgctacacattcattcttatctatgagttttgcgggaaatcatgggatggaagtagaagatcttagatgtcctttgatggttagtaccccaagtaatcaagcactctctttgcaacgtagcccctctgtcagaatagaaattcaaggggtaccatttctggccaatcttatattgttagaatccaaagaccttgacgtcattctagggatggactggttagccagacataaaggtgtgatagactgtgctaacagaaaagtaactctcaccagcaatgatggtcgagttgtgactgttcatgcattgtcttctgagtttttaaggtcaagactgaaccagataactttggaagagattcctatagtccgggggtatcctgatgtgttcccagatgatttacctggtatgccacctaaaagggatatagagttcagaaaagatttggtacctggaacaactccgatccataagagaccttatagaatggcagccaatgagttggcagaagttaagaggcaagtagatgatttgcttcagaaaggatacatcagaccgagttcatcaccatggggagctccggttatttttgtggaaaagaaagaccatacccagaggatgtgtgtggactatcgtgcattaaatgatgtgactatcaagaataagtacccgctacccagaattgatgatttgtttgatcagcttaaaggtgccaccgttttctccaagatagatcttcgatcagggtatcaccagttgagaatcaaagagtacgggttgttcgaatgtactgttatgtcttttggacttaccaatgcccccgctttcttcatgaacttgatgaataaggtgtttatggaatatctagacaagttcgtggtggtctttattgatgacattcttatctactctaagaccaaagaagagcatgaagaacatcttcgccttgcattggagaagctacgagaacatcaattgtatgccaagttcagcaagtgtgaattctggttgtctgaagtaaagttccttggtcacgtcatctcagcaggaggagttgccgtcgatcctagtaatgtggaatccgtaaccaactggaaacaaccaaagacagtttcagagatccgcagtttcctaggcctcgcaggatattatcggaagtttatagagaatttttccaagattgctaagcccatgacacgactgtttcagaaagatgtgaagtacaagtggtcagaagaatgtgagcagagttttcaagagttgaagaatcgcttgatatcagctcctattttgattttgcctgatccaaagaagggtttccaggtgtattgcgatgcatccaaacttgggttaggttgtgttttgatgcaagatgggaaggtggttgcctatgcatctcgtcagttacgtccgcatgaaaagaactaccctactcatgatcttgagttagctgcagtagttcatgcgttgaaaatttggcgtcattatcttttcggtactcgtacagaggaatttgaaagattgaatttgggaattgtcagtataggtttcgttgcagccttagaagcgaagcccactctaattgatcaagttagagaagctcaaactaatgatccggatatccaagaaattaagaagaatatgagaagaggaaaagctattggtttcttggaggatgagcacggaactgtatggttgggtgagagaatctgtgtccccgacaacaaagatttaaaagatgcaattctgaaagaagctcatgatactttatactccattcaccctggtagtactaagatgtaccaggatctcaaggaaaggttttggtgggcaagtatgaagcgtgaaattgcagaatacgtagcagtatgtgatgtttgtcagcgagtcaaggcagaacatcagaaacccgccggtttgttgcagcctttgaagattcctgaatggaaatgggaagaaatcggtatggattttatcactggtttgcccaaaacgtcattaggccatgactctatttgggtgatagtcgacagacttaccaaagtggcacatttcattccggtaaaaacaacctattccggaagtcgcttagcagaattgtatatggcaaggattgtgtgtttgcatggcgtccctaagaagatagtgtctgatcgaggcagtcagtttacttcaaatttttggaagaaacttcaggaagagatgggttctaagttgaactttagtactgcttatcatccgcagacagacggacaaactgaaagggtgaatcagattttggaagacatgttgagagcttgtgctttagatttcggtggaagttgggataagaatctaccttatgcagaattttcatacaacaacagttatcaagctagtcttcagatggctccttacgaagcactgtatggtcggaagtgccgcactccgcttttgtgggatcaaacgggagaacgtcaggttttcgggacggatatcctaagggaagcagaagaaaaggtgaaaatcattcaagaaagattgcgagtggctcagtctcgacataagagttatgccgacaatcgccgcagagatttgagttttgaagaaggagattacgtgtatcttcgtgtcacgcctcttagaggagttcatcgtttccataccaaaggaaaattggtaccgcgttttgtgggaccttataagattgtcagtagaagaggagaggttgcttatcagttagagttacctcaatctttggcagaagtccataatgtgttccatgtgtcgcaattgaagaagtgtttaagagtacctaccgaagaagctaatcttgaacaaatagaagtccaagaggatctgacctatgtggagaaaccaatccgtatcttggaaacaaatgagagaagaaccaggaatcgagttatccgtttttgcaaagtccagtggagtaatcactcggaagaagaatcaacttgggaacgagaagatgaattgaacgagggattcgagttcgtctcggattcgtctttcccgaaccttccttcctcgtcgccggtcgccgtgggccttcgccttcgcctccgagcccctttaaaaggttccccgtggtctcctctacccgccgccaccctcgccttcgcctctcgtcgccggagtcgccctagcgccccgtgcgccgccgttgttccagccgtcgccatcgctcgggaaggccgccgtcgtgttcgccgtcgcgtcgccgtcctcgtccgccccttcgccgtcgccgaagaccgccggagcgtcatcgccgccgtcgacccgaagagcttcgccgcttcctcctcgtcgccgtcgccatccgttgatcttccgcctccgtttgcgtcctcgcgccgtcgttcgccggcgagcatgcgccgcccgagccgtcccagctgcccgagccgccgccgccggggtgacgtcatcgctgacgccatcaagttcgtcctccattccgtcgtttccggagagtccgttttcaccggagaagagtttgaagagttccaaggccagcaaggcaaggggagggggtgccggtggacggacggggtcgcagcagt

SEQ ID NO: 15141 - DNA, 4893 bp, Oryza sativa
  Clone ID: TFbOSC400724j.C1.o22.fg
atggtgggttgtgagcatatggttttgatggttgtgctcatgacaattaaggaccggttcgcgagctactgttgtgaaacatttatcgtgccaaccacaagccagcgtgggcaacggctttatcttttgtatagcgtgattcattatagtgcgccagactgtgaaacggcgagaagtccgtgggggtcgctggggagtccatgccttgtttataagggggtgattatgatccaggaaaggtgcgctgtaatgggttatgttgtgcaaggggtattgtcacgactcctttccgagatgcctccccattcaccgagaaatttgatcgaggtgttaggattcgtcagggagctgaggttgatggcttttgaagtaggctatgaagttgctcctgagtatcgccagatttcccatgaccccgacgaagagaagtgtcgtgttcgtgtgacgttggctagtgatagcgaagaccttccgtcttttaagttcgaagctgggggaagatcgtactgccatgcttgtcaagaagcagctttggtggccattggagagttgcgtcaacgctttgaagaagagttggattcatcagctttccagtatcatcctcacaaacctcatggtcaagactatggaacctatatctgtcctgatggcgaagagagtgccactctgatgcatgcggtgcatatgcttagtgctatggatgcagtaagtgtggagcgagacaaagcagctcatgatagggaaaactggaatcaaggtaagatttgcaagttgaagagcaaggtgtaccgtctacagaaggaattagctgaacttaaaggagaaacgccgccgccaacacccaagcttcgcctcaccgcaagaaagagaacctgtccgccacctcgtctccagttagcttcgaagattcgcgtgatgggcgaagctgtgcccgatcatgctgaacctgtcatcgacatcataagtgatgaggaagaagaggaagaccctgaagaaagagagccagctactccagaggaagaagatccatcgcttcgttccgacgcaaggcggaaggctgaaggagagcctattacgtggcaggagttcacggctgcttttaagaagacgcatataccgtcaggtgttgtagctctaaagaagagagaatttagagcactcaaccagggatctcgttcggttactgagtatctccatgatttcaaccgtttagctcgctatgctccagaagatgttcgcactgatgaagaacgtcaggagaagtttttggagggactgaatgatgagttgtcttatgctttgatgtctacggatttccgggatttccagcagttggtggacaaagcgattcgtcaggaagacaagtataaccgcatggagcagaagaagcgcagggctgcccaatttaaggcacaacagggcagtaaccagaggccgcgtctcgttactggacctcaagctccatcgtaccctcaaggaggatcttcatcagttgtccgtccccaacgccagttctacaacaacaatactggtaatcgtggcaatgacaaccgcaacgtggttgctcgtcctgcagcaactccagctcagaaccagcccgtcaggaaggaacagggaagcaagccagtggtgtgctttaattgtggtgatccaggacattatgctgataagtgtcctaagcctcggcgcgtgaagaacgctccagccccgaacaactccaatgttccagcaccgaaggcacgtgtaaatcatgttgcagcagcagaagctcagaatgcgccagatgttgttttgggtacgtttcctgttaactctatacccgcaactgtgctttttgattccggtgctacacattcctttttgtctaaaagttttgcaagcaatcatgggatggaagttgttagtcttgggagacctttactagttaataccccaggcaatcaagtattttcgacacagtattgtccttctgttactatagaaatagaagaagttcctttcccatcctcgcttatcttgctagaatccaaagatctagatgttatcttagggatggactggttatctcgtcacagaggagttatagattgtgccaaccgtaaggtgaccttaaccagtagcaatggggaaaccgtttctttctttgtgtcctctcctaaatctcatggtgtgatcttaaaccaagttgctctacaagagatacccatagtacaagactacccagacgtgtttcccgaggatttgccaggtatgccacctaagagagacatagagtttcggatagacttggtacctggaaccaaccctatccataagagaccatacagaatggcagctaatgagttagctgaagtgaagaaacaggtggatgatttgcttcagaaaggatatattcgacccagtacttcgccatggggagcaccagtcatctttgtggagaagaaagatcatactcagagaatgtgcgtggattatcgagcgttgattgaggttactatcaagaataagtatccgctacccagaattgatgacctgtttgatcaactggaaggtgctacagttttctccaagatagatctccgttctggatatcatcaacttcgaatccgtgaggaagatataccaaagaccgccttcacaattcggtatggtttgtttgagtgtaccgttatgtcatttggactcactaatgccccagcctttttcatgaatctgatgaacaaggtgtttatggaatatctggataagtttgtcgtggtgtttattgatgacattcttatttactccaagacgaaggaagaacatgaagaacatcttcgtctagctttagagaaactacgtgagcatcagctttatgccaagttcagtaaatgtgaattttggttgtctgaagtgaagtttcttggtcatgtcatctcgtctggaggtgtggcagtagatccaagcaatgtggagttagtgttaagttggaagcaacccaagacggtttcagaaattcgtagtttccttggacttgctgggtattaccgcaggtttattgagaacttttcaaagatcgccagaccaatgactcgtctgcttcagaaggaagtgaagcaattacgacctcatgagaataactacccaacgcatgacctagagttggcagctgtggtgcatgcattgaagatttggcgtcattatcttttcggtaatcgtacagagatatatacggatcataaaagtttgaagtacattttcactcaacctgatttgaacatgcgtcagcgaagatggttagagttgattaaagactacgatatggaaatccactatcacccgggaaaagcaaatgttgtagccgatgctcttagcaggaaaagctactgtaatatgtcagaaggtcgacgtttaccttgggagttatgccaagaatttgaaaagttgaacttgggaatagtcagcaaaggttttgtggccgcattagaagctaaacctactctgtttgatcaagtcagagaagctcaagtgaatgatcctgacatacaagaaattaaaaagaacatgcgaagaggtaaagccatcggttttgtagaagatgagcaaggtactgtgtggttaggagaaagaatttgcgtcccagaaaataaggagttgaaggatactatcatgaaagaagctcatgaaactttgtattccattcaccctggaagcactaagatgtatcaagacttaaagcaacaattctggtgggccagtatgcgacatgagatagcagaatatgtggctctatgtgatgtatgtcagcgggtcaaagcagaacatcagaagccagccggtctgttacaaccgttgaagattccagagtggaagtgggaagaaataggaatggattttataaccggtctacccagaacgtcggcaggacatgattctatttgggtagtggttgataggttgacaaaagtcgcccacttcataccggtcaaaacaacctacacggggaataagcttgcagagttatacatggccagagtggtatgtttgcatggtgttcctaagaagatagtgtcagatagaggtagccagtttacttcgaagttttggcagaaattacaattagaattgggtacccgtttgaatttcagtactgcttatcaccctcaaatagatggtcagacggaaagagtaaaccaaattttagaagatatgttgagagcctgtgttctagactttggtggaagttgggataataatttgccgtatgcggaattctcatataacaatagttatcaagctagtttgcaaatgtctccgaatgaagcattatatgatcgaaagtgccgtacgccgctcctttgggatcaaaccggtgaacgtcaagtttttgggacagacatattgcgagaggcagaagaaaaagtaaagattgtccaagaaaggttgcgcattgctcagtcgcgtcaaaagagctatgctgacaatcgttgcagagatttagcttttgaagaaggagattgtgtatatctacgggttacgccgttacgaggagttcatcgtttccaaaccaaagggaaattggcaccgcgttttgtgggaccttttaagatagtgagtcgaagaggtgaagtagcttatcagttagagttgcctccgtcaatggcgggaatacacgacgtgttccatgtgtctcaattgaagaaatgtttacgtgtacctacggaggagacagatcctgatcgtatagagcttcaggaagatttaacttatgttgagaagccagtcagaatcttggaatttccgacgttccggaggagagcgtttccgttgaggaaggttccgaagcgtttgcggaagcccaaggcaagtcacacagatcccaaacaaccctttgagcatgttgaacccgtttaa

SEQ ID NO: 15142 - DNA, 5043 bp, Oryza sativa
  Clone ID: TFbOSC400724j.C1.o24.fg
atggtgggttctcctggtttggaatggtatattcctggtttggagatagaactgtacagccgggatggttgtccagaatggttgggcttatacaacaggatgccgcgctacaagcctgagtatctttttggtgttgagggttttgtccaggagttgcgtacgatgtcctttgtcattggatttgggactgtccctttttatgcccagattcgtcatgatcgtcatgaagagaagtgccgagtcaaagtcaccttgaacagtaatagtgaagatattccctcagtgatgttcgaagctggaggaagaaactacatccatgcatgtcaggaggtggcaaggatcgccataggagagctccgtgatcgctacagtgatcagttggccgacactgagtatcgctaccatcctcgccaaccccagggaaagactgtgttagcagctcaagatcgtgaagatcggaatcgtggtaagatttgcaagttagaagacaaggtggatcgtttggagaaggaattagccgcattgaagggagaagcaccacctcagaaggccaggattcgtcttaccgcaaggaagagagctttatttgtccctcgctatcaattggcgccaaagatggtgaacactcgcagcaacaggaatggtcccaatctcaacaaccccaataacaataacaatggagagaatccaacccttgctcaagttcttgctcaacagactcagcttatgaacatgatgatgcagcaacttcagaaccagcagaaccaaggaaataaccatgcaccccctcagaataagttagcagaatttcttcgtgtaaggccgcctgttttctctagtaccactaatcctgttgaagctggtgattggttgcatgccatagagaagaagttggatttgcttcagtgcactgatcaggagaaggtctcatttgcatcacaccagttgcatggccctgcctctgaatggtgggatcacttccgcctgaataggactactgctgaacctatcacttggcttgaattcaccgctgctttccggaagacgcatataccatcgggagtggtgtctctcaagaagaaggaattcaggtcactcactcaaggatctcgctctgttacggagtatttgcacgaattcaatcgtcttgcccgttatgctccggaagatgtacgcaatgatgaagagcgtcaggagaagttcttggaaggacttaatgatgagctttcttacccactcatgactgaagattattctgatttccagaaattagtggataaggctattcatcaggaggacaagtacaatcgcatggagcagaagaaacgccggattgctcacttcaaggcacaacaggggaataatcagaagccgcgtcttactttaggaccccagtctatgccacatggaggttcttcgtctgttgttcgtccgcagcatcagttcttcaacaacaatgctggcaacaacatccgtaatcaagctccacgtcctgttgcagcttcgacacagcaacaacctgccaagagggagcaaggcagcaagcctgtggtatgtttcaactgtggagacccaggacattatgctgacaagtgtccaaagccccgacacgtgaaggttgtccctgcccagagcaactctgctgtaccagcatcaaaggcccgtgtcaatcatgttgcagctgcagaagctcaagatgctccagatgtgattttgggtacgttccttgttaactcagttcctgcaacagtgcttttcgattctggtgctacacattcattcttatctatgagttttgcgggaaatcatgggatggaagtagaagatcttagatgtcctttgatggttagtaccccaagtaatcaagcactctctttgcaacgtagcccctctgtcagaatagaaattcaaggggtaccatttctggccaatcttatattgttagaatccaaagaccttgacgtcattctagggatggactggttagccagacataaaggtgtgatagactgtgctaacagaaaagtaactctcaccagcaatgatggtcgagttgtgactgttcatgcattgtcttctgagtttttaaggtcaagactgaaccagataactttggaagagattcctatagtccgggggtatcctgatgtgttcccagatgatttacctggtatgccacctaaaagggatatagagttcagaaaagatttggtacctggaacaactccgatccataagagaccttatagaatggcagccaatgagttggcagaagttaagaggcaagtagatgatttgcttcagaaaggatacatcagaccgagttcatcaccatggggagctccggttatttttgtggaaaagaaagaccatacccagaggatgtgtgtggactatcgtgcattaaatgatgtgactatcaagaataagtacccgctacccagaattgatgatttgtttgatcagcttaaaggtgccaccgttttctccaagatagatcttcgatcagggtatcaccagttgagaatcaaagaggaagatatacctaagacagcttttaccactaggtacgggttgttcgaatgtactgttatgtcttttggacttaccaatgcccccgctttcttcatgaacttgatgaataaggtgtttatggaatatctagacaagttcgtggtggtctttattgatgacattcttatctactctaagaccaaagaagagcatgaagaacatcttcgccttgcattggagaagctacgagaacatcaattgtatgccaagttcagcaagtgtgaattctggttgtctgaagtaaagttccttggtcacgtcatctcagcaggaggagttgccgtcgatcctagtaatgtggaatccgtaaccaactggaaacaaccaaagacagtttcagagatccgcagtttcctaggcctcgcaggatattatcggaagtttatagagaatttttccaagattgctaagcccatgacacgactgtttcagaaagatgtgaagtacaagtggtcagaagaatgtgagcagagttttcaagagttgaagaatcgcttgatatcagctcctattttgattttgcctgatccaaagaagggtttccaggtgtattgcgatgcatccaaacttgggttaggttgtgttttgatgcaagatgggaaggtggttgcctatgcatctcgtcagttacgtccgcatgaaaagaactaccctactcatgatcttgagttagctgcagtagttcatgcgttgaaaatttggcgtcattatcttttcggtactcgtacagaggtgtacaccgatcacaagagtttaaagtatatctttactcagccggatctgaacatgagacaaaggagatggttggaattaattaaggattatgacatgggaattcattatcacccaggaaaggctaatgtagtagcagacgctcttagcaggaaaggctattgcaatgctacagaaggacgacagttgccactggaattatgcaaggaatttgaaagattgaatttgggaattgtcagtataggtttcgttgcagccttagaagcgaagcccactctaattgatcaagttagagaagctcaaactaatgatccggatatccaagaaattaagaagaatatgagaagaggaaaagctattggtttcttggaggatgagcacggaactgtatggttgggtgagagaatctgtgtccccgacaacaaagatttaaaagatgcaattctgaaagaagctcatgatactttatactccattcaccctggtagtactaagatgtaccaggatctcaaggaaaggttttggtgggcaagtatgaagcgtgaaattgcagaatacgtagcagtatgtgatgtttgtcagcgagtcaaggcagaacatcagaaacccgccggtttgttgcagcctttgaagattcctgaatggaaatgggaagaaatcggtatggattttatcactggtttgcccaaaacgtcattaggccatgactctatttgggtgatagtcgacagacttaccaaagtggcacatttcattccggtaaaaacaacctattccggaagtcgcttagcagaattgtatatggcaaggattgtgtgtttgcatggcgtccctaagaagatagtgtctgatcgaggcagtcagtttacttcaaatttttggaagaaacttcaggaagagatgggttctaagttgaactttagtactgcttatcatccgcagacagacggacaaactgaaagggtgaatcagattttggaagacatgttgagagcttgtgctttagatttcggtggaagttgggataagaatctaccttatgcagaattttcatacaacaacagttatcaagctagtcttcagatggctccttacgaagcactgtatggtcggaagtgccgcactccgcttttgtgggatcaaacgggagaacgtcaggttttcgggacggatatcctaagggaagcagaagaaaaggtgaaaatcattcaagaaagattgcgagtggctcagtctcgacataagagttatgccgacaatcgccgcagagatttgagttttgaagaaggagattacgtgtatcttcgtgtcacgcctcttagaggagttcatcgtttccataccaaaggaaaattggtaccgcgttttgtgggaccttataagattgtcagtagaagaggagaggttgcttatcagttagagttacctcaatctttggcagaagtccataatgtgttccatgtgtcgcaattgaagaagtgtttaagagtacctaccgaagaagctaatcttgaacaaatagaagtccaagaggatctgacctatgtggagaaaccaatccgtatcttggaaacaaatgagagaagaaccaggaatcgagttatccgtttttgcaaagtccagtggagtaatcactcggaagaagaatcaacttgggaacgagaagatgaattgaagtcagctcatccgtatctgttcgccagttcttccgaatctcggggacgagattctgtttaa

SEQ ID NO: 15143 - DNA, 4905 bp, Oryza sativa
  Clone ID: TFbOSC400726j.C1.o7.fg
atggtgggttctcctggtttggaatggaatattcctggtgtggagatagaactgtgcagccggggtggttgttcagaatggttgggcctatacaacaggatgccgcgttacaagcctgagtacctgtttggtgttgagggttttgtccaggagttgcgttcgatgtcctttgtcattggatttgggactgcccctttttatgcccagattcctcatgatcgtcatgaagagaagtgccgagtcaaagtcaccttgaacagtaatagtgaagatatccccttagtgatgtttgaagctggaggaagaaactacatccatgcatgtcaggaggtggcaaggatcgccataggagagctccgtgatcgctacagtgatcaattggccgacactgagtatcgctaccatcctcgtcaaccccagggaagtgaccgtggcagctatcttgagactgaaggaattgagaatgatgctaccacgaagcatttggttgagatgttgtgggctatggatgaaagtcgtgcggagactgtgttagccgctcaagatcgtgaagaccggaatcgtggtaagatttgtaagttagaagacaaggtggatcgtttggagaaggaattagccgcattgaagggagaagcaccgccgcagaaggccaggattcgtcttaccgcaaggaagagagctctatttgtccctcgctatcaactggcgccaaagatggtgaacactcgcagcaacgggaatggtcccaacaaccccaataacaacaatggagagaatcccattctggcccaagttcttgctcaacagacacagcttatgaacatgatgatgcagcaatttcagaatcaggaaaaccaaggaaataaccatgcacctccccagaacaagttagcagaatttcttcgtgtgaggccacctgttttctctagtaccactaatcctgttgaagctagtgattggctgcatgccatagagaagaagttggatttacttcagtgcactgatcaggagaaggtctcatttgcatcacatcagttgcatggccctgcctctgaatggtgggatcacttccgccttaacaggactactgctgaacctatcatttggcttgaattcaccgctgctttccggaagacgcatataccatcaggagtagtgtctctcaagaagaaggagttcaggtcgcttacccagggatctcgctctgttacggagtatctgcacgagttcaatcgtcttgctcgttatgctccggaagatgtgcgcaatgatgaagagcgccaggagaagtttttgggaggacttaatgatgagctttcttacccactcatggttggagattatcctgatttccagaaattagtggataaggctattcgtcaggaggacaagtacaatcgcatggagcagaagaaacgtcggattgctcaattcaagacacaacagggaaataatcagaagccgcatcttactttaggaccccagcccatgccacagggaggttcttcgtctgttgttcgtccgcagcgtcagttcttcaacaacaatgctggcaacaacatccgtaatcaaggtccacgtcctgttgcagctccagcacagcaacaacctgtcaagagggagcaaggcagcaagcccgtggtgtgtttcaactgtggagatccaggacattatgctgacaagtgtccgaagccccgacgcgtgaaggttgtccctgcccagaataactctgctgtaccagcatccaaggctcgtgtaaatcatgtcgctgctgcagaagctcaagatgctccagatgtgattttgggtacgttccttgttaactcagttcctgcaacagtacttttcgattctggtgctacacattcattcttatctatgagttttgtgggaaatcatgggatggaagtagaagatcttagacgtcctttgatggttagtaccccaagtaatcaagcactctctttgcaacgtagcccctctgtcagaatagaaattcaaggagtaccatttctggccaatcttatcttgttagaatccaaagaccttgatgtcatcctagggatggactggttagccagacataaaggtgtgatagactgtgccaacaaaaaagtaactctcaccagctatgatggtcgagttgtaactgttcatgcattgtcatctgagtctttaaggtcaagactgaaccagataactttggaagagatttctatagtccgggagtatcctgatgtgttcccagatgatttacctggtatgccgcctaaaagggatatagagttcagaatagatttggtacctggaacaactccgatccataagagaccttatcgaatggcagccaatgagttggcagaagttaagaggcaagtagatgatttgctacagaaaggatacatcagaccgagttcatcaccatggggagctccagttatttttgtggaaaagaaagaccatactcagagaatgtgtgtggactatcgtgcactaaacgatgtgactatcaagaataagtatccactacccaggattgatgatttgtttgatcagcttaaaggtgccactgttttctccaagatagatcttcgatcagggtatcatcagttgagaatcaaagaggaagatatacctaagacagcttttaccactaggtatgggttgttcgaatgtactgttatgtcttttggatttaccaatgcccctgctttcttcatgaacttgatgaataaggtgtttatggaatacctagacaagttcgtggtggtctttattgatgatattcttatctactctcgaaccaaagaagagcatgaggaacatcttcgtcttgcattggagaagctacgagaacatcaactgtatgctaagtttagcaagtgtgaattttggttgtctgaagtgaaattccttggtcacgtcatctcagccggaggagttaccgtcgatcctagtaacgtggaatccgtaaccaattggaagcaaccaaagacagtttcagagattcgcagtttcctaggcctcgcaggatattatcggaggtttatagagaatttttccaagattgctaagcccatgacacgactgcttcagaaagatgtgaagtacaagtggtcggaagaatgtgagcagagttttcaagagttgaaaagtcgcttaatatcagctcctattttgattttgcctgatccaaagaagggttttcaagtgtattgcgatgcatccaaacttgggttaggttgtgttctgatgcaagatgggaatgtggttgcctatgcctctcgacagttacgtccgcatgagaagaactaccctactcatgatattgagttagctgcagtcgttcatgcattgaagatttggcgtcattatcttttcggtactcgtacagaagtgtacaccgatcacaagagtttaaagtatatctttactcagccggatctgaacatgagacaacggagatggttggaattaattaaggattatgacatgggaattcatgatcatccgggaaaggctaatgttgtagcagacgctcttagcagaaaaggctattgcaatgctacagaaggacgacagttgccattggaattatgcaaggaatttgaaagattaaatttgggaattgtcggtagaggtttcattgcagccttagaagcgaagcccactctaattgatcaagttagagaagcccaaattaatgatcctgatattcaagagatcaagaagaatatgagaagaggaaaagctattggtttcttggaggatgagcaaggaactgtatggttgggtgagagaatctgtgtccccgacaacaaagatctaaaagatgcagttttgaaagaagctcatgatactttatactccattcaccctggtagtactaagatgtaccaggatctcaaggaaagattttggtgggcaagtatgaagcgtgaaatcgcggaatatgtagcagtatgtgatgtttgtcagcgagtcaaggcagaacatcagaaacccgccggtttgttgcagcctttgaagattcctgaatggaaatgggaagaaataggtatggattttattactggtttacccagaacgtcatcaggccatgactctatttgggtgatagtcgacagacttaccaaagtggctcattttattccggtaaagacaacctattccggaagtcgcttggcggaattgtatatggcaaggattgtgtgtttgcatggcgtccctaagaagatagtgtctgatcgaggcagtcagtttacttcaaatttttggaagaaacttcaggaagagatgggttctaagctgaactttagtactgcttatcatccacagacagacggacaaaccgaaagggtgaatcagattttggaagacatgttgagagcttgtgctttagatttcggtggaagttgggataagaatctaccttatgcagaattttcatacaacaacagttatcaagctagtctacagatggcttcttacgaagcactgtatggtcggaagtgtcgcactccgcttttgtgggatcaaacgggagaacgtcaggttttcgggactgatattctaagagaagcagaagaaaaggtaaaaattattcaagaaagattgcgagtggctcaatctcgtcataagagttatgccgacaatcgccgtagagatttgagttttgaagaaggagactatgtgtatcttcgtgtcacgcctcttcgaggagttcatcgttttcacaccaaaggaaaattggcaccgcgttttgtgggaccttataagattgtcagtagaagaggagaggttgcttatcagttagaattacctcaatctttggcaggagtccataatgtgttccatgtgtcacaattgaaaaaaatgtttaagtgtacctaccgaagaagctaa

SEQ ID NO: 15144 - DNA, 5205 bp, Oryza sativa
  Clone ID: TFbOSC400760j.C1.o1.fg
atgggccttcgccaccgcctccttgcccctataaaaggatccccaagtccgccgctacccgtcgccacccttgccttcgtctctcgccgtcggaagcgccctagcgccccgtgcttcgccgtcgttccagtcgtcgccgtcgctcggggagaccgccatcgtggtcgtcatcgcgtcgccgtcctcgtccgccccttcgccgtcgctgtagaccgccggagcatcgccgtcgtcgtcaagccgaaggaccccgccgccttttcctcgacgccgccgccgtctgttcatcttccgccgtcgttttggtcatcgattccgacgtttccggagagtccgttttcgcaggagaagaatttgaagagttccaaggccactcctggtttggaatggtatattcctggtttggagatagaactgtacagccgggatggttgttcagaatggttgggcctatacaacaggatgccgtgctacaagcctgagtacttgtttggtgttgagggatttgtccaggagttgcgtacgatgtcctttgccataggatttgggactacccctttttatgcccagattcctcatgatcgtcacgaagagaagtgccgagtcaaagtcaccttgaacagtaatagtgaagatatcccctcagtgatgttcgaagctggaggaagaaactacatccatgcatgtcaggagggaagtgaccgtggcagctaccttgagactgaaggaattgagaatgatgctaccacaaagcatttggttgagatgctgtgggctatggatgaaacccgtgcagagactgtgttagcagctcaagatcgtgaagaccggaatcatgagaaggaactagccgcattgaagggagaagcaccaccgcagaaggccaggattcgtcttaccgcaaggaagagagctctatttgtccctcgctaccaattggcgccaaaggtccgtgtggtggagaaagaagttaccccagccctagcgaatcctccggtcgtcaacatggtgctcactcgcagcaacgggaatggccccaacaacaacaataacaacaacaatggagagaatcccacacttgcccaagtcctggctcaacaggtacagcttatgaacataatgatgcagcaacttcagaaccagcagaaccagggaaataatcatgcacctcctcagaacaagttagcagaatttcttcatgtgaggccgcctactttctctagtaccactaatcctgttgaagctggcgattggctgcatgccatagaaaagaagttggatttgcttcagtgcaccgatcaggagaaggtctcatttgcatcacatcagttgcatggccttgcctctgaatggtgggatcacttccgcctgaacaggactactactgaacctatcacttggcttgaattcaccgctgctttccggaagacgcatataccatcgggagtggtgtctctcaagaagaaggaattcaggtcgctcactcaggggtctcgctctgttactgagtatctgcacgaattcaatcgtctggctcgttatgctccggaagatgtgcgcactgatgaagagcgacatgagaggttcttggaaggacttaatgatgagctttcttacccactcatgactggggattatcatgatttccagaagttagtggataaggctattcgccaggagggcaagtacaaccgcatggagcagaagaaacgccggattgctcaattcaaggcacaacaagggaatagtcagaggccgcgtcttactttaggaccccagtccatgcgacagggaggttcttcgtctgttgttcgtccgcagcgtcagttcttcaacaacaatgcgggcaacaacatccgcaatcaagctccacgccctgttgcagcttcgacacagcaacagcctgccaagaaggagcaaggcagcaagcccgtggtgtgcttcaactgtggagacccaggacattacgctgacaagtgtccgaagccccgacgcgtgaaggttgtccctgcccagagcaactctactgtaccagcatcaaaggcccgtgtcaatcatgttgctgctgcagaagcccaaggtgctccggatgtgattttgggtacgttccttgttaacttagttcctgcaacagtgcttttcgattctggtgctacacattcattcttatctatgagttttgcgggaaatcatgggatggaagtagaagatcttagacgtcctttgatggttagtaccccaagtaatcaagcactctctttgcaacgtagcccctctgtcagaatagaaattcaaggagtaccatttctggccaatcttatcctgttagaatccaaagaccttgatgtcatcttagggatggactggttagccagatataaaggtgtgatagactgtgccaacagaaaagtaactatcaccagtaatgatggtcgagttgtaactgttcatgcattgtcttctgagcctttaaggtcaagactgaaccaaataactttggaagagattcctatagtccgggagtatcccgatgtgttcccagacgatttacctggtatgccgcctaaaagggatatagagttcagaatagatttggtaccaggaacgactccgatccataagagaccttatagaatggcagccaatgagttggcagaagtcaagaggcaagtagacgatttgcttcagaaaggatacatcagaccgagttcatctccatggggagctccggttatttttgtggaaaagaaagatcatacccagaggatgtgtgtagactatcgtgcactaaatgatgtgactatcaagaataagtatccgctgcccagaattgatgatttgtttgatcagcttaaaggtgccatcgttttctccaagatagatcttcgatcagggtatcaccagttgaggatcaaagaggaagatatacctaagacagcttttaccactaggtatggattgttcgaatgtactgttatgtcttttggacttaccaatgcccccgctttcttcataaacttgatgaataaggtgtttatggaatacctagacaagttcgtggtggtctttattgatgacattcttatctactcccgaaccaaagaagagcatgaagaacatcttcgccttgcactagagaagctacgagaacatcaactgtatgctaagtttagcaagtgtgaattttggttgtctgaagtgaagttccttggtcacgtcatctcagcaggaggagttgccgtcgatcctagtaatgtggaatccataaccaattggaaacaaccaaagacagtttcagagattcgcagtttcctaggccttgcaggatattatcggaggtttatagagaatttttccaagattgctaagcccatgacacgattgcttcaaaaggatgtgaagtacaagtggtcagaagaatgtaagcagagttttcaagagttgaagaatcgcttaatatcagctcctattttgattttacctgatccaaagaagggtttccaagtgtattgtgatgcatcccaacttgggttaggttgtgttctgatgcaagatgggaaggtggttgcatatgcatctcgtcagttacgtccgcatgagaagaactaccctactcatgatcttgagttagctgcagtaattcatgcgttgaagatttggcgccattatcttttcggtacttgtatagaggtgtataccgatcacaagagtttaaagtatatttttactcagccggatctgaacatgagacaacggagatggttggaattaattaaggattatgacatgggaattcagtatcacccgggaaaggctaatgttgtagcagatgctcttagcaggaaaggctattgcaatgctacggaaggacgacagttgccattggaattatgcaaggaatttgaaagattaaatttgggaattgtcagaagaggtttcgttgcagccttagaagcaaagcccactctaattgatcaagttagagaagcccaaattaatgatcctgatattcaagaaatcaagaagaatatgagaagagggaaagctatcggtttcttggaggatgagcaaggaactgtatggttgggtgagagaatctgcgtccccgacaacaaagatttaaaagatgcaattctgaaagaagctcatgatactttatactccattcaccctggtagtaccaaaatgtaccaggatctcgaggaaagattttggtgggcaagtatgaagcgtgaaatcgcagaatacgtagcagtatgtgatgtttgtcagcgagtcaaggcagaacatcagaaacccgccggtttgctgcagcctttgaagattcctgaatggaaatgggaggaaatcggtatggatttcatcactggtctacccagaacgtcatcaggccatgactctatttgggtgacagacggacaaaccgaaagggtgaatcagattttggaagatatgttgagagcttgtgctttagacttcggtggaagttgggataggaatctaccttatgcagaattttcgtacaacaacagttatcaagctagtcttcagatggctccttacgaagcactgtatggtcggaagtgccgcactccgcttttgtgggatcaaacaggagaacgtcaggttttcgggacggacatcctaagggaagcagaagagaaggtgaaaatcattcaagaaaggttgcgtgtggcccagtctcgtcataagagttatgccgacaatcgtcgtagagatctaagttttgacgaaggagattatgtgtatcttcgtgtcacgcctcttcgaggagttcatcgttttcacaccaaaggaaaattggtaccgcattttgtgggaccttataagattgtcaatagaagaggagaggttgcttatcagttggagttacctcaatctttggcaggagttcataatgtgttccatgtgtcgcaattgaaaaagtgtttaagggtacctaccgaagaagctaatcttgaacagatagaagtccaagaggatctgacctatgttcagaaaccaatccgtatcttggaaatagaagagagaagaaccagaaatcgagttatccgtttttacaaagtccaatggagtaatcactcggaagaagaatcaacttgggaacgagaagatgaattgaagtcagctcatccgcatctgttcgccagttcttccgaatctcgaggacgagattctgtttaa

SEQ ID NO: 15145 - DNA, 2031 bp, Oryza sativa
  Clone ID: TFbOSC400772j.C1.o46.gm
atggtgaacactcgcgccagtggaagtggaaacaacaacaatggagagaatcccacacttgcccaagttcttgctcaacagactcagttaatgaacatgatgatgcagcaactccagaaccagcagaaccagggaaataaccatgcacctccccagaataagttagcagaatttcttcgtgtgaggccgcctattttctctagtaccactaatcctgttgaagctggtgattggttgcatgccatagagaagaagttggatttgcttcagtgcactgatcaggagaaggtctcatttgcatcacatcagttgcatggccctgcctctgaatggtgggatcacttccgcctgaataggactactgctgaacctatcacttggcttgaattcaccgctgctttccggaagacgcatataccatcgggagtggtgtctctcaagaagaaggaattcaggtcgctcactcaggggtctcgctctgtcactgagtatctgcacgagttcaatcgtctggctcgttatgctccggaagatgtgcgcaatgatgaagagcgccaggagaagttcttggaaggacttaatgatgagctttcttacccactcatgactggggattatcctgatttccagaagttggtgattaaggctattcgtcaggaagacaagtacaacagcatggagcaaaagaaacgccggattgctcaattcaaaacacaacagggaaataatcagaagccgcgtcttactttaggaccgcagtctatgccacagggaggttcttcgtctgttgttcgtccgcagcgtcagttcttcaacaacaatgctggcaacaacatccgcaatcaagctccacgtcctgttgcagcttcgacacagcaacaacctgccaagagggagcaaggcagcaagcccgtggtgtgtttcaactgtggagacccaggacattacgcggacaagtgcccgaagcctcgacgcgtgaaggttgtccctgcccagagcaactctaccgtaccagcatcaaaggctcgtgtcaatcatgtcgctgctgcagaagctcaagatgctccagatgatccccggtgtcgccgctacccgtcgccactctcgccttcgcttctcgtcgccgggagcgctctagcgccgtgccgcttcgcgccgccgtcgtcgccgccacttcagccgtgcgccgccgtcgctccagtcatcgtcgtcgctcgggaaggtcgccatcgtggtcgccgtcacgtcgccgtcctcgtccgctccttcgccgttgctgtagaccgccggagcaccgtcgccgccgtcgacccgatcttctccgccgcttcgatctcgccgccggtgccgtccgttgatcttccgccgcttctttggtcaccggtgagttcgccgcgtcacgctctacgtcctggtgccctccgttctcgtcgtcgcgccgtcgttcgccggcgagcttgcgccgcccgagccgccgccggtggtgacgtcaccgctgacgtcatcgtggccgtttgccgtgagccgcatggttcattgcggagcaccagactgagaagtggcggagataagcccacaggggtcgctccagtcatcgtcgtcgctcaggaaggtcgccatcatggtcgccgtcatgtcgccgtcctcgtccgctcctccgccgttgctgtagaccgccggagcaccgtcgccgccgtcgacccgatcttctccgccgcttcgatctcgccgccggtgccgtccgttgatcttccgccgcttctttggtcaccggtgagttcgccgcgtcacgctctacgtcctggtgccctccgttctcgtcgtcgcgccgtcgttcgccggcgagcttgcgccgcccgagccgccgccggtggtgacgtcaccgctgacgtcatcgtggccgtttgccagaacgacgacgatgacgtcagcgacgacgtcagcaccggcggcgactcgggcggctcggacggcgcaagctcgccggcgaacgacggcgcgaggacgcgaacagaggacaccaacggatag

SEQ ID NO: 15146 - DNA, 2400 bp, Oryza sativa
  Clone ID: TFbOSC400806j.C1.o3.gm
atggtgaacactcgcagcaacgggaatggtcccaacaaccccaataacaataacaatggagagaatcccactcttgctcaagttcttgctcaacagacacagctaatgaacatgatgatgcagcaacttcagaaccagcagaaccaaggaaataaccatgtacctcctcagaataagttagcagaatttcttcatgtaaggccgcctgttttctctagtaccactaatcctgttgaagctggtgattggttgcatgccatagagaagaagttggatttgcttcagtgcactgatcaggagaaggtctcatttgcatcgcatcagttgcatggccctgcctctgaatggtgggatcatttccgccttaataggactactgctgaacctatcacttggcttgagttcaccgctgctttccggaagacgcatataccatcgggagtggtgtctctcaagaagaaggagttcaggtcgcttacgcagggatctcgctctgttacggagtatctgcacgagttcaatcgtcttgctcgttatgctccggaagatgtgcgcaatgatgaagagcgtcaagagaagttcttggaaggacttaatgatgagctttcttacccactcatgactggagattattctgatttccagaagttagtggataaggctattcgtcaggaggacaagtataatcgcatggaacagaagaaatgccggattgctcacttcaaggcacaacaggggaataatcagaagccgcgtcttactttaggatcccagtctatgccacagggaggttcttcgtctgttgttcgtccgcagcgtcagttcttcaacaacaatgctggcaacaacatccgcaatcaagctccacgtcctgttgcagctccagcacagcaacaacctgtcaagagggagcaaggcagcaagcccgtggtgtgtttcaactgtggagacccaggacattacgctgacaagtgtccgaagccccgacgcgtgaaggttgtccctgcccagagcaactctaccgcaccagcatcaaaggcccgtgtcaatcatgttgctgctgcagaagctcaagatgctccagatgtgattttggtccgggagtattccgatgtgttcccagatgatttacctgccaatgagttggcagaagttaagaggcaagtagacgatttgcttcagaaaggatacatcagaccgagttcatcaccatggggagctccggttatttttgtggaaaagaaagatcatacccagaggatgtgtgtggactatcgtgcattaaatgatgtgactatcaagaataagtatccactacccagaattgatgatttgtttgatcagcttaaaggtgccactgttttctccaagatagatcttcgatcaggatatcaccagttgagaatcaaagaggaagatatacctaagacagcttttaccactaggtatggattgttcgaatgtactgttatgtcttttggacttaccaatgcccctgctttcttcatgaacttgatgaataaggtgtttatggaatacctagacaagtttgtggtggtctttattgatgatattcttatctactctcgaaccaaagaagagcatgaagaacatcttcgccttgcattggagaagctacgagaacatcaactgtatgctaagtttagcaagtgtgaattttggttgtctgaagtgaagttccttggtcacgtcatctctgcaggaggagttgccgtcgatcctagtaatgtggaatccgtaaccaattggaaacaaccgaagacagtttcagagatccgcagttttctaggccttgcaggatattatcggagatttatagagaatttttccaagattgctaagcccatgacacgactgcttcagaaagatgtgaagtacaagtggtcagaagaatacgtcgccgtcgctcgggaaggacgtcatcgtggtcgccgtcgcgtcgccgtcctcgttcgccccttcgccgtcgccggagatcaccggagcagcgtcgccgtcgacaacccgaaggtttccgccgcttccttctcgtcgccgtcgtcgtctgttgttcgtccgccgccgttttggtcaccggtgtgttcgccgcgtcgtcctctacgtgctggtgccctccgtttgcgtcctagtgccgccgttcgccggcgagcgtgcgccgcccgagccgtccgctccgccgagccgccgccgctgtcggtgacgtcaccgctgacgtcatcggggtcgtccgcccgtggttcattgcggggcaccagactgagaagtggcggagataagcccacgggggtcgctgggagtccatgccttgtttataagggggtgattatgatccaggaagaggaagagttcttcaatgaggctgatggtgtggaggagtag

SEQ ID NO: 15147 - DNA, 4476 bp, Oryza sativa
  Clone ID: TFbOSC400809j.C1.o1.fg
atgcaagcccgagccgcccgagccgccgccgccggtgatgacgtcaccgctgacgtcatcgtcgccctctcccctcctggtttggaatggtacattcctggtttggagatagaactgtgcagccgggatggttgttcagaatggttgggcctatacaacaggatgccgcgctacaagcctgagtacttgtttggtgttgagggttttgtccaggagttgcgtacgatattcctcatgatcgtcatgaagagaagtgccgagtcaaaagtcaccttgaacagtaatagtgaagatatcccctcagtgatgttcgaagctggaggaagaaactgcatccatgcatgtcaggaggtggcaaggattgccataggagagctccgcgatcgctacagtgatcagttggccgacactgagtatcgctatcatcctcgtcaaccccagggaagtgaccgtggcaactatcttgagactgaaggaattgagaatgatgctaccacaaggcatttggttgagatgctgtgggctatggatgaaagtcgtgcggagactgtgttagcggctcaagatcatgaagatcggaatcgtggtaagatttgcaagttagaggacaaggtggatcgtttggaaaaggagttagctgcgttgaagggagaagcaccgctgcagaaggccaggattcgtctcaccgcaaggaagagagctctatttgtccctcgctatcaattggcgccaaaggtccgtgtggtggagaaagaagttgccccaaccctagcagatcctccggtcatcatcataagtgaggatgaagaagaagaatccaagcgcaaccattccaagtttcccccggtttctcttcttgtgccctgtccatgccagatggtgaacactcgcagcaacgggaatggcccaagtaaccataacaatgaaggaaacccaacccttgctcaagttcttgctcaacagactcagcttatgaacatgatgatgcaacaacttcagaatcagcagaaccagggaaataaccatgcacctccccagaacaagttagcagaatttcttcatgtgaggccgcctattttctctagtaccactaatcctgttgaagctggtgattggctgcatgccatagagaagaagttggatttgcttcagtgcactgatcaggagaaggtctcatttgcatcacatcagttgcatggccctgcctctgaatggtgggatcacttccgtttgaataggactaccgctgaacctatcacttggcttgagttcaccgctgcttttcggaagacgcatatatcatcgggagtggtgtctctcaagaagaaggaattcaggtcgctcacccagggatctcgctctgttacggagtacctgcacgagttcaatcgtctggctcgttatgctccggaagatgtgcgcaatgttgaagagcgccaagagaagttcttggaaggacttaatgaggagctttcttacccactcatgactggagattattctgatttccagaagttggtggataaggctattcgtcaggaagacaagtacaatcgcatggagcagaagaaacgtcggattgctcaattcaagacacaacaggggaataatcagaagccgcgtcttactttaggaccccagtccatgccacatggaggttcttcgtctgttgttcgtccgcagcgtcagttcttcaacaacaatgctggcaacaacatccgtaatcaagctccacgtccagttgcagctccagcacagcaacaacctgccaagagggagcaaggcagcaagcccgtggtgtgtttcaactgtggagatccaggacattacgctgacaagtgtccgaagccccgacgcgtgaaggttgtccctgctcagagcaactctgccgtaccagcgtcaaaggcccgtgtcaatcatgttgctgctgcagaagctcaagatgctccagatgtgattttgggtacgttccttgttaacttagttcctgcaacagtgcttttcgattcaggtgctacacattcattcttatctatgagttttgcgggaaatcatgggatggaagtagaagatcttagacgtcctttgatggttagtactccaagtaatcaagcactctctttgcaacgtagcccctctgtcagaatagaaattcaaggggtaccatttctggccaatcttatcctgttagaatccaaagaccttgatgtcatcctagggatggactggttagccagacataaaggtgtgatagactgtgccaacagaaaagtaactctcaccagcaatgatggtcgagttgtaactgttcatgcattgtcttctgcgtctttaaggtcaagactgaaccaaataactttggaagagattcctatagtccgggagtatcccgatgtgttcccagatgatttacctggtatgccgcctaaaagggatatagaattcagaatagatttggcaccaggaacaactccgatccataagagaccttatcgaatggcagccaatgagttggcagaagttaagaggcaagtagatgatttgcttcagaaaggatacatcagaccgagttcatcaccatggggagctccggttatttttgtggaaaagaaagaccatacccagaggatgtgtgtggactatcgtgcactaaatgatgtgactatcaaaaataagtatccgctacccagaattgatgatttgtttgatcagcttaaaggtgctactgttttctccaagatagatcttcgatcaggatatcaccagttgaggatcaaagaggaagatatacctaagacagtttttaccactaggtatgggttgttcgaatgtactgttatgtcttttggacttaccaatgcccctgctttcttcatgaacttgatgaataaggtgtttatggaatacctagacaagttcgtggtggtctttattgatgatattcttatctactcccgaaccaaagaggagcatgaagaacatcttcgccttgcattagagaagctacgagaacatcaactgtatgctaagtttagcaagtgtgaattttggttgtctgaagtgaagttccttggtcacgtcatctcagccggaggagttgccgttgatcctagtaatgtggaatccgtaaccaactggaagcaaccgaagacagttttagagatccgcagtttcttaggcctcgcaggttattatcggaggtttatagagaatttttccaagattgctaagcccatgacacgactgcttcagaaagatgtgaagtacaagtggtcggaagaatgtgagcagagttttcaagagttgaagaatcgcttgatatcagctcctattttgattttacctgaaccaaagaagggtttccaagtgtattgcgatgcatccaaacttgggttaggttgtgtactgatgcaagatgggaagatggttgcctatgcatctcgtcagttacgtccgcatgagaagaactaccctactcatgatcttgaattagctgcagtagttcatgcgttgaaaatttggcgtcattatcttttcggtactcgtacagaggtgtacaccgatcacaagagtttaaagtatatctttactcagccggatctaaacatgagacaacggagatggttggaattaattaaggattatgacatgggaattcattatcacccaggaaaggctaatgttgtagcagacgctcttagcagaaaaggctattgcaatgctacggaaggacgacagttgccattggaattatgcaaggaatttgaaagattaaatttgggaattgtcagtagaggttttgttgcagccttagaagcgaagcccactctaattgatcaagttagagaagcccaaattaatgatcctgatattcaagaaatcaagaagaatatgagaagaggaaaagctattggtttcttggaggatgagcacggaactgtatggttgggtgagagaatctgtgtccccgacaacaaagatttaaaagatgcaattctgaaagaagctcatgacaccttatattccattcaccctggtagtaccaagatgtaccaggatctcaaggaaagattttggtgggcaagtatgaagcgtgaaatcgcagaatacgtagcagtatgtgatgtttgtcagcgagtcaagacagacggacaaaccgaaagggtgaataagattttggaagacatgttgagagcttgtgctttagatttcggtggaagttgggataagaatctaccttatgcagaattttcgtacaacaacagttgtcaagctagtcttcaaatggctccttacgaagcactgtatggtcgaaagtgccgtactccgcttttgtgggatcaaacaggagaacatcaggttttcgggacggatatcctaagggaagcagaagaaaaggtgaaaatcattcaagaaagattgcgtgtggcccagtcgcgtcataagagttatgccgacaatcgcctagagatttga

SEQ ID NO: 15148 - DNA, 5091 bp, Oryza sativa
  Clone ID: TFbOSC400903j.C1.o48.fg
atgccgcgttacaagcctgagtacctgtttggtgttgagggttttgtccaggagttgcgtacgatgtcctttgtcattggatttgggactgcccctttttatgcccagattcgtcatgatcgtcatgaagagaagtgccgagtcaaagtcaccttgaacagcaatagtgaagaggtcccctcagtgatgtttgaagctggaggaagaaactacatccatgcatgtcaggaagtggcaaggatcgccacaggagaactccgtgatagctacagtgatcagttggccgacactgagtatcgctatcatcctcgccaacctcagggaagtgaccgtggcagttaccttgagactgaaggaattgagaatgatgttaccacaagacatttggttgagatgttgtgggctatggatgaaagtcgtgcggagactgtgttagcagctcaagatcgtgaagatcggaatcgtggtaagatttgcaagttagaagacaaggtggatcgcttggagaaggaattagccgcattgaagggagaagcaccgccgcagaaggccaggattcgtctcaccgcaaggaagagagctttgtttgtccctcgttatcaattggcgccaaagatccgcgtggtggagaaagaagttgccccagcaaatcctcccgtcatcatcataagtagtgatgaagaagaagaacccaagcgcaacaattccaagtttgagtggatggtgaacactcgtagcaatgggaatggtcccaacaaccccaatagcaacaacaatggagagaatcccactctggcccaagttcttgctcaacagacacagcttatgaacatgatgatgcagcaatttcagaatcagcaaaaccaagggaataatcatgcacctccacagaacaagttagcagaatttcttcgtgtgaggccgcctgttttctctagtaccactaatcctgttgaagctagtgattggctgcatgccatagagaagaagttggatttacttcagtgtactgatcaggagaaggtctcatttgcatcacatcagttgcatggccctgcctctgaatggtgggatcacttccgccttaacaggactactgctgaacctatcacttggcttgaattcaccgctgctttccggaagacgcatataccatcgggagtagtgtctctcaagaagaaggagttcaggtcgctttcccagggatctcgctctgttacggagtatctgcacgagttcaatcgtcttgctcgttatgctccggaagatgtgcgcaatgatgaagagcgccaggagaagtttttgggaggacttaatgatgagctttcttacctactcatggttggagattatcctgatttccagaaattagtggataaggccattcgtcaggaggacaagtacaatcgcatggagcagaagaaacgtcggattgctcaattcaagacacaacagggaaataatcagaagccgcgtcttactttaggaccccagcccatgccacagggaggttcttcgtctgttgttcgtccgcaacgtcagttcttcaacaacaatgctggcaacaacatccgtaatcaagctccacgtcctgttgcagttccagcacagcaacagcctgccaagagggagcaaggcaacaagcccgtggtgtgtttcaactgtggagatccaggacattatgctgacaagtgtccgaagccccgacgcgtgaaggttgttcctgctcagaataactctgctgtaccagcatcaaaggcccgtgtcaatcatgttgctgctgcagaagctcaagatgctccagatgtgattttgggtacgttccttgttaactcagttcctgcaacagtacttttcgattctggtgctacacattcattcttatctatgagttttgcgggaaatcatgggatggaagtagaagatcttagacgtcctttgatggttagtaccccaagtaatcaagcactctctttgcaacgtagcccctctgtcagaatagaaattcaaggagtaccatttctggccaatcttatcttgttagaatccaaagaccttgatgtcatcctagggatggactggttagccagacataaaggtgtgatagactgtgccaacagaaaagtaactctcaacagctatgatggtcgagttgtaactgttcatgcattgtcatctgagtctttaaggtcaagactgaaccagataactttggaagagattcctatagtccgggagtatcctgatgtgttcccagatgatttacctggtatgccgcctaaaagggatatagagttcagaatagatttggtacctggaacaactccgatccataagagaccttatcgaatggcagccaatgagttggcagaagttaagaggcaagtagatgaattgctacagaaaggatacatcagaccgagttcatcaccatggggagctccggttatttttgtggaaaagaaagaccatactcagagaatgtgtgtggactatcgtgcactaaacgatgtgactattaagaataagtatccattacccaggattgatgatttgtttgatcagcttaaaggagccactgttttctccaagatagatcttcgatcagggtatcatcagttgagaatcaaagaggaagatatacctaagacagcttttaccactaggtatgggttgttcgaatgtactgttatgtcttttggacttaccaatgcccctgctttcttcatgaacttgatgaataaggtgtttatggaatacttagacaagttcgtggtggtctttatagatgatattcctatctactctcgaatcaaagaagagcatgaggaacatcttcgccttgcattggagaagctacgagaacatcaactgtatgctaagtttagcaagtgtgaattttggttgtctgaagtgaaattccttggtcacgtcatctcagccggaggagttgccgtcgatcctagtaacgtggaatccgtaaccaattggaagcaaccaaagacagtttcagagattcgcagtttcctaggccttgcaggatattatcggaggtttatagagaatttttccaagattgctaagcccatgacacgactgcttcagaaagatgtgaagtacaagtggtcggaagaatgtgaacagagttttcaagagttgaaaagtcgcttaatatcagctcctattttgattttgcctgatccaaagaagggttttcaagtgtattgtgatgcatccaaacttgggttaggttgtgttctgatgcaagatgggaaggtggttgcctatgcctctcgacagttacgtccgcatgagaagaactaccctactcatgatattgagttagctgcagtcgttcatgcgttgaagatttggcgtcattatcttttcggtactcgtacagaagtgtacaccgatcacaagagtttaaagtatatctttactcagccggatctgaacatgagacaacggagatggttggaattaattaaggattatgacatgggaattcattatcatccgggaaaggctaatgttgtagcagacgctcttagcagaaaaggctattgcaatgctacagaaggacgacagttgccattggaattatgcaaggaatttgaaagattaaatttgggaattgtcggtagaggtttcgttgcagccttagaagcgaagcccactctaattgatcaagttagagaagcccaaattaatgatcctgatattcaagagatcaagaagaatatgagaagaggaaaagctattggtttcttggaggatgagcacggaactgtatggttgggtgagagaatctgtgtccccgacaacaaagatttaaaggatgcaattctgaaagaagctcatgatactttatactccattcaccctggtagtactaagatgtaccaggatcttaaggaaagattttggtggcaacgagtcaaggcagaacatcagaaacccgccggtttgttgcaacctttgaagattcctgaatggaaatgggaagaaattggtatggattttattactggtttacccagaacatcatcaggccatgactctatttgggtgatagtcgacagacttaccaaagtggctcattttattccggtaaagacaacttattccggaagtcgcttagcagaattgtatatggcaaggattgtgtgtttgcatggcgtccctaagaaaatagtgtctgatcgaggcagtcagtttacttcaaacttttggaagaaacttcaggaagagatgggttctaagctgaactttagtactgcttatcatccgcagacagacggacaaaccgaaagggtgaatcaaattttggaagacatgttgagagcttgtgctctagatttcggtggaagttgggataagaatctaccttatgcagaattttcgtacaacaacagttatcaagctagtcttcagatggctccttacgaagcactgtatggtcggaagtgccgcactccgcttttgtgggatcaaacgggagaacgtcaggttttcgggacggatatcctaagggaagcggaagaaaaggtaaagatcattcaagaaagattgcgtgtggctcagtctcgtcataagagttatgccgacaatcgccgcagagatttgagttttgaagagggagattatgtgtatcttcgtgtcacgcctttacgaggagttcatcgttttcataccaagggaaaattggcaccgcgttttgtgggaccttataagattgtcagtagaagaggagaggtcgcttatcagttggagttacctcaatctttggcaggagtacataatgtgttccatgtgtcgcaattgaaaaagtgtttaagggtacctaccgaagaagctaatattgagcagatagaagtccaagaggatttgacctatgtggagaaaccgatccgtatcttggaaacaagtgagagaagaaccaggaatcgagttatccgattttgcaaagtccagtggagtaatcactcggaagaagaatcaacttgggaacgagaagatgaattgaagtcagctcatccgcacctgtttgccagttcttccgaatctcgaggacgagattctgtttaa

SEQ ID NO: 15149 - DNA, 2460 bp, Oryza sativa
  Clone ID: TFbOSC400935j.C1.o41.gm
atggtgaacactcgcagcaacgggaatggtcctaacctcaacaaccccaataacaacaacaatggagagaatccaacccttgctcaagttcttgctcaacagactcagttaatgcacatgatgatgcagcaatttcagaatcagcaaaaccaagggaataatcatgcacctccacagaacaagttagcagaatttcttcgtgtgaggccgcctgttttctctagtaccactaatcctgttgaagctagtgattggctgcatgccatagagaagaagttggatttacttcagtgtactgatcaggagaaggtctcatttgcatcacatcagttgcatggccctgcctctgaatggtgggatcacttccgccttaacaggactactgctgaacctatcacttggcttgaattcaccgctgcttttcggaagacgcatataccatcgggagtagtgtctctcaagaagaaggagttcaggtcgcttactcagggatctcgctctgttacggagtatctgcacgagttcaatcgtcttgctcgttatgctccggaagatgtgcgcaatgatgaagaacgccaggagaagtttttgggaggacttaatgatgagctttcttacccacttatggttggagattatcctgatttccagaaattagtggataaggctattcgtcaggaggacaagtacaatcgcatggagcagaagaaacgtcggattgctcaattcaagacacaacagggaaataatcagaagccgcgccttactttaggaccccagtccatgccacagggatgttcttcgtctgttgttcgtccgcaacgtcagttcttcaacaacaatgctggcaacaatatccgtaatcaagctccacgtcctgttgcagttccagcacagcaacaacctgccaagagggagcaaggcaacaagcccgtggtgtgtttcaactgtggagatccaggacattatgctgacaagtgtccgaagccccgacgcgtgaaggttgtccctgcccagaataactctgctgtaccagcatccaaggctcgtgtaaatcatgtcgcggctgcagaagctcaagatgctccagatgtgattttggtccgggagtatcctgatgtgttcccagatgatttacctgccaatgagttggcagaagttaagaggcaagtagatgatttgctacagaaaggatacatcagaccgagttcatcaccatggggagctccggttatttttgtggaaaagaaagaccatacccagagaatgtgtgtggattatcgtgcactaaacgatgtgacaatcaagaataagtatccgctgcccagaattgatgatttgtttgatcagcttaaaggagccactgttttctccaagatagatcttcgatcagggtatcatcagttgagaatcaaagaggaagatatacctaagacagcttttaccactaggtatgggttgttcgaatgtactgttatgtcttttggacttaccaatgcccctgctttcttcatgaacttgatgaataaggtgtttatggaatacttagacaagttcgtggtggtctttattgatgatattcttatctactctcgaaccaaagaagagcatgaggaacatcttcgccttgcattggagaagctacgagaacatcaactgtatgctaagtttagcaagtgtgaattttggttgtccgaagtgaaactccttggtcacgtcatctcagccggaggagttgccgtcgatcctagtaacgtggaatccgtaaccaattggaagcaaccaaagacagtttcagagattcgcagtttcctaggccttgcaggatattatcggaggtttatagagaatttttccaagattgctaagcccatgacacgactgcttcagaaagatgtgaagtacaagtggtcggaagaatccttagaagcgaagcccactctaattgatcaggttagagaagcccaaattaatgatcctgatattcaagagatcaagaagaatatgagaagaggaaaagctattggtttcttggaggatgagcacggaactgtatggttgggtgagagaatctgtgtccccgacaacaaagatttaaaggatgcaattctgaaagaagctcatgatactttatactccattcaccctggtagtactaagatgtaccaggatcttaaggaaagattttggtggccgtcgccgtcgctcgggaaggtcgccgtcgtcgtcgccaagtcgtcgccgtcctcgtccgctctttcgctgccgtcggagaccgccggagcatcgtcgccgtcgtcaagccgaagaccgccgccgtttcaacctcgtcgccgtcgccgtccgttggtcgtccgccgtcgctttggtcgtcggccgtccgccgtgaaccgccgtggacccgatcaatctcggccgtccgatttggatcggatcaatctcggccgtccgttcgcgtga

SEQ ID NO: 15150 - DNA, 3804 bp, Oryza sativa
  Clone ID: TFbOSC400948j.C1.o1.fg
atgccgtgttacaagcctgagtacctgtttggcgttgagggttttgtccaggagttgcgtacgatgtcctttgtcattggatttgggaatgctcctttttatgcccagattcgtcatgatcgtcatgaagaaaagtgccgagtcaaagtcaccttgaacagcaatagtgaagatatcccctcagtaatgtttgaagctggaggaagaaactacatccatgcatgtcaggaggtggcaaggatcgccataggagagctccgtgatcgctacagtgatcagttggtcgacactgagtatcgctatcatcctcgccaaccccagggaagtgaccgtggcagttaccttgagactgaaggaattgagaatgatgttaccacaagacatttggttgagatgttgtgggctatggatgaaagtcgtgcggagactgtgttagcagctcaagatcgtgaagatcggaatcgtggtaagatttgcaagctagaagacaaggtggatcgtttggagaaggaattagccgcattgaagggagaagcaccgccgcagaaggccaggattcgtcttaccgcaaggaagagagctttatttgtccctcgctatcaactggcgccaaaggttcgtgtggtggagaaagaagttgccccagctcaagcggatcctccggtcatcatcataagtagtgatgaagaagaagaatccaagcgcatcaattccaagattgagtgggtagcaactcaagatgatgaagatgagccttcaatcgacctcctatgctcggaagaactagagaagttggagagtttagtggtgtgggagtcttcagtttgtaataatgaaactcagttaagatcaataaaagttaaaatggtgaacactcgtagcaatgggaatggtcccaacaaccccaataataacatcaatggagagaatcccactctggcccaagttcttgctcagcagacacagcttatgaacatgatgatgcaacaatttcagaatcagcaaaaccaagggaataatcatgcacctccacagaacaagttagcagaatttcttcgtgtgaggccgcctgttttctctagtaccactaatcctgttgaagctagtgattggctacatgccatagagaagaagttggatttacttcagtgtactgatcaggagaaggtctcatttgcatcacatcagttgcatggccctgcctctgaatggtgggatcacttccgtcttaacaggactactgctgaacctatcacttggcttgaattcaccgctgctttccggaagacgcatataccatcgggggtagtgtctctcaagaagaaggagttcaggtcgcttacccagggatctcgctctgttacggagtatctgcacgagttcaatcgtcttgctcgttatgctccggaagatgtgcgcaatgatgaagagcgccaggagaagtttttgggaggacttaatgatgagctttcttacccacttatggttggagattaccctgatttccagaaattagtggataaggctattcgtcaggaagacaagtacaatcgcatggagcagaagaaacgtcggattgctcaattcaagacacaacagggaaataatcagaagccgcgtcttactttaggaccccagtccatgccacagggaggttcttcgtctgttgttcgtccgcaacgtcagttcttcaacaacaatgctggcaacaacatccgtaatcaagctccacgtcctgttgcagctccagcacagcaacaacctgccaagagggagcaaggcagcaagcccgtggtgtgtttcaactgtggagatccaggacattatgctgacaagtgtccgaagccccaacgcgtgaaggttgtccctgcccagagtaactctgctgtaccagcatcaaaggcccgtgtcaatcatattgctgctgcagaagctcaaggtgctccagatgtgattttgggtacgttccttgttaactcagttcctgcaacagtacttttcgattctggtgctacacattcattcttatctatgagttttgcgggaaatcatgggatggaagtagaagatcttagacgtcctttgatggttagtaccccaagtaatcaagcactctctttgcaacgtagcccctctgtcagaatagaaattcaaggagtaccatttctggccaatcttatcttgttagaatccaaagaccttgatgtcatcctagggatggactggttagccagacataaaggtgtgatagactgtgccaacagaaaagtaactctcaacagctatgatggtcgagttgtaaccgttcatgcattgtcttctgagtctttaaggtcaagactgaatcaaataactttggaagagattcctatagtccgggagtatcctgatgtgttcccagatgatttaccgggtatgccgcctaaaagggatatagagttcagaatagatttggtacctggaacaactccgatccataagagaccttatcgaatggcagccaatgagttggcagaagttaagaggcaagtagatgatttgctacagaaaggatacatcagaccgagttcatcaccatggggagctccggtaatttttgtggaaaagaaagaccatactcagagaatgtgtgtggactatcgtgcactaaacgatgtgactatcaagaataagtatccactacccaggattgatgatttgtttgatcagcttaaagacaagttcgtggtggtctttattgatgatattcttatctactctcgaaccaaagaagagcatgaggaacatcttcgccttgcattggagaagctacgagaacatcaactgtatgctaagtttagcaagtgtgaattttggttgtccgaagtgaaattccttggtcacgtcatctcagccggaggagttgccgttgatcctagtaacgtggaatccgtaaccaattggaagcaaccaaagacagtttcagagattcgcagtttcctaggccttgcaggatattatcggaggtttatagagaatttttctaagattgctaagcccatgacacgactgcttcagaaagatgtgaagtacaaatggtcggaagaatgtgagcggagttttcaagagttgaaaagtcgcttaatatcagctcctattttgattttgcctgatccaaagaagggtttccaagtatattgcgatgcatccaaacttgggttaggttgtgttctgatgcaagatgggaaggtggttgcctatgcatctcgtcagttacgtccgcatgagaagaactaccctactcatgatattgagttagctgcagtcgttcatgcattaaagatttggcgtcattatcttttcggtactcgtacagaagtgtacaccgatcacaagagtttaaagtatatctttactcagccggatctgaatatgagacaacggagatggttggaattaattaaggattatgacatgggaattcattatcatccgggaaaggctaatgttgtagcagacgctcttagcagaaaaggttattgcaatgctacagaaggacgacagttgccattggaattatgcaaggaatttgaaagattaaatttgggaattgtcggtagaggtttcgttgcagctttagaagcgaagcccactctaattgatcaagttagagaagcccaaattaatgatcctgatattcaagagatcaagaagaatatgagaagaggaaaagctattggtttcttggaagatgagcacggaactgtatggttgggtgaaagaatctgtgtctgtcacgtcctgataaattcatcccaaaattaa

SEQ ID NO: 15151 - DNA, 5941 bp, Oryza sativa
  Clone ID: TFbOSC400968j.C1.o4.np
atgcttaaactgataataatttgattagctcctggtttggaatggtacattcctggtttggagatagaactgtgcagccgatgccgcgttacaagcctgagtacctgtttggtgttgagggttttgtccaggagttgcgcacgatgtcctttgtcattggatttgggactgcccctttttatgcccagattcctcatgatcgtcatgaagagaagtgccgagtcagagtcaccttgaacagcaatagtgaagaggtcccctcagtgatgtttgaagctggaggaagaaactacatccatgcatgtcaggaggtggcaaggatcgccataggagagctccgtgatcgctacagtgatcaattggccgacactgagtatcgctaccatcctcgccaacctcagggaagtgaccgtggcagttaccttgagactgaaggaattgagaatgatgttaccacgaaacatttggttgagatgttgtgggctatggatgaaagtcgtgcggagactgtgttagcagctcaagatcgtgaagatcggaatcgtggtaagatttgcaagttagaagacaaggtggatcgtttggagaaggaattagccgcattgaagggagaagcaccgccgcagaaggccaggattcgtcttaccgcaaggaagagagctctatttgtccctcgctatcaactggcgccaaaggttcgtgtggtggagaaagaagttgctccagctcaagcggatcctccggtcatcatcataagtagtgatgaagaagaagaatctaagcgcaacaattccaagattgagtgggtagcaactcaagatgatgaagacgagccttcaatcgacctccgatgcttggaagaactagacaatgggaatggtcccaacaaccccaataacaacaacaatggagagaatcccactctggcccaagttcttgctcaacagacacagcttatgaacatgatgatgcagcaatttcagaatcagcaaaaccaagggaataatcatgcacctccccaaaacaagttagcagaatttcttcgtgtgaggccgcctgttttctctagtaccactaatcctgttgaagctagtgattggctgcatgccatagagaagaagttggatttacttcagtgtactgatcaggagaaggtctcatttgcatcacatcagttgcatggccctgcctctgaatggtgggatcacttccgccttaacaggactactgctgaacctatcacttggcttgaattcaccgctgctttccggaagacgcatataccatcgggagtagtgtctctcaagaagaaggagttcaggtcgctttcccagggatctcgctctgttacggagtatctgcacgagttcaatcgtcttgctcgttatgctccggaagatgtgcgcaatgatgaagagcgccaggagaagtttttgggaggacttaatgatgagctttcttacccactcatggttggagattatcctgatttccagaaattagtggataaggctattcgtcaggaggacaagtacaatcgcatggagcagaagaaacgtcggattgctcaattcaagacacaacagggaaataatcagaagccgcgtcttactttaggaccccagcccatgccacagggaggttcttcgtctgttgttcgtccgcaacgtcagttcttcaacaacaatgctggcaacaacatccgtaatcaagctccacgtcctgttgcagctccagcacagcaacaacctgccaagagggagcaaggcaacaagcccgtggtgtgtttcaactgtggagatccaggacattatgctgacaagtgtccgaagccccgacgtgtgaaggttgtccctgcccagaataactctgctgtaccagcatccaaggctcgtgtaaatcatgtcgctgctgcagaagctcaagatgctccagatgtgattttgggtacgttccttgttaactcagttcctgcaacagtacttttcgattctggtgctacacattcattcttatctacgagttttgcgggaaatcatgggatggaagtagaagatcttagacgtcctttgatggttagtaccccaagtaatcaagcactctctttgcaacgtagcccctctgtcagaatagaaattcaaggagtaccatttctggccaatcttatcttgttaaaatccaaagaccttgatgtcatcctagggatggactggttagccagacataaaggtgtgatagactgtgccaacagaaaagtaactctcaacagctatgatggtcgagttgtaactgttcatgcattgtcatctgagtctttaaggtcaagactgaaccagataactttggaagagattcctatagtccgggagtatcctgatgtgttcccagatgatttacctggtatgccgcctaaaagggatatagagttcagaatagatttggtacctggaacaactccgatccataagagaccttatcgaatggcagccaatgagttggcagaagttaagaggcaagtagatgatttgctacagaaaggatacatcagaccgagttcatcaccatggggagctccggttatttttgtggaaaagaaagaccatactcagagaatgtgtgtggactatcgtgcactaaacgatgtgactattaagaataagtatccactacccaggattgatgatttgtttgatcaacttaaaggtgccactgttttctccaagatagatcttcgatcagggtatcatcagttgagaatcaaagagtatgggttgtttgaatgtactgttatgtcttttggacttaccaatgcccctgctttcttcatgaacttgatgaataaggtgtttatggaatacctagacaagttcgtggtggtctttattgatgatattcttatctactctcgaaccaaagaagagcatgaagaacatcttcgccttgcattggagaagctacgagaacatcaactgtatgctaagtttagcaagtgtgaattttggttgtctgaagtgaaattccttggtcacgtcatctcagccggaggagttgccgtcgatcctagtaacgtggaatccgtaaccaattggaagcaaccaaagacagtttcagagattcgcagtttcctaggccttgcaggatattatcggaggtttatagagaatttttccaagattgctaagcccatgacacgactgcttcagaaagatgtgaagtacaagtggtcggaagaatgtgaacagagttttcaagaattgaaaagtcgcttaatatcagctcctattttgattttgcctgatccaaagaagggttttcaagtgcattgtgatgcatccaaacttgggttaggttgtgttctgatgcaagatgggaaggtggttgcctatgcctctcgacagttacgtccgcatgagaagaactaccctactcatgatattgagttagctgcagtcgttcatgcattgaagatttggcatcattatcttttcggtactcgtacagaagaatttgaaagattaaatttgggaattgtcgatagaggtttcgttgcagccttagaagcgaaccccactctaattgatcaagttagagaagcccaaattaatgatcctgatattcaagagatcaagaagaatatgagaagaggaaaagctattggtttcttggaggatgagcacggaactgtatggttgggtgagagaatctgtgtccccgacaacaaagatttaaaggatgcaattctgaaagaagctcatgatactttatactccattcaccctggtagtactaagatgtaccaggatcttaaggaaagattttggtgggcaagtatgaagcgtgaaatcgcagaatacgtagcagtatgtgatgtttgtcagcgagtcaaggcagaacatcaaaaacccgccggtttgttgcaacctttgaagattcctgaatggaaatgggaagaaattggtatggattttattactggtttacccagaacgtcatcaggccatgactctatttgggtgatagtcgacagacttaccaaagtggctcatttcattccggtaaagacaacttattccggaagtcgcttagcggaattgtatatggcaaggattgtgtgtttgcatggcgtccctaagaagatagtgtctgatcgaggcagtcagtttacttcaaatttttggaagaaacttcaggaagagatgggttctaagctgaactttagtactgcttatcatccgcagacagacggacaaaccgaaagggtgaatcaaattttggaagacatgttgagagcttgtgctctagatttcggtggaagttgggataagaatctaccctatgcagaattttcgtacaacaacagttatcaagctagtcttcagatggctccttacgaagcactgtatggtcggaagtgtcgcactccgcttttgtgggatcaaacgggagaacgtcaggttttcggaacggatatcctaagggaagcagaagaaaaggtaaagatcattcaagaaagattgcgtgtggctcagtctcgtcataagagttatgccgacaatcgccgcagagatttgagttttgaagagggagattatgtgtatcttcgtgtcacgcctctacgaggagttcatcgttttcataccaagggaaaattggcaccgcgttttgtgggaccttataagattgtcagtagaagaggagaggttgcttatcagttggagttacctcaatctttggcaggagtacataatgtgttccatgtgtcgcaattgaaaaagtgtttaagggtacctaccgaagaagctaatattgagcagatagaagtccaagaggatttgacttatgttgagaaaccaatccgtatcctggaaacaagtgagagaagaaccaggaatcgagttatccgtttttgcaaagtccagtggagtaatcactcggaagaagaatcaacttgggaacgagaagatgaattgaactttggaatcgagttcgattcggatcggttttccctctctccaagccgcgagtttccttcgccgttgccgtcgccgtgggccttcgccgccgcctccgagcccctttaaaaggacccccggtgtctcctctacccgtcgccaccttcgccttcgcctctcgtcgtcggaaaagccctagcgccccgtgcgccgccgtcgtttcagccgtcgccgtcgctcgggaagaccgccgtcgtgctcgccaagtcgtcgccgtcctcgtccgccccttcgccgtcgccggagatcaccggagcagcttcgccgccgtcgacccgaagagcttcgccgcttcctcctcgtcgccgtcgccgtccgttggtcttccgccgccgtttaggtcaccgtgccgccgttcgccggcgagcgtgcgccgttcgagccgtcttctccgccgagccgccgccgctgtcggtgacgtcaccgctgacgtcatcggggtcgtccgccattccgtcgtttccggagagtccgttttcgcggaagaagagtttgaagagttccaaggccagcaaggcaagtcaccagaatatgtggctctatgtgatgtatgtcagcgggtcaaggcagaacatcagaaaccagccggtctgttacaaccgttgaagattccagagtggaagtgggaagaaataggaatggattttataaccggtctacccagaacgtcggcaggacatgattctatttgggtagtggttgatagattgactaaagtcgctcactttataccggttaaaacaacctatacgggacataagcttgcagagttatacatggccagagtgacagatggtcagacggaaagagtaaaccaaattttagaagatatgttgagagcctgtgttctagattttggtggaagttgggataagaatttgccgtacgcggaattctcatataacaacagttatcaagctagtttgcaa

SEQ ID NO: 15152 - DNA, 6468 bp, Oryza sativa
  Clone ID: TFbOSC400983j.C1.o2.fg
atggcggaagagagagaaagttttgagagatttttccgaggaactctgaacttctatggaattagcctgcatcatctgaatccaaactccatagtgcatatcgccaattttattcatgcctgcgaagcttttctgggcattagacctcattttgctttgttccgccgcatcttcttcctcaagccccagccgaacaagagcaaaccatgcgttgttgggggcgctggtttccaactcagaggaacactaagccaaaagtatttctccatgcccttcaagacctcaaacaaaggctggcacgcaaactggttttacgttcagaatcctgaaccagcactccccgagtactcctgtctccctccggtctgccaggacacatggaattcattgcctatgggagatgaagctgctcaggcagtggaactgatggagcgcatgctaaaactgaaggaacaaggtttgcagggaaagcagatcactcggcacttcatcaaaagtcggctagctccaatcaaagagagatcccgcacggcttttgaatttgatggcaaacatgatccaaatcgtgaagatccagactctcttgactttaaggtcatgaaggaaagaatgtacaagatcttctcaaatgctatcgttgtcagctattcacatctgctgccagttgtaccatacaatgctttcaacccccctccaccggagtttaccttgatgaagtctgatcctccgattacccaacaccgcactccttgtgggaagactagccaaactagtggagggccaaaaatccgttctgactctcatcccaccaccactcagtcggccaaccaatcagatttccgtaagaggaaattggtcctgagtgacgacgatgatgctgaaaaggctggcagcaaaggggtgactggaaaacatccaaggcaggctaacccaaagaagaaaacatccagtcgtcccatgccaaaaatcaggaagtcttctaggaagccatctgacatagatccttctagaaaagactccgaaccgactggcatggagacaggtttttcaaaagagaccgagccgactgcaggggatcgcctgagtgacgaacagccggcaaccgacaatgtaggtcccagcaatgagcccccgactggaaaccagtcggccgaagctagggtcgacgctaatcaggagcccccgactggaaaccagtcgggtacagagcgaaacaaggacatcctcgaagtagaagctcaagttgacaatcctcctaaaaaagatgccaatgtcgatctagggtctagctctcctgctaaagtacaagggcctgctcgtccccgaccggaaataatcacagctcctggtttggaatggtatattcctggtttggagatagaactgtgcagccggggtggttgttcagaatggttgggcctatacaacaggatgccgcgttacaagcctgagtacctgtttggtgttgagggttttgtccaggagttgcgtacgatgtcctttgtcattggatttgggactgcccctttttatgcccagattcctcatgatcgtcatgaagagaagtgccgagtcaaagtcaccttgaacagtaatagtgaagatatcccctcagtgatgtttgaagctggaggaagaaactacatccatgcatgtcaggaagtggcaaggatcgccataggagagctccgtgatcgctacagtgatcaattggccgacactgagtatcgctaccatcctcgccaaccccagggaagtgaccgtggcagttaccttgagactgaaggaattgagaatgatgctaccacgaagcatttggttgagatgttgtgggctatggatgaaagtcatgcggagactgtgttagccgctcaagatcgtgaagaccggaatcgtggtaagatttgcaagttagaagacaaggtggatcgtttggagaaggaattagccgcattgaagggagaagcaccgccgcagaaggccaggattcgtcttaccgcaaggaagagagctctatttgtccctcgctatcaactggcgccaaagatggtgaacactcgcagcaatgggaatggtcccaacaaccccaataacaacaacaatggagagaatcccactcttgctcaagttcttgctcaacagacacagcttatgaacatgatgatgcagcaatttcagaatcagcaaaaccaaggaaataaccatgcacctccacagaacaagttagcagaatttcttcgtgtgaggccgcctgttttctctagtaccactaatcctgttgaagctagtgattggctgcatgccatagagaagaagttggatttacttcagtgtactgatcaggagaaggtctcatttgcatcacatcagttgcatggccctgcctctgaatggtgggatcacttccgccttaacaggactactgctgaacctatcacttggcttgaattcaccgctgctttccggaagacgcatataccatcaggagtagtgtctctcaagaagaaggagttcaggtcgcttacccagggatctcgctctgttacggagtatctgcacgagttcaatcgtcttgctcgttatgctccggaagaagtgcgcaatgatgaagagcgccaggagaagtttttgggaggacttaatgatgagctttcttacccactcatggttggagattatcctgatttccagaaattagtggataaggctattcgtcaggaggacaagtacaatcgcatggagcagaagaaacgtcggattgctcaattcaagacacaacagggaaataatcagaagccgcgtcttactttaggaccccagcccatgccacagggaggttcttcgtctgttgttcgtccgcagcgtcagttcttcaacaacaatgctggcaacaacatccgtaatcaagctccacgtcctgttgcagctccagcacagcaacaacctgccaagagggagcaaggcagcaagcccgtggtgtgtttcaactgtggagatccaggacattatgctgacaagtgtccgaagccccgacgcgtgaaggttgtccctgcccagaataactctgctataccagcatccaaggctcgtgtaaatcatgtcactgctgcagaagctcaagatgctccagatgtgattttgggtacgttccttgttaactcagttcctgcaacagtacttttcgattctggtgctacacattcattcttatctatgagttttgcgggaaatcatgggatggaagtagaagatcttagacgtcctttgatggttagtaccccaagtaatcaagcactctctttgcaacgtagcccctctgtcagaatagaaattcaaggagtaccatttctggccaatcttatcttgttagaatccaaagaccttgatgtcatcctagggatggactggttagccagacataaaggtgtgatagactgtgccaacaaaaaagtaactctcaccagctatgatggtcgagttgtaactgttcatgcattgtcatctgagtctttaaggtcaagactgaaccagataactttggaagagattcctatagtccgggagtatcctgatgtgttcccagatgatttacctggtatgccgcctaaaagggatatagagttcagaatagatttggtacctggaacaactccgattcataagagaccttatcgaatggcagccaatgagttggcagaagttaagaggcaagtagatgatttgctacagaaaggatacatcagaccgagttcatcaccatggggagctccggttatttttgtggaaaagaaagaccatactcagagaatgtgtgtggactatcgtgcactaaacgatgtgactatcaagaataagtatccactacccaggattgatgatttgtttgatcagcttaaaggtgccactgttttctccaagatagatcttcgatcagggtatcatcagttgagaatcaaagaggaagatatacctaagacagcttttaccactaggtatgggttgttcgaatgtactgttatgtcttttggacttaccaatgcccctgctttcttcatgaacttgatgaataaggtgtttatggaatacctagacaagttcgtggtggtctttattgatgatattcttatctaccttcgaaccaaagaagagcatgaggaacatcttcgtcttgcattagagaagctacgagaacatcaactgtatgctaagtttagcaagtgtgaattttggttgtctgaagtgaaattccttggtcacgtcatctcagccggaggagttgccgtcgatcctagtaacgtggaatccgtaaccaattggaagcaaccaaagacagtttcagagattcgcagtttcctaggcctcgcaggatattatcggaggtttatagagaatttttccaagattgctaagcccatgacacgactgcttcagaaagatgtgaagtacaagtggtcggaagaatgtgagcagagttttcaagagttgaaaagtcgcttaatatcagctcctattttgattttgcctgatccaaagaagggttttcaagtgtattgcgatgcatccaaacttgggttaggttgtgttctgatgcaagatgggaaggtggttgcctatgcctctcgacagttacgtccgcatgagaagaactaccctactcatgatattgagttagctgcagtcgttcatgcattgaagatttggcgtcattatcttttcggtactcgtacagaagtgtacaccgatcacaagagtttaaagtatatctttactcagccggatctgaacatgagacaacggagatggttggaattaattaaggattatgacatgggaattcattatcatccgggaaaggctaatgttttagcagacgctcttagcagaaaaggctattgcaatgctacagaaggacgacagttgccattggaattatgcaaggaatttgaaagattaaatttgggaattgtcggtagaggtttcgttgcagccttagaagcgaagcccactctaattgatcaagttagagaagcccaaattaatgatcctgatattcaagagatcaagaagaatatgagaagaggaaaagctattggtttcttggaggatgagcaaggaactgtatggttgggtgagagaatctgtgtccccgacaacaaagatctaaaagatgcagttatgaaagaagctcatgatactttatactccattcaccctggtagtactaagatgtaccaggatctcaaggaaagattttggtgggcaagtatgaagcgtgaaatcgcggaatatgtagcagtatgtgatgtttgtcagcgagtcaaggcagaacatcagaaacccgccggtttgttgcagcctttgaagattcctgaatggaaatgggaagaaatatgtatggattttattactggtttacccagaacgtcatcaggccatgactctatttgggtgatagtcgacagacttaccaaagtggctcattttattccggtaaagacaacctattccggaagtcgcttggcggaattgtatatggcaaggattgtgtgtttgcatggcgtccctaagaagatagtgtctgatcgaggcagtcagtttacttcaaatttttggaagaaacttcaggaagagatgggttctaagctgaactttagtactgcttatcatccacagacagacggacaaaccgaaagggtgaatcagattttggaagacatgttgagagcttgtgctttagatttcggtggaagttgggataagaatctaccttatgcagaattttcatacaacaccagttatcaagctagtttacagatggctccttacgaagcactgtatggtcggaagtgccgcactccgcttttgtgggatcaaacgggagaacgtcaggttttcgggacggatatcctaaggaaagcagaagaaaaggtaaaggtcattcaagaaagattgcgagtggctcagtctcgacataagagttatgccgacaatcgccgtagagatttgagttttgaagaaggagactatgtgtatcttcgtgtcacgcctcttcgaggagttcatcgttttcacaccaaaggaaaattggcaccgcgttttgtgggaccttataagattgtcagtagaagaggagaggttgcttatcagttagaattacctcaatctttggcaggagtccataatgtgttccatgtgtcacaattgaaaaaatgtttaagggtacctaccgaagaagctaatattgagaagatagaagtccaagaggatttgacttatgttgagaaaccaatccgtatcctggaaacaaatgagagaagaaccaggaatcgagttatccgtttctgcaaagttcaatggagtaatcactcggaagaagaatcaacttgggaacgagaagatgaattgaagtcagctcattcgcacctgttcgccagttcttccgaatctcaaggacgagattctgtttaa

SEQ ID NO: 15153 - DNA, 4626 bp, Oryza sativa
  Clone ID: TFbOSC400991j.C1.o11.fg
atggttgttcagaatggttgggcctatgcaacaggatgccgcgctacaagcctgagtacttgtttggtgttgagggatttgtccaggagttgcattcctcatgatcgtcatgaagagaagtgccgagtcaaagtcactttgaacagtaatagtgaagatatcccctcagtgatgttcgaagctggaggaagaaactacatccatgcatgtcaggaggtagcaaggatcgccataggcgagctccgcgatcgctacagtgatcagttggccgacactgagtatcgctaccattctcgtcaaccccagggaagtgaccgtggcagctaccttgagactgagggaattgagaatgatgctaccacaaggcatttggttgagatgctgtgggctatggatgaaacccgtgcagagactgtgttagcagctcaagatcgtgaagatcggaatcgaggtaagatttgcaagctagaggacaaagtggatcgattggagaaggaactagccgcgttgaagggagaagcaccaccgcagaaggccaggatttgtcttaccgcaaggaagagagctctatttgtccctcgctatcaattggcaccaaaggtccgtgtggtggaaaaagaagttaccccagccctagcggatcctccggtcgtcaacatggtggtcactcgcagcaacgggaatggccccaacaacaacaataacaacaacaacaatggagagaatcccacacttgcccaagtcctggctcaacaggcacagcttatgaacatgatgatgcagcaactccagaaccagcagaaccagggaaataaccatgcacctccccagaacaagttagcagaatttcttcgtgtgaggccgcctactttctctagtaccactaatcctgttgaagctggcgattggctgcatgccatagagaagaagttggatttgcttcagtgcactgatcaggagaaggtctcatttgcatcacaccagttgcatggccctgcctctgaatggtgggatcacttccgcctgaataggactactgctgaacctatcacttggcttgagttcaccgctgctttccggaagatgcatataccatcgggagtggtgtctctcaagaagaaggaatttaggtcgctcacccagggatcccgctctgttacggagtatctacacgagttcaatcgtctggctcgttatgctccggaagatgtgcgcactgatgaagagcaccaggagaagttcttggaaggacttaatgatgagctttcttacccactcatgactggggattatcatgatttccagaagttagtggataaggctattcgtcaggaggacaagtacaatcgcatggagcagaagaaacgccggattgctcaattcaagacacaacaggggaataatcagaggccgcatcttactttaggaccccagtccatgccacagggaggttattcgtctgttgttcgtccgcagcgtcagttcttcaacaacaatgctggcaacaacatccgcaatcaagttccacgtcctgttgcagcctcgacacagcaacaacctgccaagagggagcaaggcagcaagcccgtggtgtgtttcaactgtggagacccaggacattacgctgacaagtgtccgaagccccgatgcgtgaaggttgtccctgcccagagcaactctaccgtatcagcatcaaaggcccgtgtcaatcatgttgctgctgcagaagctcaaggtgctccagatgtgattttgggtacgtttcttgttaactcagttcctgcaacagtgcttttcgattctggtgctacacattcattcttatctatgagttttgcgggaaatcatgggatggaagtagaagatcttagatgtcctttgatggttagtaccccaagtaatcaagcactctctttgcaacgtagcccctctgtcagaatagaaattcaaggagtaccatttctggccaatcttatcttgttagagtccaaagaccttgatgttatcctagggatggactggttagccaggcataagggtgtgatagactgtgctaacagaaaagtaactctcaccagcaatgatggtcgagttgtaactgttcatgcattgtcttctgagtctttaaggtcaatactgaaccaaataactttggaagagattcctatagtccgggagtatcccgatgtgttctcagatgatttacctggtatgccgcctaaaagggatatagagttcagaatagatttggtaccaggaacaactccgatccataagagaccttatcgaatggcagccaacgagttggcagaagtcaagaggcaagtggacgatttgcttcagaaaggaattgatgatttgtttgatcagcttaaaggtgccactgttttctccaagatagatcttcgatcagggtatcatcagttgagaatcaaagaggaagatatacctaagacagcttttaccactaggtatgggttgttcgaatgtactgttatgtcttttggacttaccaatgcccctgctttcttcatgaacttgatgaataaggtgtttatggaatacctagacaagttcgtggtagtctttattgatgatattcttatctactcccgaaccaaagaagagcatgaagaacaccttcgccttgcattggagaagctacgagagcatcaactgtatgctaagtttagcaagtgtgaattttggttgtctgaagtgaagttccttggtcacgtcatctcagcaggaggagttgccgtcgatcctagtaatgtagaatccgtaaccaactggaaacaaccaaagaccgtttcagagattcgcagtttcctaggcctcgcaggatattatcggaggtttatagagaatttttccaagattgctaagcccatgacacggctgcttcagaaagatgtgaagtacaagtggtcagaagaatgtgagcagagttttcaagagttgaagaatcgcttaatatcagctcctattttgatcttacctgatccaaagaagggattccaagtgtattgcgatgcatccaaacttgggttaggttgtgttctgatgcaagatgggaaggtggttgcctatgcatctcgtcagttacgtccgcatgagaagaactaccctactcatgatcttgaattagctgcagtagttcgtgcgttgaagatttggcgtcattatcttttcggtactcgtacagaggtgtataccgatcacaagagtttaaagtatatctttactcagccggatctgaacatgagacaaaggagatggttggaattaattaaggattatgacatgggaattcattaccacccaggaaaggttaatgttgtagcagacgctcttaggaggaaaggctattgcaatgctacggaaggacgacagttgccattggaattatgcaaggaatttgaaagattaaatttgggaattgtcagtagaggtttcgttgcagccttagaagcgaagcccactctaattgatcaaattagagaagcccaaattaatgatcctgatattcaagaaatcaaaaagaatatgagaagaggaagagctatcggtttcttggaggatgagcaaggaacagtatggttgggcgagagaatctgtgttcctgacaacaaagatttaaaagatgcaattctgaaagaagctcatgatactttatattccattcaccctggtagtaccaaaatgtaccaggatctcaaggaaagattttggtgggcaagtatgaagcgtgaaatcgcagagtacgtagcagtatgtgatgtttgtcagcgagtcaaggcagaacatcagaaacctgccggtttgttgcagcctttgaagattcctgaatggaaatgggaggaaatcggtatggatttcatcactggtctacccagaacgtcatcaggccatgactctatttgggtgatagtcgacagacttaccaaagtggctcatttcatcccagtaaagacaacctattccggaagtcggttggcggaattgtatatggcaaggattgtgtgtttgcatggcgtccctaagaaaatagtgtctaatcgaggcagtcagtttacctcaaatttttggaagaagcttcaggaagagatgggttctaagctgaactttagtactgcttatcatccgcagacagacggacaaaccgaaagggtgaatcagattttggaagacatgttgagagcttgtgctttagacttcggtggaagttgggataagaatctaccttatgcggaattctcgtacaacaacagttatcaagctagtcttcagatggctccgtacgaagcactgtatggtcgaaagtgccgcactccacttttgtgggatcaaacgggagaacgtcaggttttcgggacggatatcctgagggaagcagaagaaaaggtgaaaatcattcaagaaagattgcgtgtggcccagtctcgtcataagagttatgccgacaatcgccgcagagatttgagtttcgacgaaagagattatgtgtatcttcgtgtcacgcctcttcgaggagttcatcgttttcacaccaaaggaaaattggcaccgcgttttgtgggaccttataagattgtcagtagaagaggagaggttgcttattag

SEQ ID NO: 15154 - DNA, 2361 bp, Oryza sativa
  Clone ID: TFbOSC401051j.C1.o104.gm
atgccgtgttacaagcctgagtacctgtttggagttgagggttttgtcgaggagttgcgtacgatgtcctttgtcattggatttgggaatgctcctttttatgcccagattcgtcatgatcgtcatgaagaaaagtgccgagtcaaagtcaccttgaacagcaatagtgaagatatcccctcagtgatgtttgaagctggaggaagaaactacatccatgcatgtcaggaggtggcaaggattgccataggagagctccgtgatcgctacagtgatcagttggccgacactgagtatcgctatcatcctcgccaacctcagggaagtgaccgtggcagttaccttgagactgaaggaattgagaatgatgttaccacaagacatttggttgagatgttgtgggctatggatgaaagtcgtgcggagactgtgttagcagctcaagatcgtgaagatcggaatcgtggtaagatttgcaagctagaagacaaggtggatcgtttggagaaggaattagccgcattgaagggagaagcaccgccgcagaaggctaggattcgtcttaccgcaaggaagagagctttgtttgtccctcgctatcaattggcgccaaaggtccgcgtggtggaaaaagaagttgccccagcaaatcctccggtcatcatcataagtagtgatgaagaagaagaacccaagcgcaacaattccaagtttgagtgggtagctatcaaagatgaggaagatgagccgaacgagccttcgatcgacctcctatgctcggaagaactagataccactaatcctgttgaagctggtgattggctgcatgccatagagaagaaattggatttgcttcagtgcactaatcaggagaaggtctcttttgcatcacatcagttgcatggccctgcctctgaatggtgggatcacttccgcctgaataggattactgctgaacctatcacttggcttgaattcaccgctgctttccggaagacgcatataccatcgggagtagtgtctctcaagaagaaggagttcaggtcgcttacccagggatctcgctctgttacggagtatctgcacgagttcaatcgtcttgctcgttatgctccggaagatgtgcgcaatgatgaagagcgccaggagaagtttttgggaggacttaatgatgagctttcttacccacttatggttggagattaccctgatttccagaaattagtggataaggctattcgtcaggaagacaagtacaatcgcatggagcagaagaaacgtcggattgctcaattcaagacacaacagggaaataatcagaagccgcgtcttactttaggaccccagcccatgccacagggaggttcttcgtctgttgttcgtccgcaacgtcagttcttcaacaacaatgctggcaacaacatccgtaatcaagctccacgtcctgttgcagctccagcacagcaacaacctgccaaaagggagcaaggcagcaagcctgtggtgtgtttcaactgtggagatccaggacattatgctgacaagtgtccgaagccccgacgcgtgaaggttgtccctgtccagaataactctgctgtaccagcatcaaaggcccgtgtcaatcatgttgctgctgcagaagctcaagatgctccagatgtgattttggtccgggagtatcctgatgtgttcccagatgatttacctgaaaggatacatcagaccgagttcatcaccatggggagctccggatattatcggaggtttatagagaatttttccaagattgctaagcccatgacacgactgcttcagaaagatgtgaagtacaagtggtcggaagaatctttagaagcgaagcccactctaattgatcaagttagagaagcccaaattaatgatcctgatattcaagagatcaagaagaataggagaagaggaaaagctattggtttcttggaggatgagcacggaactccgtgctccgccgtcgctccagctgtcgccgccgctcgggaagaccgccgtcgtcatcgccaagtcgccgccgtcctcgtccgccccttcgcagccgtcggaacccgccggagcatcgtcgccgtcgtcaacccgaaggtagccgccgcttccttctcgtcgccgtcgccgtccgttccttttccgccgccgttttggtcaccggtgtgttcgccgcgttgtcctctacgtgctggtgccctccgttggtgccgtggtgccgccgttcgccggcgagtgtccgccgcccgagccgtcttcttcgccgagccgccgccgtcgtcggtgacgtcatcgctgacgtcatcgggatcctatcccgtgagccggtcgtggaccgattga

SEQ ID NO: 15155 - DNA, 5598 bp, Oryza sativa
  Clone ID: TFbOSC401057j.C1.o1.fg
atggccgagatcgattcgatctaccacgtggcggtggctgacaggatgctgacatcagcaatgacaacaccaccggcggcggctcgggaccttatggtcgccggcgatctagggcacggcggtgctatccgagggcactatcgtgatgaggggaactcaccggtgcacgacacgacgacggatggcgatagcggtgaggaagaccgccgtcgtggtcgccaagtcgccgccgtcctcatccgccccttcgccgtcgccgaagatcaccggagcaccgtcgccgccgtcgacccgatctccgccgccgcttcttcttcgtcgtcgtcgccgtccgttcctcttccgccgtcgctttggtcgccgattccgtcgtttccggagagtccgttttcgccgaagaagagtttgaagagttccaaggccggcaaggaaactcctggtttggaatggtatattcctggtttggagatagaactgtgcagccgggatggttgttcagaatggttgggcctatacaacaggatgccgcgctacaagcctgagtacttgtttggtgttgagggttttgtccaggagttgcgtacgatgtcctttgtcattggaattgggactgcccctttttatgctcagattcctcatgatcgtcatgaagagaagtgccgagtcaaagtcaccttgaacagtaatagtgaagatatcccctcagtgatgttcgaagctggaggaagaaattacatccatgcatgtcaggaggtggcaaggatcgccataggagagctccgcgatcgttacagtgatcagttggccgacactgagtatcgctaccatcctcgccaacctcagggaagtgaccgtggcagctaccttgagactgaaggaattgagaatgatgctaccacaaggcatttggttgagatgttgtgggctatggatgaaagccgtgcggagactgtgttagcagctcaagatcgtgaagaccggaatcgtggtaagatttgcaagttagaagacaaggtggatcgtttggagaaggaactagctgcgttgaagggagaagcaccgccgcagaaggccaggattcgtctcaccgcaaggaagagagctctatttgtccctcgttaccaattggcgccaaagtttcccccggtttctcttcttgtgccctgtccatgccagatggtgaacactcgcagcaacgggaatggccccaacaaccccaataacaacaacaatggagagaatcccactcttgctcaagttcttgctcaacagactcagttaatgaacatgatgatgcagcaacttcagaaccagcagaaccaaggaaataaccatgcacctccccagaacaagttagcagaatttcttcgtgtgaggccgcctactttctctagtaccactaatcctgtcgaagctggtgattggttgcatgccatagagaagaagttggatttgcttcagtgcactgatcaggagaaggtctcatttgcatcacatcagttgcatggccctgcctctgaatggtgggatcacttccgccttaacaggactactgctgaacctatcacttggcttgaattcaccgctgctttccggaagacgcatataccatcgggagtggtgtctctcaagaagaaggaattcaggtcgctcacccagggatctcgctctgttacggagtatttgcacgagttcaatcgtctggcttgttatgctccggaagatgtgcgcaatgatgaagagcgccaagagaagttcttggaaggacttaatgatgagctttcttatccactcatgactggagattattctgatttccagaagttggtggataaggctattcgtcaggaggacaaatacaaccgcatggagcagaagaaacgccggatggctcaattcaagacacaacaggggaataatcagaggccgcgtcttactttaggaccccagtccatgccacatggaggttcttcgtctgttgttcgtccgcagcgtcagttcttcaacaacaatgctggcaacaacatccgcaatcaagctccacgccctgttgcagttccaacacagcaacagcctgccaagagggagcaaggcagcaagcccgtggtgtgtttcaactgtggagacccaggacattacgctgacaagtgtccgaagccccgacgcgtgaaggttgtccctgctcagagcaactctgctgtaccagcatcaaaggcccgtgtcaatcatgttgctgctgcagaagctcaagatgctccagatgtgattttgggtacgttccttgttaactcagttcctacaacagtgcttttcgattctggtgttacacattcattcttatctatgagttttgcgggaaatcatgggatggaagtagaagatcttagacgtcctttgatggttagtaccccaagtaatcaagcactctctttgcaacgtagcccctctgtcagaatagaaattaaaggagtaccatttctggccaatcttatcctgttagaatccaaagaccttgatgtcatcctagggatggactggctagccagacataaaggtgtgatagactgtgctaacagaaaagtaactctcaccagcaatgatggtcgagttgtaactgttcatgcattgtcttctgagtctttaaggtcaagactgaaccaaataactttggaagagattcctatagtccaggagtatcccgatgtgttcccagatgatttacctggtatgccgcccaaaagggatatagagttcagaatagatttggtacctggaacaactccgatccataagagaccttatagaatggcagccaatgagttggcagaagtcaagaggcaagtagatgatttgcttcagaaaggatacatcagaccaagttcatctccatggggagctccggttatttttgtggaaaagaaagatcatacccagagaatgtgtgtggactatcgtgcactaaatgatgtgactatcaagaataagtatccactacccagaattgatgatttgtttgatcagcttaaaggtgctactgttttctccaaaatagatcttcgatcaggatatcaccagttgagaatcaaagaggaagatatacctaagacagcttttaccactaggtatgggttgttcgaatgtactgttatgtcttttggacttaccaatgcccctgctttcttcatgaacttgatgaataaagtgtttatggaatacctagacaagttcgtggtggtctttattgatgatattcttatctactctcggaccaaagaagagcatgaagaacatcttcgccttgcattggagaagctacgagaacatcaactatatgctaagtttagcaagtgtgaattttggttgtctgaagtgaagttccttggtcacgtcatctcagcaggaggagttgccgtcgatcctagtaatgtggaatccgtaaccaactggaaacaaccgaagacagtttcagagattcgcagtttcttaggcctcgcaggatattatcggaggtttatagagaatttttccaagattgctaggcccaggacacgactgcttcagaaagatgtaaagtacaagtggtcggaagaatgtgagcagagttttcaagaattgaagaatcgcttgatatcagctcctattttgattttgcctgatccaaagaagggtttccaagtgtattgcgatgcatccaaacttgggttaggttgtgtactgatgcaagatgggaaggtggttgcctatgcatctcgtcagttacgtccgcatgagaagaactaccctactcatgatcttgaattagctgcagtagttcatgcgttgaagatttggcgtcattatctcttcggtactcgtacagaggtatataccgatcacaagagtttaaagtatatctttactcagccggatctgaacatgagacaaaggagatggttggaattaattaaggagtatgacatgggaattcattatcacccgggaaaggctaatgttgtagcagacgctcttagcaggaaaggctattgcaatgctacggaaggacgacagttgccgttggaattatgcaaggaatttgaaagattaaatttgggaattgtcagtagaggttttgttgcaaccttagaagcaaagcccactctaattgatcaagttagagaagcccaaattaatgatcctgatattcaagaaatcaagaagaatatgagaagaggaaaagctattggtttcttggaagatgagcacggaactgtatggttgggtgagagaatctgtgtccccgacaataaagatttaaaagatgcaattctgaaagaagctcatgatactttatactccattcaccctggtagtaccaaaatgtaccaggatctcaaggaaagattttggtgggcaagtatgaagcgtgaaatcgcagaatacgtagcagtatgtgatgtttgtcagcgagtcaaggcagaacatcagaaacctgccggtttgttgcagcctttgaagattcctgaatggaagtgggaagaaatcggtatggattttatcactggtttacccagaacgtcatcaggccatgactctatatgggtaatagtcgatagacttaccaaagtggcacatttcattccggtaaagacaacttattccggaagtcgcttagcggaattatatatggcaaggattgtgtgtttacatggcgttcctaagaagatagtgtctgatcgaggcagtcaatttacttcaaatttttggaagaaacttcaggaagagatgggttctaagctgaactttagtactgcttatcatccgcagacagacggacaaaccgaaagggtgaatcagattttggaagacatgttgagagcttgtgctttagacttcggtggaagttgggataagaatctaccttatgcggaattctcgtataacaacagttatcaagctagtctacagatggctccttacgaagcactgtatggtcggaagtgccgcactccgcttttgtgggatcaaacgggagaacgtcaggttttcgggacggatatcctaagggaagcaaaagaaaaggtgaaaatcattcaagaaagattgcgagtggctcagtctcgacataagagttatgctgacaatcgccgcagagatctaagttttgaagaaggagattatgtgtatcttcgtgtcacgcctcttcgaggagttcatcgtttccacaccaaaggaaaattggcaccgcgttttgtgggaccttataagattgtcagtagaagaggagaggttgcatatcaattggagttacctcaatccttggcaggagtccataatgtgttccatgtgtcgcaactaaaaaagtgtttaagggtacctatcgaagaagctaatcttgaacagatagaagtccaagaggatctgacctatgttgagaaaccaatccgtatcatggaaatagatgagagaaaaaccaggaatcgagttatccgtttttgcaaagtccaatggggtaatcactcggaagaagaatcaacttgggaacgagaagatgaattgaagtcagctcatccgcatctgttcgccagttcttccgaatctcgaggacgagattctgtttaa

SEQ ID NO: 15156 - DNA, 4221 bp, Oryza sativa
  Clone ID: TFbOSC401068j.C1.o1.fg
atgaattttagagtcgatttgggacgcgacattgaagctagtgattggctacatgccatagagaagaagttggatttacttccgtgtactgatcaggagaaggtctcatttgcatcacatcagttgcatggccctgcctctgaatggtgggatcacttccgtcttaacaggactactgctgaacctatcacttggcttgaattcaccgctgctttccggaagacgcatataccatcgggggtagtgtctctcaagaagaaggagttcaggtcgcttacccagggatctcgctctgttacggagtatctgcacgagttcaatcgtcttgctcgttatgctccggaagatgtgcgcaatgatgaagagcgccaggagaagtttttgggaggacttaatgatgagctttcttacccacttatggttggagattaccctgatttccagaaattagtggataaggctattcgtcaggaagacaagtacaatcgcatggagcagaagaaacgtcggattgctcaattcaagacacaacagggaaataatcagaagtcgcgtcttactttaggaccccagtccatgccacagggaggttcttcgtctgttgttcgtccgcaacgtcagttcttcaacaacaatgctggcaacaacatccgtaatcaagctccacgtcctgttgcagctccagcacagcaacaacctgccaagagggagcaaggcagcaagcccgtggtgtgtttcaactgtggagatccaggacattatgctgacaagtgtccgaagccccgacgcgtgaaggttgtccctgcccagagtaactctgctgtaccagcatcaaaggcccgtgtcaatcatgttgctgctgcagaagctcaagatgctccagatgtgattttgggtacgttccttgttaactcagttcctgcaacagtacttttcgattctggtgctacacattcattcttatctatgagttttgcgggaaatcatgggatggaagtagaagatcttagacgtcctttgatggttagtaccccaagtaatcaagcactctctttgcaacgtagcccctcggtcagaatagaaattcaaggagtaccatttctggccaatcttatcttgttagaatccaaagaccttgatgtcatcctagggatggactggttagccagacataaaggtgtgatagactgtgccaacagaaaagtaactctcaacagctatgatggtcgagttgtaaccgttcatgcattgtcttctgagtctttaaggtcaagactgaatcagataactttggaagagattcctatagtccgggagtatcctgatgtgttcccagatgatttaccgggtatgccgcctaaaagggatatagagttcagaatagatttggtacctggaacaactccgatccataagagaccttatcgaatggcagccaatgagttggcagaagttaagaggcaagtagatgatttgctacagaaaggatacatcagaccgagttcatcaccatggggagctccggttatttttgtggaaaagaaagaccatactcagagaatgtgtgtggactatcgtgcactaaacgatgtgactatcaagaataagtatccactacccaggattgatgatttgtttgatcagcttaaaggtgccactgttttctccaagatagatcttcgatcagggtatcatcagttgagaatcaaagaggaagatatacctaagacagcttttaccactaggtatgggttgttcgaatgtactgttatgtcttttggacttaccaatgcccctgctttcttcatgaatttgatgaataaggtgtttatggaatacctagacaagttcgtggtggtctttattgatgatattcttatctactctcaaaccaaagaagagcatgaagaacatcttcgccttgcattggagaagctacgagaacatcaactgtatgctaagtttagcaagtgtgaattttggttgtccgaagtgaaattccttggtcacgtcatctcagccggaggagttgccgtcgatcctagtaacgtggaatccgtaaccaattggaagcaaccaaagacagtttcagagattcgcagtttcctaggccttgcaggatattatcggaggtttatagagaatttttccaagattgctaagcccatgacacgactgcttcagaaagatgtgaagtacaaatggtcggaagaatgtgagcggagttttcaagagttgaaaagtcgcttaatatcagctcctattttgattttgcctgatccaaagaagggtttccaagtgtattgcgatgcatccaaacttgggttaggttgtgttctgatgcaagatgggaaggtggttgcctatgcatctcgtcagttacgtccgcatgagaagaactaccctactcatgatattgagttagctgcagtcgttcatgcattaaagatttggcgtcattatcttttcggtactcgtacagaagtgtacaccgatcacaagagtttaaagtatatctttactcagccggatctgaatatgagacaacggagatggttggaattaattaaggattatgacatgggaattcattatcatccgggaaaggctaatgttgtagcagacgctcttagcagaaaaggttattgcaatgctacagaaggacgacagttgccattggaattatgcaaggaatttgaaagattaaatttgggaattgtcggtagaggtttcgttgcagctttagaagcaaagcccactctaattgatcaagttagagaagcccaaattaatgatcctgatattcaagagatcaagaagaatatgagaagaggaaaagctattggtttcttggaagatgagcacggaactgtatggttgggtgaaagaatctgtgtccccgacaacaaagatctaaaggatgcaattctgaaagaagctcatgatactttatactccattcaccctggtagtaccaagatgtaccaggatctcaaggaaagattttggtgggcaagtatgaagcgtgaaatcgcagaatacgtagcagtatgtgatgtttgtcagagagtcaaggcagaacatcagaaacccgccggtttgttgcaacctttgaagattcctgaatggaaatgggaagaaataggtatggattttatcactggtttacccagaacgtcatcaggccatgactctatttgggtgatagtcgatagacttaccaaagtggctcatttcattccggtaaagacaacctattctggaagtcgcttggcggaattgtatatggcaaggattgtgtgtttgcatggcgtccctaagaagatagtgtctgatcgaggcagtcagtttacttcaaatttttgggagaaacttcaggaagagatgggttctaagctgaactttagtactgcttatcatccgcagacagacgggcaaaccgaaagggtgaatcaaattttggaagacatgttgagagcttgtgctctagatttcggtggaagttgggataagaatctaccctatgcagaattttcgtacaacaacagttatcaagctagtctacagatggctccttacgaagcactgtatggtcggaagtgccgcactccgcttttgtgggatcaaacgggagaacgtcaggttttcgggacggatatcctaagggaagcagaagaaaaggtaaagatcattcaagaaagattgcgagtggctcaatctcgttataagagttatgccgacaatcgccgcagagatttgagttttgaagaaggagattatgtgtatcttcgtgtcacgcctcttcgaggagttcatcgttttcagaccaaaggaaaattggcaccgcgttttgtgggaccttataagattgtcagcagaagaggagaggttgcttatcagttggagttacctcaatccttggcaggagtccataatgtgttccatgtgtcgcaattgaaaaagtgtttaagggtacctaccgaagaagctaatattgaccagatagaagtccaagaggatttgacttatgttgagaaaccaatccgtatactggaaacaaatgagagaagaaccaggaatcgagttatccgtttctgcaaagttcaatggagtaatcactcggaagaagaatcaacgtgggaacgagaagatgaattaaagtcagctcatccgcttctgttcgccagttcttccgaatctcgaggacgagattctgtttaa

SEQ ID NO: 15157 - DNA, 3762 bp, Oryza sativa
  Clone ID: TFbOSC401143j.C1.o24.gm
atggccgccaccggcaaccataggggcacgggcgcgctgcctcccgccggccgcgccgacgtggccgccttcgggcgcgacgagtggccgccgcgtggggcccggccgtcagccgcccacgccctcggagtaaaagcctttttcctttccgttggtcgtgtagacgctgtagcttcggaagatccgctctacgtggaggttgaagccgaccttcgccgcatcctcaccgacctcgtccacccctccgtttcgcacgccgaccgccggagcaccgtcgaccccgtccacccaagccgcgccgccgccttcctccgctccgatgtaagttggcccggcctgggggaggcgggacgttacacgcgccgcctcccgtcggctgtgccggcgtggccgccttcgggcgcgccccgcggctgccgtgtggggcccggctgtcagccgcccacgcccttaggtgcggctgacgcgtgggacccacggcgtcggccggtgcgagcccgggtgcgcccggtccaccgtggaccgtggggctgccgcgtgggccccacccccgtggacccggcaaatgaaggctacacgagctgcggcccggtagtcgacatgtcatggcacagggctggtgtcctgctgctaggggctcagtcctgcctacctgtcccggaggttccggccgtagcgtcgtgtgccctagcttcgccgtcgccgccgccgctccagccgtgctccgccgccgttccagacgtcgccgtcgctcgggaagaccgtcgtcgtggtcgccaagtcgtcgccgtcctcgtccgccccttcgccgtcgccggagatcgtcggagcttcgtcgccgtcgacaacccgaaggtttccgccgtttcctcctcgtcgccgtcgtcgttcgttgtttttccgccgccgttttggtcaccggtgtgttcgccgcgtcgtcctctacgtgctggtgccctccgtttgcgtcctcgcgccgccgttcgccggcgagcgtgcgccgcccgagccgtccgctccgccgagccgccgccgctgtcggtgacgtcattgccgacgtcatcggggtcgtccgccgtgagccggcctgagtacctgtttggtgttgagggttttgtccaggagttgcgtacgatgtcctttgccattggatttgggactgcccctttttatgcccagattcctcatgatcgtcatgaagaaaagtgccgagtcaaagtcaccttaaacagcaatagtgaagaggtcccctcagtgatgttcgaagctggaggaagaaactacgtccatgcatgtcaggaagtggcaaggatcgccataggagaactccgtgatagctacagtgatcagttggccgacactgagtatcgctaccatcctcgccaaccccagggaagtgaccgtggcagctaccttgaaactgaaggaattgagaatgatgctaccacaaggcatttggttgagatgctgtgggctatggatgaaagtcgtgcggagactgtgttagcggctcaagatcgtgaagaccggaatcgtggtaagatttgcaagctagaagacaaggtggatcgtttggagaaggaactagctgcattaaagggagaagcaccgccgcagaaggccaggattcgcctcaccgcaaggaagagagctctattcgtccctcgctatcaattggcgccaaaggttcgtgtggtggagaaagaagttgccccatcccaagcggatcctccggtcatcatcataagtgatgaagaagaagaatccaagcgcaacaattccaagattgagtgggtagcaacccaagatgatgaagacgagccgaacgagccttcaatcgacctccgatgcttggaagaactagattttcccccggtttctcttcttgtgccatgttcctgccagatggtgaatactcgcagcaacgggaatggtcccaacaaccccaataacaataacaatggagagaacccaactctggcccaagttcttgctcaacagacacagcttatgaacatgatgatgcagcaacttcagaatcagcagaaccaaggaaataaccatgcacctcctcagaataagttagcagaatttcttcgtgtgaggccgcctgttttctctagtaccactaatcctgttgaagctggtgattggctgcatgccatagagaagaagttggatttacttcagtgcactgatcaggagaaggtatcttttgcatcacatcagttgcatggctctgcctttgaatggtgggatcacttccgcctgaataggactactgctgaacctatcacttggcttgaattcaccgctgctttccggaagacgcatataccatcaggagtagtgtctctcaagaagaaggagttcaggtcgcttactcagggatctcgctctgttacggagtatctgcacgagttcaatcgtcttgctcgttatgctccggaagatgtgcgcaatgatgaagagcaccaggagaagtttttgggaggacttaatgacgagctttcttacccactcatggttggagattatcctgatttccagaaattagtggataaggctatacgtcaggaggacaagtacaattgcatggagcagaggaaacgtcggattgctcacttcaaggcacaacaagggagtaatcagaagccgcgttttactttaggaccccagtctatgccacagggaggttcttcgtctgttgttcgtccgcagcgtcagttcttcaacaacaatgctggcaacaacatccgcaatcaagctccacgtcctgttgcagctccaacacagcaacagcctgccaagagggagcaaggcagcaagcccgtggtgtgtttcaactgtggagacccaggacattatgctgacaagtgtccgaagccccgtcgcgtgaaggttgtacctgcccagagtaactctgctgtaccagcatcaaaggcccgtgtcaatcatgtcgctgctgcagaagctcaagatgctccagatgtgattttggatgatattcttatctattctcgaaccaaagaagagcatgaagaacatcttcgccttgcattggagaagctacgagagcatcaactgtatgctaagttcagcaagtgtgaattttggttgtctgaagtgaagttccttggtcacgtcatctcagcaggaggagttgccgttgatcctagatattaccggaggtttatagagaatttttccaagattgctaagcccatgacacgactgcttcagaaagatgtgaagtacaagtggtctgaagaatcgccgtgtgccctagcttcgccgtcgccgccgccgctccagccgtgctccgccgccgttccagacgtcgccgtcgctcgggaagaccgtcgtcgtggtcgccaagtcgtcgccgtcctcgtccgccccttcgccgtcgccggagatcgtcggagcttcgttgccgtcgacaacccgaaggtttccgccgtttcctcctcgtcgccgtcgtcgttcgttgtttttccgccgccgttttggtcaccggtgtgttcgccgcgtcgtcctctacgtgctggtgccctccgtttgcgtcctcgcgccgccgttcgccggcgagcgtgcgccgcccgagccgtccgctccgctgagccgccgccgctgtcggtgacgtcattgccgacgtcatcggggtcgtccgccgtgagccgctacctcagcgccgaccgcttcggcgctgagatggccaatctcagcgccaatggcctggcgctgagttttggtacttag

SEQ ID NO: 15158 - DNA, 1254 bp, Oryza sativa
  Clone ID: TFbOSC401143j.C1.o4.fg
atgtcatggcagagggttggtgccctgctgctaggggctcagtctcgcctgcctgtcccgggggttccggccgtaggcgggattaggtcggtactcttgtctatggctaggatgggttggaaactatgtcacgtcttccgtctgtataccgtggtgatgtttaacagagaaaaaggaaagaatgtcagcaggcatgcctccagtaactcaagttttcaactccatccaccactagcctcaagagagttaacaagggtacacccttggtccattccaagcatgctgcttggttcacagctaccattggttggaagtcaagaccaaaatcagtatgtgtttgatcgagcatttgccacccaggtcaatgagcttccaatgccagaagaggatgtccccttttgtcaggattgtagagagcaaggacactatgccctgaattgtccatgggtatataccaaagaagctccttcctttggtttagcagggcaggcatcgctaaaccagcctcctcgcaccaagtcaagcttgcagcctagtgtgcaaagcagagagcccaatgaagagaatccattgaatcccgggaattgctttcctcctagcctttcgtaccacgtggggtcacgtactaagcacgccaaaggcaagaagagtaagaatcagaagagaaaagcgccgatgcgaactgaagaagaagtacgtaagatgactattaccagcaccgaatggcctccagcagggataactattcctagacgtcaaagaggaaataccttccgaggtgcacggcagttgacccagcacctcctaagccatggtggcagagtatctgatagtgaagggtcagatcaagtctcctcggattatgaatatgagtccccccgacgtctcggcgaggaagagatggaattaaaagcatgcacccgttgcggagaaattggacacattgctagcatgtgtctcacactctgccctcattgtgaagaagaccatccaccaggggagtgtcccacccgcaaggtcacatgttttctatgcgaaggtacaaaccatgtgcccaaggattgccaactcagtgtgttgttgaccaagaccgcagaaatccaacgaacaaccctacgattgtctcatcagctagtcagctccaacagcaacctcgacgatatcatccacagcaccaatgctcctcctgctgcacctgactctgcaataaatcatagcaataataccttcagcaccaaccattctctgcactga

SEQ ID NO: 15159 - DNA, 5340 bp, Oryza sativa
  Clone ID: TFbOSC401275j.C1.o46.fg
atgatcgactatgatgacgaaattgctcatcaaacagtagtagagtgggctatgttgaagaggcttgacaccaatagcagtgtagcaaccaatgataatgacaaagacgctcatcagcatttgcatagtaggtcaaccatgaagattccgtcgtttccggagagtccgttttcgcagaagaagagtttgaagagttccaaggccagcaaggcaactcctggtttggaatgttatattcctggtttggagatagaactgtgcagccggggtggttgttcagaatggttgggcctatacaacaggatgccgcgttacaagcctgagtacctgtttggtgttgagggttttgtccaggagttgcgtacgatgtcctttgtcattggatttgggactgcccctttttatgcccagattcctcatgatcgtcatgaagagaagtgccgagtcaaagtcaccttgaacagtaatagtgaagatatcccctcagtgatgtttgaagctggaggaagaaactacatccatgcatgtcaggaggtggcaaggatcgccataggagagctccgtgatcgctacagtgatcagttggccgacactgagtatcgctaccatcctcgccaaccccagggaagtgaccgtggcagttaccttgagactgaaggaattgagaatgatgctaccacgaagcatttggttgagatgttgtgggctatggatgaaagtcgtgcggagactgtgttagccgctcaagatcgtgaagaccggaatcgcggtaagatttgcaagttagaagacaaggtggatcgtttggagaaggaattagccgcattgaagggagaagcaccgccgcagaaggccaggattcgtcttaccgcaaggaagagagctctatttgtccctcgctatcaactggcgccaaagatggtgaacactcgcagcaatgggaatggtcccaacaaccccaataacaacaacaatggagagaatcccactcttgctcaagttcttgctcaacagacacagcttatgaacatgatgatgcagcaatttcagaatcagcaaaaccaaggaaataatcatgcacctccacagaacaagttagcagaatttcttcgtgtgaggccgcctgttttctctagtaccactaatcctgttgaagctagtgattggctgcatgccatagagaagaagttggatttacttcagtgtactgatcaggacaaggtctcatttgcatcacatcagttgcatggccctgcctctgaatggtgggatcacttccgccttaacaggactactgctgaacctatcacttggcttgaattcaccgccgctttccggaagacgcatataccatcaggagtagtgtctctcaagaagaaggagttcaggtcgcttacccagggatctcgctctgttacggagtatctgcacgagttcaatcgtcttgctcgttatgctccggaagatgtgcgcaatgatgaagagtgccaggagaagtttttgggaggacttaatgatgagctttcttacccactcatggttggagattatcctgatttccagaaattagtggataaggctattcgtcaggaggacaagtacaatcgcatggagcagaagaaacgccggattgctcaattcaagacacaacaggggaataatcagaagccgcgtcttactttaggaccccagtctgtgccacagggaggttcttcgtctgttgttcgtccgcagcgtcagttcttcaacaacaatgctggcaacaacatccgtaatcaagctccacgtcctgttgcagttccagcacagcaacaacctgccaagagggagcaaggcaacaagcccgtggtgtgtttcaactgtggagatccaggacattatgctgacaagtgtccgaagccccgacgcgtgaaggttgtccctgcccagaataactctgctgtaccagcatccaaggctcgtgtaaatcatgtcgctgctgcagaagctcaaggtgctccagatgtgattttgggtacgttccttgttaactcagttcctgcaacagtacttttcgattctggtgctacacattcattcttatctatgagttttgcgggaaatcatgggatggaagtagaagatcttagacgtcctttgatggttagtaccccaagtaatcaagcactctctttgcaacgtagcccctcggtcagaatagaaattcaaggagtaccatttctggccaatcttatcttgttaaaatccaaagaccttgatgtcatcctagggatggactggttagccagacataaaggtgtgatagactgtgccaacagaaaagtaactctcaacagctatgatggtcgagttgtaactgttcatgcattgtcatctgagtctttaaggtcaagactgaaccagataactttggaagagattcctatagtccgggagtatcctgatgtgttcccagatgatttacctggtatgccgcctaaaagggatatagagttcagaatagatttggtacctggaacaactccgatccataagagaccttatcgaatggcagccaatgagttggcagaagttaagaggcaagtagatgatttgctacagaaaggatacatcagaccgagttcatcaccatggggagctccggttatttttgtggaaaagaaagaccatactcagagaatgtgtgtggactatcgtgcactaaacgatgtgactatcaagaataagtatccactacccaggattgatgatttgtttgatcagcttaaaggtgccactgttttctccaagatagatcttcgatcagggtatcatcagttgagaatcaaagaggaagatatacctaagacagcttttaccactaggtatgggttgttcgaatgtactgttatgtcttttggacttaccaatgcccctgctttcttcatgaacttgatgaataaggtgtttatggaatacctagacaagttcgtggtggtctttattgatgatattcttatctactctcgaaccaaagaagagcatgaggaacatcttcgccttgcattggagaagctacgagaacatcaactgtatgctaagtttagcaagtgtgaattttggttgtctgaagtgaaattccttggtcacgtcatctcagccggaggagttgccgtcgatcctagtaacgtggaatccgtaaccaattggaagcaaccaaagacagtttcagaaattcgcagtttcctaggcctcgcaggatattatcggaggtttatagagaatttttccaagattgctaagcccatgacacgactgcttcagaaagatgtgaagtacaagtggtcggaagaatgtgagcagagttttcaagagttgaaaagtcgcttaatatcagctcctattttgattttgcctgatccaaagaagggttttcaagtgtattgcgatgcatccaaacttgggttaggttgtgttctgatgcaagatgggaaggtggttgcctatgcctctcgacagttacgtccacatgagaagaactaccctactcatgatattgagttagctgcagtcgttcatgcattgaagatttggcgtcattatcttttcggtactcgtacagaagtgtacaccgatcacaagagtttaaagtatatctttactcagccggatctgaacatgagacaacggagatggttggaattaattaaggattatgacatgggaattcattatcatccgggaaaggctaatgttgtagtagacgctcttagcagaaaaggctattgcaatgctacagaaggacgacagttgccattggaattatgcaaggaatttgaaagattaaatttgggaattgtcggtagaggtttcgttgcagccttagaagcgaagcccactctaattgatcaagttagagaagcccaaattaatgatcctgatattcaagagatcaagaagaatatgagaagaggaaaagctattggtttcttggaggatgagcaaggaactgtatggttgggtgagagaatctgtgtccccgacaacaaagatctaaaagatgcagttctgaaagaagctcatgatactttatactccattcaccctggtagtactaagatgtaccaggatctcaaggaaagattttggtgggcaagtatgaagcgtgaaatcgcagaatatgtagcagtatgtgatgtttgtcagcgagtcaaggcagaacatcagaaacccgccggtttgttgcagcctttgaagattcctgaatggaaatgggaagaaataggtatggattttattactggtttacccagaacgtcatcaggccatgattctatttgggtgatagtcgacagacttaccaaagtggctcattttattccggtaaagacaacctattccggaagtcgtttggcggaattgtatatggcaaggattgtgtgtttgcatggcgtccctaagaagatagtgtctgatcgaggcagtcagtttacttcaaatttttggaagaaacttcaggaagagatgggttctaagctgaactttagtactgcttatcatccacagacagacggacaaaccgaaagggtgaatcagattttggaagacatgttgagagcttgtgctttagatttcggtggaagttgggataagaatctaccttatgcagaattttcatacaacaacagttatcaagctagtttacagatggctccttacgaagcactgtatggtcggaagtgccgcactccgcttttgtgggatcaaacgggagaacgtcaggttttcgggacggatatcctaagggaagcagaagaaaaggtaaaggtcattcaagaaagattgcgagtggctcagtctcgacataagagttatgccgacaatcgccgtagagatttgagttttgaagaaggagactatgtgtatcttcgtgtcacgcctcttcgaggagttcatcgttttcacaccaagggaaaattggcaccgcgttttgtgggaccttataagattgtcagtagaagaggagaggttgcttatcagttagaattacctcaatctttggcaggagtccataatgtgttccatgtgtcacaattgaaaaaatgtttaagggtacctaccgaagaagctaatattgagcagatagaagtccaagaggatttgacttatgttgagaaaccaatccgtatcctggaaacaaatgagagaagaaccaggaatcgagttatccgtttctgcaaagttcaatggagtaatcactcggaagaagaatcaacttgggaacgagaagatgaattgaagtcagctcatccgcacctgttcgccagttcctccgaatctcgaggacgagattctgtttaa

SEQ ID NO: 15160 - DNA, 3501 bp, Oryza sativa
  Clone ID: TFbOSC401329j.C1.o57.gm
atggcggctgcccacggcgaggtccccgtggaggcggatccccgtgctcttctcttctcgccgccaccctcgccttcgcctctcgtcgccggagtcgtcctagcgccgtgcgccctagcttcgctgtcgccgccgccgctccagccgtgcgccgccgtcgttccagccgtcgccgtcactcgggaaggccgccgtcgtcatcgccaagtcgccgccgtcctcgtccgccccttcgctgccgtcggagaccgccggagcatcgtcgccgtcgtcaagccgaaggtagccgccgcttcctcctcgtcgccgtcgccgtccgttggtcgtccgccgtcgccttggtcgtcggtgagttcgccgtgccgtccgctacccgttggtgtcctccgtttgcgtcctagtgccgccgttcgccggcgagtgtccgccgcccgagccgtcttctttgccgagccgccgccgccgtcggtgacgtcatcgctggcgtcatcaagcccctctcccatgccgtgttacaagcctgagtacctgtttggtgttgagggttttgtccaggagttgcgtacgatgtcctttgtcattggatttgggactgcccctttttatgcccagattcgtcatgatcgtcatgaagagaagtgccgagtcaaagtcaccatgaacagtaatagtgaagatatcccctcagcgatgttcgaagctggaggaagaaactacatccatgcatgtcaggaagtggcaaggatcgccataggagagctccgtgatagctacagtgatcaattggccgacactgagtatcgctaccatcctcgtcaaccacagggaagtgaccgtggcagttaccttgagactgaaggaattgagaatgatgctactacaaggcatttggttgagatgctgtgggctatggatgaaagtcgtgcggagactgtgttagcagctcaagatcgtgaagaccggaatcgtggtaagatttgcaagctagaagacaaggtggatcgtttggagaaggaattagccgcattgaagggagaagcaccgccgcagaaggccaggattcgtctcaccgcaaggaagagagctttgtttgtccctcgttatcaattggcgccaaagatccgcgtggtggagaaagaagttgccccagcaaatcctcccgtcatcattataagtagtgatgaagaagaagaacccaagcgcaacaattccaagtttgagtgggagaaggtctcatttgcatcacatcagttgcatggccctgcctctgaatggtgggatcacttccgccttaacaggactactgctgaacctatcacttggcttgaattcaccgctgctttccggaagacgcatataccatcgggagtagtgtctctcaagaagaaggagttcaggtcgcttactcagggatctcgctctgttacggagtatctgcacgaattcaatcgtcttgctcgttatgctccggaagatgtgcgcaatgatgaagagcgccaggagaagtttttgggaggacttaatgatgagctttcttacccactcatggttggagattatcctgatttccagaaattagtggataaggctattcgtcaggaggacaagtacaatcgcatggagcagaagaaacgtcggattgctcaattcaagacacaacagggaaataatcagaagccgcgtcttactttaggaccccagtctatgccacagggaggttcttcgtctgttgttcgtccgcaacgtcagttcttcaacaacaatgctggcaacaacatccgtaatcaagctccacgtcctgttgcagctccagcacagcaacaacctgccaagagggagcaaggcaacaagcccgtggtgtgtttcaactgtggagatccaggacattatgctgacaagtgtccgaagccccgacgcgtgaaggttgtccctgcccagaataactctgctgtaccagcatccaaggctcgtgtaaatcatgtcgctactgcagaagctcaagatgctccagatgtgattttggtccgggagtatcctgatgtgttcccagatgatttacctgccaatgagttggcagaagttaagaggcaagtagatgatttgcttcagaaaggatacatcagaccgagttcatcaccatggggagctccggttatttttgtggaaaagaaagatcatacccagaggatgtgtgtggactatcgtgcactaaacgatgtgacaatcaagaataagtatccgctgcccagaattgatgatttgtttgatcagcttaaaggagccactgttttctccaagatagatcttcgatcagggtatcatcagttgagaatcaaagaggaagatatacctaagacagcttttaccactaggtatgggttgttcgaatgtactgttatgtcttttggacttaccaatgcccctgctttcttcatgaacttgatgaataaggtgtttatggaatacttagacaagttcgtggtggtctttattgatgatattcttatctactctcgaaccaaagaagagcatgaggaacatcttcgccttgcattggagaagctacgagaacatcaactgtatgctaagtttagcaagtgtgaattttggttgtccgaagtgaaattccttggtcacgtcatctcagccggaggagttgccgtcgatcctagtaacgtggaatccgtaaccaactggaaacaaccaaagacagtttcagagatccgcagtttcctaggccttgcaggatattatcggaggtttatagagaatttttccaagattgctaagcccatgacacgactgcttcagaaagatgtgaagtacaagtggtcggaagaatccttagaagcgaagcccactctaattgatcaggttagagaagcccaaattaatgatcctgatattcaagagatcaagaagaatatgagaagaggaaaagctattggtttcttggaggatgagcacggaactgatccccgtgctcttctcttctcgccgccaccctcgccttcgcttctcgtcgccggagtcgtcctagcgccgtgcgccctagcttcgctgtcgccgccgccgctccagccgtgcgccgtcgccgtcactcgggaaggccgccgtcgtcatcgccaagtcgccgccgtcctcgtccgccccttcgctgccgtcggagaccgccggagcatcgtcgccgtcgtcaagccgaaggtagccgccgcttcctcctcgtcgccgtcgccgtctgttggtcgtccgccgtcgccttggtcgtcggtgagttcgccgtgccgtccgctacccgttggtgtcctccgtttgcgtcctagtgccgccgttcgccggcgagtgtccgccgcccgagccgtcttctttgccgagccgccgccgccgtcggtgacgtcatcgctggcgtcatcaagcccctctcccgtgagccgccgtggactcgttcgatctcggccgtccgatttggatcggatcaatctcggccgtccgttcgcgtga

SEQ ID NO: 15161 - DNA, 4443 bp, Oryza sativa
  Clone ID: TFbOSC401340j.C1.o13.fg
atgccgcgctacaagcctgagtacttgtttggtgttgaaggatttgtccaggagttgcgtacgatgtcctttgccataggatttgggactgctcctttttatgcccagattcctcatgatcgtcacgaagagaagtgcggagtcaaagtcaccttgaacagtaatagtgaagatatcccctcagtgatgttcgaagctggaggaagaaactacatccatacatgtcaggaggtggcaaggatcgccataggagagctccgcgatcgctacagtgatcagttggccgacactgagtatcgctaccatccccgtcaaccacagggaagtgaccgtggcagctaccttaagactgaaggaattgagaatgatgctaccacaaggcatttggttgagatgctgtgggctatggatgaaagccgtgtggagactgtgttagcagctcaagatcgtgaagatcggaatcgtggtaagatttgcaagctagaagacaaagtggatcgtttggagaaggaactagccgcgttgaagggagaagcaccaccgcagaaggccagggttcgtcttaccgcaaggaagagagctctatttgtccatcgctaccaattggcgccaaagatggtgctcactcgcagcaacgggaatggcctcaacaacaacaacaacaataacaacaacaatggagagaatcccacacttgcccaagtcctggctcaacaggcacatcttatgaacatgatgatgcagcaactccagaaccagcagaaccagggaaataaccatgcacctccccagaacaagttagcagaatttcttcgtgtgaggccgcccactttctctagtaccactaatcctgttgaagctggactactgctgaacctatcacttggcttgaccgctgctttccggaagacgcatataccatcgggagtggtgtctctcaagaagaaggaattcaggtcgctcactcaggggtctcgctctgttacggagtatctgcacgagttcaatcgtctggctcgctatgctccagaagatgtacgcactgatgaagagcgccaggagaagttcttggaaggacttaatgatgagctttcttatccactcatgactggagattatcctgatttccagaagttagtggataaggctattcgccaggaggacaagtacaaccgcatggagcagaagaaacgccggattgctcacttcaagacacaacaggggaataatcagaggccgcgtcttactttaggaccccagtccatgccacagggaggttcttcgtccgttgttcgtccgcagcgtcagttcttcaacaacaatgctggcaacaacatccgcaatcaagctccacgccctgttgcagcttcgacacagcaacaacctgccaagaaggagcaaggcagcaatcccgtggtgtgtttcaactgtggagacccaggacattacgctgataagtgtccgaagccccgacgtgtgaaggttgtccctgcccagagcaactctaccgcaccagcatcaaaggcccgtgtcaatcatgttgctgctgcagaagctcaagatgctccagatgtgattttgggtacgtttcttgttaacttagttcctgcaacagtgcttttcgattctggtgctacacattcattcttatctatgagttttgcgggaaatcatgggatggaagtagaagatattagacgtcctttgttggttagtaccccaagtaatcaggcactctctttgcaacgtagcccctctgtcagaatagaaattcaaggagtaccatttctggccaatcttatcttgttagaatccaaagaccttgatgtcatcctagggatggactggttagccagatataaagacgatttacctggtatgccgcccaaaagggatatagagttcagaatagatttggtaccaggaacaactccgatccataagagaccttatagaatggcagccaatgagttggcagaagtcaaaaggcaagtagacaatttgcttcagaaaggatacatcagaccgagttcatctccatggggagctccggttatttttgtggaaaagaaagatcatacccagaggatgtgtgtggactatcgtgcactaaatgatgtgactatcaagaataagtatccgctgccccgaattgatgatttgtttgatcagcttaaaggtgccaccgttttctccaagatagatcttcgatcagggtatcaccagttgagaattaaagaggaagatatacctaagacggcttttaccactaggtatggattgttcgaatgtactgttatgtcttttggacttaccaatgcccccgctttcttcatgaacttgatgaataaggtgtttatggaatacctagacaagttcgtggtggtctttattgatgacattcttatctactcccgaaccagagaagagcatgaggaacatcttcgccttgcactagagaagctacgagaacatcaactgtatgctaagtttatttcagagattcgcagtttcctaggcctcgcaggatattatcggaggtttatagagaatttttccaagattgctaagcccatgacacggctgcttcagaaagatgtgaagtacaagtggtcagaagaatgtgagcagagttttcaagaattgaagaatcgcttaatatcagctcctattttgattttacctgatccaaagaagggtttccaagtgtattgcgatgcatccaaacttgggttaggttgcgttctgatgcaagatgggaaggtggttgcctatgcatctcatcagttacgtccgcatgagaagaactaccctactcatgatcttgagttagctgcagtagttcatgcattgaaaatttggcgtcattatcttttcggtactcgtacggagttgccattggaattatgcaaggaatttgaaagattaaatttgggaattgtcagtagaggttttgttgcagccttagaagcgaagcccactctaattgatcaagttagagaagcccaaattaatgattctgatattcaagaaatcaagaagaatatgagaagaggaaaagctatcggtttcttggaggatgagcaaggaactgtatggttgggtgagagaatctgcgtccccgacaacaaagatttaaaagatgcaattctgaaagaagctcatgatactttatactccattcaccctggtagtaccaaaatgtaccaggatctcaaggaaagattttggtgggcaagtatgaagcgtgaaatcgcagaatacgtagcagtatgtgatgtttgtcagcgagtcaaggcagaacatcagaaacccgccggtttgctgcagcctttgaagattcctgaatggaaatgggaggaaatcggtatggatttcatcactggtctacccagaatgtcatcaggccatgactctatttgggtgatagtcgacagacttaccaaagtggctcatttcatcccagtaaagacaacttattccggaagtcggttggcggaattgtatatggcaaggattgtgtgtttgcatggcgtccctaagaaaatagtgtctgatcgaggcagtcagtttacttcaaatttttggaagaagcttcaggaagagatgggttctaagctgaactttagtactgcttatcatccacaggcagacggacaaaccgaaagggtgaatcagattttggaagatatgttgagagcttgtgctttagacttcggtggaagttgggataagaatctaccttatgcagaactttcgtataacaacagttatcaagctagtcttcagatggctccttacgaagcactgtatggtcggaagtgccgcactccgcttttgtgggatcaaaagggagaacgtcaggttttcgggactgatatcctaagggaagcagaagagaaggtaaagatcattcaagaaagattgcgtgtggcccagtctcgtcataagagttatgccgacaatcgccgcagagatttgagttttgaagaaggagattatgtgtaccttcgtgtcacgcctcttcgaggagttcatcgtgttcacaccaaaggaaaattggcaccgcgttttgtgggaccttataagattgtcagtagaagaggagaggttgcttatcagttagagttacctcaatctttggcaggagtccataatgtgttccatgtgtcgcaattgaaaaagtgtttaagggtacctaccgaagaagctaatcttgaacagatagaagtccaagaggatctgacctatgttgagaaaccaatccgtattttggaaatagatgagagaagaaccagaaatcgagttatccgtttttgcaaagtccaatggagtaatcactcggaagaagaatcaacttgggaacgagaagatgaattgaagtcagctcatccgcatctgttcgccagttcttccgaatctcgaggacgagattctgtttaa

SEQ ID NO: 15162 - DNA, 5343 bp, Oryza sativa
  Clone ID: TFbOSC401449j.C1.o1.np
gccgccgctcgggaagaccgccgtcgtcatcgccaagtcgccgccgtcctcgtccgccccttcgcagccgtcggaacccgccggagcttcgtcgccgtcgacaacccgaaggtagccgccgcttccttctcgtcgccgtcgtcgtccgttattccgtcgtttccggagagtccgttttcgcagaagaagagtttgaagagttccaaggccagcaaggcaactcctggtttggaatggtacattcctggtttggagatagaactgtgcagccggggtggttgttcagagtggttgggcctatacaacaggatgccgcgttacaagcctgagtacctgtttggtgttgagggttttgtccaggagttgcgtacgatgtcctttgtcattggatttgggactgcccctttttatgcccagattcctcatgatcgtcatgaagagaagtgccgagtcaaagtcaccttgaacagcaatagtgaagaggtcccctcagtgatgtttgaagctggaggaagaaactacatccatgcatgtcaggaggtggcaaggatcgccataggagagctccgtgatcgctacagtgatcaattggccgacactgagtatcgctaccatcctcgccaacctcagggaagtgaccgtggcagttaccttgagactgaaggaattgagaatgatgttaccacgaaacatttggttgagatgttgtgggctatggatgaaagtcgtgcggagactgtgttagcagctcaagatcgtgaagatcggaatcgtggtaagatttgcaagctagaagacaaggtggatcgtttggagaaggaattagccgcattgaagggagaagcaccgccgcagaaggccaggattcgtcttaccgcaaggaagagagctttatttgtccctcgctatcaactggcgccaaagatggtgaacactcgtagcaatgggaatggtcccaacaaccccaataacaacaacaatggagagaatcccactcttgcccaagttcttgctcaacagacacagcttataaacatgatgatgcagcaatttcagaatcagcaaaaccaagggaataatcatgcacctccacagaacaagttagcagaatttcttcgtgtaaggccgcctgttttctctagtaccactaatcctgttgaagctagtgattggctgcatgccatagagaagaagttggatttacttcagtgtactgatcaggagaaggtctcatttgcatcacatcagttgcatggccctgcctctgaatggtgggatcacttccgccttaacaggactactgctgaacctatcacttggcttgaattcaccgctgctttccggaagacgcatataccatcgggagtagtgtctctcaagaagaaggagttcaggtcgcttacccagggatctcgctctgttacggagtatctgcacgagttcaatcgtcttgctcgttatgctccggaagatgtgcgcaatgatgaagagcgccaggagaagtttttgggaggacttaatgatgagctttcttacccactcatggttggagattatcctgatttccagaaattagtggataaggctattcgtcaggaggacaagtacaatcgcatggagcagaagaaacgtcggattgctcaattcaagacacaacagggaaataatcagaagccgcgtcttactttaggaccccagtccatgccacagggaggttcttcgtctgttgttcgtccgcaacgtcagttcttcaacaacaatgctggcaacaacatccgcaatcaagctccacgtcctgttgcagctccagcacagcaacaacctgccaagagggagcaaggcaacaagcccgtggtgtgtttcaactgtggagatccaggacattatgctgacaagtgtccgaagccccgacgcgtgaaggttgtccctgcccagaataactctgctgtaccagcatccaaggctcgtgtaaatcatgtcgctgctgcagaagctcaagatgctccagatgtgattttgggtacgttccttgttaactcagttcctgcaacagtacttttcgattctggagctacacattcattcttatctatgagttttgcgggaaatcatgggatggaagtagaagatcttagacgtcctttgatggttagtaccccaagtaatcaagcactctctttgcaacgtagcccctctgtcagaatagaaattcaaggagtaccatttctggccaatcttatcttgttagaatccaaagaccttgatgtcatcctagggatggactggttagccagacataaaggtgtgatagactgtgccaacagaaaagtaactctcaacagctatgatggtcgagttgtaactgttcatgcattgtcatctgagtctttcaggtcaagactgaaccagataactttggaagagattcctatagtccgggagtatcctgatgtgttcccagatgatttacctggtatgccgcctaaaagggatatagagttcagaatagatttggtacctggaacaactccgatccataagagaccttatcgaatggcagccaatgagttggcagaagttaagaggcaagtagatgatttgctacagaaaggatacatcagaccgagttcatcaccatggggagctccggttatttttgtggaaaagaaagaccatactcagagaatgtgtgtggactatcgtgcactaaacgatgtgactatcaagaataagtatccactacccaggattgatgatttgtttgatcagcttaaaggtgccactgttttctccaagatagatcttcgatcagggtatcatcagttgagaatcaaagaggaggatatacctaagacagcttttaccactaggtatgggttgttcgaatgtactgttatgtcttttggacttaccaatgcccctgctttcttcatgaacttgatgaataaggtgtttatggaatacctagacaagttcgtggtggtctttattgatgatattcttatctactcttgaaccaaagaagagcatgaggaacatcttcgccttgcattggagaagctacgagaacatcaattgtatgctaagtttagcaagtgtgaattttggttgtccgaagtgaaattccttggtcacgtcatctcagctggaggagttgccgtcgatcccagtaacgtggaatccgtaaccaattggaagcaaccaaagacagtttcagagattcgcagtttcctaggcctcgcaggatattatcggaggtttatagagaatttttccaagattgctaagcccatgacacgactgcttcagaaagatgtgaagtacaagtggtcggaagaatgtgaacagagttttcaagaattgaaaagtcgcttaatatcagctcctattttgattttgcctgatccaaagaagggttttcaagtgtattgtgatgcatccaaacttgggttaggttgtgttctgatgcaagatgggaaggtggttgcctatgcctctcgacagttacgtccgcatgagaagaactaccctactcatgatattgagttagctgcagtcgttcatgcattgaagatttggcgtcattatcttttcggtactcgtacagaagtgtacaccgatcataagagtttaaagtatatctttactcagccggatctgaacatgagacaaaggagatggttggaattaattaaggattatgacatgggaattcattatcatccgggaaaggctaatgttgtagcagacgctcttagcagaaaaggctattgcaatgctacagaaggacgacagttgccattggaattatgcaaggaatttgaaagattaaatttgggaattgtcggtaaaggtttcgttgcagccttagaagcgaagcccactctaattgatcaagttagagaagcccaaattaattatcctgatattcaagagatcaagaagaatatgagaagaggaaaagctattggtttcttggaggatgagcacggaactgtatggttgggtgagagaatctgtgtccccgacaacaaagacttaaaggatgcaattctgaaagaagctcatgatactttatactccattcaccctggtagtactaagatgtaccaggatcttaaggaaagattttggtgggcaagtatgaagcgtgaaatcgcagaatacgtagcagtatgtgatgtttgtcagcgagtcaaggcagaacatcagaaacccgccggtttgttgcaacctttgaagattcctgaatggaaatgggaagaaattggtatggattttattactggtttacccagaacgtcatcaggccatgactctatttgggtgatagtcgacagacttaccaaagtggctcattttattccggtaaaaacaacctattccggaagtcgcttagcggaattgtatatggcaaggattgtgtgtttgcatggtgtccctaagaagatagtgtctgatcgaggcagtcagtttacttcaaatttttggaagaaacttcaggaagagatgggttctaagctgaactttagtactgcttatcatccgcagacagacggacaaaccgaaagggtgaatcaaattttggaagacatgttgagagcttgtgctctagatttcggtggaagttgggataagaatctaccctatgcagaattttcatacaacaacagttatcaagctagtttacagatggctccgtacgaagcactgtatggtcggaagtgccgcactccgcttttgtgggatcaaacgggagaacgtcaggttttcggaacggatatcctaagggaagcagaagaaaaggtaaagatcattcaagaaagattgcgtgtggctcagtctcgtcataagagttatgccgacaatcgccgcagagatttgagttttgaagagggagattatgtgtatcttcgtgtcacgcctctacgaggagttcatcgttttcataccaagggaaaattggcaccgcgttttgtgggaccttataagattgtcagtagaagaggggaggtcgcttatcagttggagttacctcaatctttggcaggagtacataatgtgttccatgtgtcgcaattgaaaaagtgtttaagggtacctaccgaagaagctaatattgagcagatagaagtccaagaggatttgacttatgttgagaaaccaatccgtatcctggaaacaaatgagagaagaaccaggaatcgagttatccgtttttgcaaagtccagtggagtaatcactcggaagaagaatcaacttgggaacgagaagatgaattgaagtcagctcatccgcacctgtttgccagttcttccgaatctcgaggacgagattctgtt

SEQ ID NO: 15163 - DNA, 4737 bp, Oryza sativa
  Clone ID: TFbOSC401523j.C1.o2.fg
atgatgatggaccgcggaggggtttggatggaggggaaacgatgccgaggacggccttgccgctgcgatgccggaggtgatggggggggtgtggccgaccggtgcacggcgaggagggacgggcggccgaacaactccggcgaggcggacggagaggttcgcggcgacgttccggcgaaaccgagggcaggccggggtggagggcgatgcggcgtcgccgagggaggagacggcgacgtcggccgacgctctggcgcggcgaccggggcagccggaggagatgtcgacgaggaggaaggtgaggccggcgcgggcgacggtgttccggcgatgttcgggcgaggaggaggtgataccggggatgagggcggcgtcgtggagccgaggaaggtggtgaacactcgcagcaacgggaatggccccaacaaccccaataacaataacaatgaagagaatcccactcttgctcaagttcttgctcaacagacacagctaatgaacatgatgatgcagcaacttcagaaccagcagaaccaaggaaataaccatgcacctcctcagaacaagttagcagaatttcttcgtgtgaggccgcctattttctctagtaccactaatcctgttgaagctggtgattggctgcatgccatagagaagaagttggatttgcttcaatgcactgatcaggaaaaggtctcatttgcatcacaccagttgcatggccctgcctttgaatggtgggatcacttccgcctgaataggactaccactgaacctatcacttggcttgagttcaccgctgctttccggaagacgcatataccatcgggagtggtgtctctcaagaagaaggaattcaggtcgctcacccagggatctcgctctgttacggagtatctacacgagttcaatcgtctggctcgttatgctccggaagatgtgcgcaatgatgaagagcgccaggagaagttcttggaaggacttaatgatgagctttcttacccactcatgaccggagattattctgatttccagaagttagtggataaggctattcgtcaggaagacaagtacaaccgcatggagcagaagaaacgtcggattgctcaattgaagacacaacaggggaatattcagaagccgcgtcttactttaggaccccagtccatgccacagggaggttcttcgtctattgttcgtccgcagcgtcagttcttcaacaacaatgctggcaacaacatccgcaatcaagctccacgtcctgttgcagctccagcacaacaacaacctgtcaagagggagcaaggcagcaagcccgtggtgtgtttcaactgtggagacccaggacattatgctgacaagtgtccgaagccccgacgcgtgaaggttgtccctgctcagagcaactctgctgtaccagcatcaaaggcccgtgttaatcatgttgctgctgcagaagctcaagatgctccagatgtgattttgggtacgttccttgttaactcagttcctgcaacagtgcttttcgattctggtgctacacattcattcttatctatgagttttgcgggaaatcatgggatggaagtagaagatcttagacgtcctttgatggttagtaccccaagtaatcaagcactctctttgcaacgtagcccctctgtcagaatagaaattcaaggtgtaccatttcgggccaatcttatcctgttagaatccaaagaccttgatgtcatcctagggatggactggttagccagatataaaggtgtgatagactgtgctaacagaaaagtaactctcaccagtaatgatggtcgagttgtgactgttcatgcattatcttctgagtctttaaggtcaagactgaaccagataactttggaagagattcctatagtccgggagtatcccgatgtgttccctgatgatttacctggtatgcctcctaaaagggatatagagttcagaatagatttggtactaggaacaactccgatccataagagaccttatagaatggcagctaatgagttggcagaagtcaaaaggcaagtagacgatttgcttcagaaaggatacatcagaccaagttcatctctatggggagctccagttatttttgtggaaaagaaagatcatacccagaggatgtgtgtggactatcgtgcactaaatgatgtgactatcaagaataagtatccactacccagaattgatgatttgtttgatcagcttaaaggtgccaccgttttctccaagatagatcttcgatcaggatatcaccagttgagaatcaaagaggaagatatacctaagacagcttttaccactaggtatggattgttcgaatgtactgttatgtcttttggacttaccaatgcccctgttttcttcatgaacttgatgaataaggtgtttatggaatacctagacaagttcgtggtggtctttattgatgacattcttatctactcccgaaccaaagaagagcatgaagaacattttcgccttgcattagagaagctacgagaacatcaactgtatgctaagtttagcaagtgtgaattttggttgtctgaagtgaagttccttggtcacgtcatctcagcaggaggagttgccgtcgatcctagtaatgtggaatccgtaaccaactggaaacaaccaaagacagtttcagagattcgcagtttcttaggcctcgcaggatattaccggaggtttatagagaatttttccaagattactaagcccatgacacgactgcttcagaaagatgtgaagtacaagtggtcggaagaatgtgagcagagttttcaagagttgaagaatcgcttaatatcagctcctattttaattttacctgatccaaagaagggtttccaagtgtattgcgatgcatccaaacttgggttaggttgtgttctgatgcaagatgggaaggtggttgcctatgcatctcgtcagttacgtccgcatgagaagaactaccctactcatgatcttgaattagctgcagtagttcatgcgttgaagatttggcgtcattatctcttcggtactcgtacagaggtatataccgatcataagagtttaaagtatatctttactcagccggatctgaacatgagacaaaggagatggctggaattaattaaggattatgacatgggaattcattatcacccgggaaaggctaatgttgtagcagacgctcttagcaggaaaggctattgcaatgctacggaaggacgacagttgccgttggaattatgcaaggaatttgaaagattaaatttgggaattgtcagtagaggtttcgttgcagccttagaagcgaagcccactctaattgatcaagttagagaaacccaaattaatgatcctgatattcaagaaatcaagaagaatatgagaagaggaaaatctattggtttcttggaggatgagcaaggaactgtatggttgggtgagagaatttgtttccccgacaacaaagatttaaagaatgcaattctgaaagaagctcatgataccttatactccattcaccctggtagtaccaagatgtaccaggatctcaaggaaagattttggtgggcaagtatgaagcgtgaaatcgcagaatacgtagcagtatgtgatatttgtcagcgagtcaaggcagaacatcagaaacctgccggtttgctgcagcctttgaagattcctgaatggaagtgggaagaaatcggtatggattttatcactggtctacccagaacgtcatcaggccatgactctatttgggtgatagtcgacagacttaccaaagtggctcatttcattccggtaaagacaacttatttcggaagtcgcttagcggaattgtatatggcaaggattgtgtgtttgcatggcgtccctaagaaaatagtgtctgatcgaggcagtcagtttacttcaaatttttggaagaagcttcaggaagagatgggttctaagctgaactttagtactgcttatcatccgcagacagacggacagaccgaaagggtgaatcaaattttggaagacatgttgagagcttgtgctttagacttcggtggaagttgggataagaatctaccttatgcagaattttcgtacaacaacagttatcaagctagtcttcagatggctccttacgaagcactgtatggtcgaaagtgccgcactccgcttttgtgggatcaaacgggagaacgtcaggttttcgggactgatatcctgagggaagcagaagaaaaggtgaaaatcattcaagaaagattgcgtgtggcccagtctcgtcataagagttatgccgacaatcgccgcagagatttgagttttgaagaaggagattatgtgtatcttcgtgtcacgcctcttcgaggggttcatcgttttcacaccaaaggaaaattggcaccgcgttttgtgggaccttataagattgtcagtagaagaggagaggttgcttatcagttggagttacctcaatctttggcaggagtccataatgtgttccatgtgtcgcaattgaaaaagtgtttaagggtacctaccgaagaagctaatcttgaacagatagaagtccaagaggatctgacctatgttgagaaaccaatccgtatcttggaaatagatgagagaagaaccagaaatcgagttatccgtttttgcaaagtccagtggagtaatcactcggaagaagaatcaacttgggaatga

SEQ ID NO: 15164 - DNA, 3993 bp, Oryza sativa
  Clone ID: TFbOSC401566j.C1.o14.fg
atggtgcgctgcggtggattgtgttatgcaaggggtattgtcacagctcctttccgagctcctggtttggaatggtatattcctggtttggagatagaactgtgcagccgggatggttgttcagaatggttgggcctatacaacaggatgccgcgctacaagcctgagtacttgtttggtgttgagggatttgtccaggagttgcgtacaatgtcctttgccataggatttgggactgcccctttttatgcccagattcctcatgatcgtcacgaagagaagtgccgagtcaaagtcaccttgaacagtaatagtgaagatatcccctcagtgatgttcgaagctggaggaagaaactacatccatgcatgtcaggaggtggcaaggatcgccataggagagctccgcgatcgctacagtgatcagttggccgacactgagtatcgctaccatcctcgtcaaccacagggaagtgaccgtggcagctaccttgagactgaaggaattgagaatgatgctaccacaaggcatttggttgagatgctgtgggctatggatgaaacccgtgcggagaccgtgttagcaggtcaagatcgtgaagatcggaatcgtggtaagatttgcaagctagaggacaaggtggatcgtttggagaaggaactagccgcattaaagggagaagcaccaccgcagaaggccaggattcatcttaccgcaaggaagagagctctatttgtccctcgctaccaattggcgccaaaggtccgtgtggtggagaaagaagttaccccagccccagcggatcctccggtcgtcaataacaagttagcagaatttcttcgtgtgaggccgcctattttctctagcaccactaatcctgttgaagctggtgattggctgcatgccatagagaagaagttggatttgcttcagtgcactgatcaggagaaggtctcatttgcatcacaccagctgcatggccctgcctctgaatggtgggatcacttccgccttaacaggactactgctgaacctatcacttggcttgaattcaccgctgctttccggaagacgcatataccatcgggagtggtgtctctcaagaagaaggaattcaggtcgctcactcaggggtctcgctctgttacggagtatctgcacgagttcaatcgtctggctcgttatgctccggaagatgtacgcactgatgaagagcgccaggagaagttcttggaaggacttaataatgagctttcttatccactcatgactggagattatcctgatttccagaagttagtggataaggctattcgccaggaggacaagtacaaccgcatggagcaaaagaaacgccggattgctcaattcaagacacaacaggggaataatcagaggccgcgtcttactttaggaccccagtccatgccacagggaggttcttcgtctgttgttcgtccgcagtgtcagttcttaaacaacaacgcagtcaacaacatccgcaatcaagctccacgtccagttgtagcctcgacgcagcaacaacctgccaagagggagcaaggcagcaagcccgtggtgtgtttcaactgtggagacccaggacattacgctgacaagtgtccgaagccccgacgcgtgaaggttgtccctgctcagagcaactctaccgcaccagcatcaaaggcccgtgtcaatcatgttgctgctgcagaagctcaagatgctccagatgtgattttgggtacgtttcttgttaacttagttcctgcaacagtgcttttcgattctggtgctacacattcattcttatctatgagttttgcgggaaatcatgggatggaagtagaaaattttagacgtcctatgatggttagtaccccaagtaatcaggcactctatttgcaacgtagcccctctgtcagaatagaaattcaaggcataccatttctggccaatcttatcctgttagaatccaaagaccttgatgtcatcctagggatggactggttagccagatataaaggtgtgatagactgtgctaacagaaaagtaactctcacgagtgatgatggtcgagttgtaactgttcatgcattgtcttctgagtctttaaggtcaagactgaaccaaataactttggaagagattcctatagtccgggagtatcctgatgtgttcccagatgatttacctggtatgcctcctaaaagggatatagagttcagaattgatttggtaccaggaacaactccaatccataagagaccttatcgaatggcagccaatgagttggcagaagtcaagaggcaagtggacgatttgcttcagagagggtacatcagaccgagttcatctccatggggagctccggttatttttgtcgaaaagaaagatcatacccagaggatgtgtgtggactatcgtgcactaaatgatgtgactatcaagaataagtatccgctgcccagaattgatgatttgtttgatcagcttaaaggtgctaccgttttctccaagatggatcttcgatcagggtatcaccagttgagaatcaaagaggaagatatacctaagacagcttttaccactaggtatggattgtttgaatgtactgttatgtcttttggacttaccaatgcccccgctttcttcatgaacttgatgaataaggtgcttatggaatacctagacaagttcgtggtggtctttattgatgacattcttatctactcccgaaccagagaagagcatgaagaacatcttcgctttgcactagagaagctacgagaacatcaactgtatgccaagtttagttgtgttctgatgcaagatgggaaggtggttgcctatgcatctcgtcagttacgcccgcatgagaagaactaccctactcatgatcttgagttagctacagtagttcatgcgttgaaaatttggcgtcattatcttttcggtactcgtacagaggtgtataccgatcacaagagtttaaagtatatctttactcagccggatctgaacatgagacaaaggagatggctagaattaattaaggattatgacatgggaattcattatcacccaggaaaggctaatgttgtagcagacgctcttagcaggaaaggctattgcaatgctacggaaggacgacagttgccattggaattatgcaaggaatttgaaagattaaatttggaaattgtcagtagagctttcgttgcagccttagaagcgaagcccactctaattgatcaagttagagaagcccaaattaatgatcctgatattcaagaaatcaagaagaatatgagaagaggaaaggctatcggtttcttggaagatgagcaaggaactgtatggttgggtgagagaatctgcgtccccgacaacaaagatttaaaagatgcaattctgaaagaagctcatgatactttatattccattcaccctggtagtaccaagatgtaccaggatctcaaggaaagattttggtgggcaagtatgaagcgtgaaatcgcagagtacgtagcagtatgtgatgtttgtcagcgagtcaaggcagaacatcagaaacccgccggtttattgcagcctttgaagattcctgaatggaaatgggaggaaatcggtatggatttcatcactggtctacccagaacgtcatcaggccatgactctatttgggtgatagtcgacagacttaccaaagtggctcatttcatcccagtaaagacaacctattccggaagtcggttggccgaattgtatatggcaaggattgtgtgtttgcatggcgtccctaagaaaatagtgtctgatcgaggcagtcagtttacttcaaatttttggaagaagcttcaggaagagatgggttctaagctgaactttagtactgcttatcatccgcagacagacggacaaaccgaaagggtaaatcagattttggaagacatgttgagagcttgtgctttagacttcggtggaagttga

SEQ ID NO: 15165 - DNA, 2256 bp, Oryza sativa
  Clone ID: TFbOSC401688j.C1.o7.gm
atggtgaacactcgcagcaatgggaatggtctcaacaacctcaacaacaacaaccctaacaacaacaatggagagaatcccactctggcccaagagaaggtctcatttgcatcacatcagttgcatggccctgcctctgaatggtgggatcacttccgccttaacaggactactgctgaacctatcacttggcttgaattcaccgctgctttccggaagacgcatataccatcgggagtagtgtctctcaagaagaagaagttcaggtcgcttactcagggatctcgctctgttacggagtatctgcacgagttcaatcgtcttgctcgttatgctccggaagatgtgcgcaatgatgaagagcgccaggagaagtttttgggaggacttaatgatgagctttcttacccactcatggttggagattatcctgatttccagaaattagtggataaggctattcgtcaggaggacaagtacaatcgcatggagcagaagaaacgtcggattgctcaattcaagacacaacagggaaataatcagaagccgcgtcttactttaggaccccagcccatgccacagggaggttcttcgtctgttgttcgtccgcaacgtcagttcttcaacaacaatgctggcaacaacatccgtaatcaagctccacgtcctgttgcagctccagcacagcaacaacctgccaagagggagcaaggcagcaagcccgtggtgtgtttcaactgtggagacccaggacattatgctgacaagtgtccgaagccccgtcgcgtgaaggttgtccctgcccagaataactctgctgtaccagcatccaaggctcgtgtaaatcatgtcgctgctgcagaagctcaagatgctccagatgtgattttggtccgagagtatcctgatgtgttcccagaggatttacctgaaaggatacatcagaccgagttcatcaccatggggagctccggatattatcggaggtttatagagaatttttccaagattgctaagcccatgacacgactgcttcagaaagatgtaaagtacaagtggtcggaagaatccttagaagcgaagcccactctaattgatcaagttagagaagcccaaattaatgatcctgatattcaagagatcaagaagaatatgagaagaggaaaagctattggtttcttggaggatgagcacggaactgtatggttgggtgagagaatctgtgtccccgacaacaaagatttaaaggatgcaattctgaaagaagctcatgatactttatactccattcaccctggtagtactaagatgtaccaggatcttaaggaaagattttggtgggcaaccgtcgccgtcgctcgggaaggccgccgtcgtcatcgccaagtcgccgccgtcctcgtccgccccttcgcagccgtcggaacccgccggagcttcgtcgccgtcgacaacccgaagatgccgcgttacaagcctgagtacctgtttggtgttgagggttttgtccaggagttgcgtacgatgtcctttgtcattggatttgggactgcccttttttatgcccagattcgtcatgatcgtcatgaagaaaagtgccgagtcaaagtcaccttgaacagcaatagtgaagaggtcccctcagtgatgtttgaagctggaggaagaaactacatccatgcatgtcaggaagtggcaaggatcgccataggagagctccgtgatcgctacagtgatcggttggccgatactgagtatcgctaccatcctcgtcaaccacagggaagtgaccgtggcagttaccttgagactgaaggaattgagaatgatgctactacaaggcatttggttgagatgctgtgggctatggatgaaagtcgtgcggagactgtgttagcagctcaagatcgtgaagatcggaatcgtggtaagatttgcaagctagaagacaaggtggatcgcttggagaaggaattagccgcattgaagggagaagcaccgccgcagaaggccaggattcgtctcaccgcaaggaagagagctttgtttgtccctcgttatcaattggcgccaaagatccgcgtggtggagaaagaagttgccccagcaaatcctcccgtcatcatcataagtagtgatgaagaagaagaacccaagcgcaacaattccaagtttgagtgggtagctatcaaagatgaggaagatgagccgaacgagccttcaatcgacctcctatgctcggaagaactagagtga

SEQ ID NO: 15166 - DNA, 2985 bp, Oryza sativa
  Clone ID: TFbOSC401832j.C1.o3.gm
atggtgaacactcgcagcaacgggaatggtcccaacctcaacaaccccaataacaacaacaatggagagaatccaacccttgctcaagttcttgcacaacagactcagttaatgaacatgatgatgcagcaacttcagaaccagcagaaccagggaaataaccatgcacctccccagaacaagctagcagaatttcttcgtgtgaggccgcctattttctctagtaccactaatcctgttgaagctagtgattggttgcatgccttagagaagaagttggatttgcttcagtgcactgatcaggagaaggtctcatttgcatcacatcagttgcatggccctgcctctgaatggtgggatcacttccgtctgaataggactactgctgaacctatcacttggcttgaattcaccgctgcttttcggaagacgcatataccatcgggagtggtgtctctcaagaagaaggagttcaggtcgctcacccagggatctcgctctgttacggagtatctgcacgagttcaatcgtctggctcgttatgctccagaagatgtgcgcaatgatgaagagcgtcaggagaagttcttggaaggacttaatgatgagctttcttacccactcatgactggagattattctgatttccagaaattagtggataaggctattcgtcaggaggacaagtataatcgcatggagcagaagaaacgccggattgctcaattcaagatacaacaggggaataatcagaagccgcgtcttattttaggacaccagtctatgccacatggaggttcttcgtctgttgttcgtccgcagcgtcagttcttcaacaacaatgctggcaacaacaaccgcaatcaagctccacgccttattgcagcctcgacacagcaacaacctgccaagagggagcaaggcagcaagcttgtggtgtgtttcaactgtggagacccaggacattatgctgacaagtgtccgaagccccgacgcgtgaaggttgtccctgcccagagcaactctaccgcaccagtatcaaaggcccgtgtcaatcatgttgctgctgcagaagctcaagatgctctagatgtgattttggacgatttacctgccaatgagttggcagaagttaagaggcaagtagatgatttgcttcagaaaggatacatcagaccgagttcatctccatggggagctccggttatttttgtggaaaagaaagatcatacccagaggatgtgtgtggactatcgtgcactaaatgatgtgactatcaagaataagtatccactacccagaattgatgatttgtttgatcagcttaaaggtgccaccattttctccaagatagatcttcgatcagggtatcatcagttgagaatcaaagaggaagatatacctaagacagcttttaccactaagtatggattgttcgaatgtactgttatgtcttttggacttaccaatgcccctgctttcttcatgaacttgatgaataaggtgtttatggagtacctagacaagttcgtggtggtctttattgatgacattcttatctactcccgaaccaaagaagagcatgaagaacatcttcgccttgcattagagaagctacgagaacatcaactgtatgctaagtttagcaagtgtgaattttggttgtttgaagtgaagttccttggtcacgtcatctcagccggaggagttgccgtcgattctagtaatgtggaatccgtaaccaactggaaacaaccaaagacagtttcagagattcgcagtttcctaggcctcgcaggatattaccggaggtttatagagaatttttccaagattgctaagcccatgacacgactgcttcagaaagatgtgaagtacaagtggtcggaagaatggcgtgacattgatcaagttagagaagcccaaattaatgatcctgatattcaagagatcaagaagaatatgagaagaggaaaagctatcggtttcttggaggatgagcatggaactccgtgcgccgccgtcgctccagccgtcgccgtcgctcgggaaggccgacgtcgtgttcgccgtcgcgtcgccgtcctcgtcctccccttcgccaccgccgaagaccgccggagcgtcatcgccgtcgtcgacccgaagagcttcgccgcttcctcctcgtcgccgtcgccgtccgttgatcttccgccgtcgttttggtcgccgcgaagattggagacaatccccttcttcgttgctgacattactgtccctgccgccggccgccaccccgccagatcaggccggggcggcacggatctagcggtcgccgccgccgccaccggggcgactcccctggccaccggagcaggctggcgagaagccccgccgccgccatccttacggtctttgctggcgaccgctcaggcagcggcgaggtggaggaggaagaaggagcgggaaggggtggccggacttgtcgcctccggagccgtcccgggggtagggcgacgcaagagcgtgacggttgacgctgtgaggtcccttcagcggtgggaacttcatggctgcggatcaatggaggcggtggcgatgaccacggatcctgaggcggggcccccatttgccaccccttatggcggatctggctggtggcggcgcgccaacggtgttgccaggaggccggtggctggggccggcgcgactcgggaaggtggcgacaacgggcagccgaagaaggagaatagatggggaccgacggcagcggggatggagatgatggcggggatggaaggcggcggcgaggatggtgacagcgggccggatccagtcgcgccggagtcgggcagatctggtgtgaggcaagcccgcagtggtggcggcgctgcggagttcgcgggctcatggcgatggtggtggcagcgactggacagcggcgacaacaggtggctggccaacggtagcatcggctgccggctactgtggcaacgacgctag

SEQ ID NO: 15167 - DNA, 4515 bp, Oryza sativa
  Clone ID: TFbOSC401836j.C1.o9.fg
atggttgttcagaatggttgggcctatgcaacaggggtttacacacatatgccgcgctacaagcctgagtacttgtttggtgttgagggttttgtccaggagttgcgtacaatgtcctttgtcgttggatttgggactgcccctttttatgcccagattcctcatgatcgtcatgaagagaagtgccgagtcaaagtcaccttgaacagtaatagtgaagatatcccatcggtgatgttcgaagctggaggaagaaactacatccattcatgtcaggaagtggcaaggatcgccataggagagctccgtgatcgttacagtgatcagttggctgacactgagtatcgttaccatcctcgtcaaccacagggaagtgaccgtggcagttaccttgagactgaaggaattgagaatgatgctaccacaacacatttggttgagatgctatgggctatggatgaaagtcgtgcggaaactgtgttagcggcccaagatcgtgaagattggaatcgtggtaagatttgcaagctagaagacaaggtggatcgtttggagaaggaactagccgcgttgaagggagaagcaccacctcagaaggtcaggattcgtcttaccgcaaggaagagagctctatttgtccctcgctatcaattggcgccaaaggtccgtgtggtggagaaagaagttgccccagcagatcctccggtcgtcaacatggtgaacactcgtagcaacgggaatggtcccaaccccaacaaccccaataacaataacaatggggagaatccaacccttgctcaagttcttgctcaacagactcagctaatgcacatgatgatgcaacaacttcagaaccagcagaaccaaggaaataaccatgcacctcctcagaataagttagcagaatttcttcgtgtgaggccgcctattttctctagtaccactaatcctgttgaagctgctgattggctgcatgccatagagaagaagttggatttgcttcagtgcactgatcaggaaaaggtctcatttgcatcgcatcagttgcatggccctgcctctgaatggtgggatcacttccgtctgaataggactactgctgaacctatcacttggcttgaattcaccgctgcttttcggaagacgcatataccatcgggagtggtgtctctcaagaagaaggagttcaggtcgcttacccagggatctcgcactgttacggagtatctacacgagttcaatcgtctagcccgttatgctccggaaaatgtacgcaatgatgaagagcgtcaggagaagttcttggaaggacttaatgatgagctttcttacccactcatgactggagattattctgatttccagaaattagtggataaggctattcgtcaggaggacaagtataatcgcatggagcagaagaaacgccagattgctcaattcaagacgcaacaggggaataatcagaggccgcgtcttactttaggaccccagtctatgccacatggaggttcttcgtctgtcgttcgtccgcagcgtcagttcttcaacaacaatgttggcaacaacatccgcaatcaagttccacgtcctgttgcagctccaacacaacaacagcctgccaagagggagcaaggtagcaagcccgtggtgtgtttcaactgtggagacccgggacattacgctgacaagtgtccgaagccccgacgcgtgaaggttgtccctgtccagagcaactctaccgcaccagcatcagaggctcgtgtcaatcatgttgcagctgcagaggctcaagatgctccagatgtgattttgggtacgttccttgttaactcagttcctgcaacagtgcttttcgattctggtgctacacattcatttctatctatgagttttgcgggaaatcatgggatggaagtagaagatcttagacgtcctttgatggttagtaccccaagtaatcaagcactctctttgcaacgtagcccctctgtcagaatagaaattaagggagtaccatttctagccaatcttatcttgttagaatccaaagaccttgatgtcatcctagggatggattggttagctagacataaaggtatgatagactgtgccaacagaaaagtaactctctccagcaatgatggtcgagttgtaactgttcatgcattgtcttctgagtctttaaggtcaagactgactcaagtaactttggaagagattcctatagttcgggagtatcccgatgtgttcccagatgatttacctggtatgccgcccaaaagggatatagagttcagaatagatttggtacctggaacaactccgatccataatagaccttatagaatggcagccaatgagttggcagaagtcaagaggcaagtggatgatttgcttcagaagggatacatcagaccgagttcatctctatggggagctccggttatttttgtggaaaagaaagatcatacccagaggatgtgtgtggactatcgtgcactaaatgatgtgactatcaagaataagtatccgctacccagaattgatgatttgtttgatcagcttaaagataagtttgtggtggtctttattgatgacattcttatctactctcgaaccaaagaagagcatgaagaacatcttcgccttgcattggagaagctacgagaacatcaactgcatgctaagtttagcaagtatgaattttggttgtctgaagtgaaattccttggtcacaaagatgtgaagtacaagtggtcagtagaatgtgagcagagttttcaagagttgaaaagtcgcttaatatcagctcctattttgattttacctgatccaaagaagggtttccaggtgtattgcgatgcatccaaacttgggttaggttgtgttctgatgcaagatgggaaggtggttgcctatgcatctcgtcagttacgcttgcatgagaagaactaccctactcatgatcttgaattagctgcagtagttcatgcgttgaagatttggcatcattatcttttcggtactcgtacagaggtatacactgatcacaagagtttaaagtatatctttactcagccggatctgaacatgagacaacggagatggttggaattaattaaggattttgacatgggaattcattatcacccgggaaaggctaatgttgtagcagatgctcttagcaggaaaagctattgcaatgctacggaaggacgacagttgccattggaattatgcaaggaatttgaaagattaaatttgggaattgtccgaagaggtttcgttgcagccttagaagcgaagtccactctaattgatcaagttagagaagcccaaattaatgatcctgatattcaagagatcaagaagaatatgagaagaggaaaagctatcggtttcttagaggatgagcaaggaactgtatggttgggtgagagaatttgtgtccccgacaacaaagatttaaaagatgcaattctgaaagaagcccatgatactttatactctattcaccctggtagtacaaaaatgtaccaggatcgcaaggaaagattttggtgggcaagtatgaagcgtgaaatcgcagaatacgtagcactatgtgatgtttgtcaacgagtcaaggcagaacatcagaaacctgccggtttgctgcagcctttgaagattcctgaatggaaatgggaagaaatcggtatggattttatcactggtttgcccagaacgtcatctggccatgactctatttgggtaatagtcgacagacttaccaaggtggcacatttcattccggtaaagacaacttattccggaagtcgcttagcggaattgtatatggcaaggattgtgtgtttgcatggcgtccctaagaagatagtgtctgatcgaggaagtcagtttacttcaaatttttggaagaaacttcaggaagagatgggttctaagctgaactttagtactgcttatcatccgcagacagacggacaaaccgaaagggtgaatcaaattttggaagacatgttgagagcttgtgctttagatttcggtggaagttgggataagaatctaccctatgcagaattttcgtataataacagttatcaagctagtcttcagatggctccgtacgaagcactgtatggtcggaagtgccgcactccgcttttgtgggatcaaacgggagaacgtcaggttttcgggacagatatcctaagggaagcagaagaaaaggtgaaaatcattcaagaaagattgcgtgtggctcagtctcgtcataagagttatgccgacaatcaccgcagagatttgagttgtatcctaagggagattatgtgtatcttcgtgtcacgcctcttcgaggagttcatcgttttcacaccaaaggaaaattggcaccgcgttttgtgggaccttataagattgtcagtagaagaggagaagttgcttatcagttggagttacctcaatctttggcaggagtccataatgtgttccatgtgtcgcaattga

SEQ ID NO: 15168 - DNA, 1370 bp, Oryza sativa
  Clone ID: TFbOSC401920j.C1.o4.np
gcgagggggcggccggggagcggcgaaaacgagcggaggaggcgaaaagggctccgttcgtgccgaagcaccgccgttcgccggtgagcttgcgccgtccgagctgtcgagccgccgagccgccgccgccggtggtgacgtcatcgctgacgtcatcgtccccgtctcccgtgagccgtggaagtggaaacaataataatgaagataacccaactcttgctcaagttctggctcaacagactcagttaatgaacatgatgatacagcagatgcagaaccagctcaaccaaggaaacaacaatgctccaccgccgcagaacaagttagctaattttcttcgtgtgaggccacctaccttttctagcactactaacccagtggaagcaggtgattggttgcacactattgagaagaagttagatttgcttcagtgcactgatcaggagaaggtctcatttgcatcacaccaattgcatggccctgcctctgaatggtgggatcacttccgcctgaataggactactgctgaacctatcacttggcttgaattcaccgctgctttccggaagacgcatataccatcgggagtggtgtctctcaagaggaaggaattcaggtcgctcacccagggatctcgctcagttacggagtatctgcacgagttcaatcgtctggctcgttatgctccggaagatgtgcgcactgatgaagagcgccaggagaagttcttggaaggacttaatgatgagctttcttacccactcatgactggagattatcatgatttccagaagttagtggataaggctattcgccaggaggacaaatacaatcgcatggagcagaagaaacgccggattgctcaattcaagacacaacaggggaataatcagaagccgcgtcttactttaggaccccagtctatgccacagggaggttcttcgtctgttgttcgtccgcagcgtcagttcttcaacaacaatgctggcaacaacatccgtaatcaagctccacgtcctgttgcagcctcgacacagcaacaacctgccaagagggagcaaggcagcaagcccgtggtgtgtttcaactgtggagacccaggacattacgctgacaagtgtccgaagcctcgacgtgtgaaggttgtccctgcccagagcaactctaccgcaccagcgccaaaggcccgtgtcaatcatgttgctgctgcagaagctcaagatgctccagatgtgattttgggtacgtttcttgttaacttagttcctgcaacagtgcttttcgattctggtgctacacattcattcttatccatgagttttgcgggaaatcatgggatagaagttgagtttatgaagttccccctctgg

SEQ ID NO: 15169 - DNA, 3039 bp, Oryza sativa
  Clone ID: TFbOSC401925j.C1.o12.gm
atggatgatagagaatgtggggcccacctgtcgggcccgtctcctacctccagccggcgccaacgcatcccgcaaccgccgcaccgctcgctcccgcacctcctgggccacgtcgcccacccgaaggtttccttcgccgttgccgtcgccgtgggcctccgccgtcgcctccgagcccctttaaaaggatccccgccgtgctccgccgtcgctccagctgtcgccgccgctcgggaagaccgccgtcgtcatcgccaagtcgccgccgtcctcgtccgccccttcgcagccgtcggaacccgccggagcttcgtcgccgtcgacaacccgaagcgccgccgttcgccggtgagcgtgcgccgcccgagccgtccgctccgccgagccgccgccgccgtcggtgacgtcattgctggcgtcatcaaggccgtccgccgtggttccggagaccgtccaccgttcgtcgtcgcctcccactcattcctcgccgccgttcgccgtcgcccctccgtgccggccgaatcctcgggaagtgaccgtggcagttatcttgagactgaaggaattgagaatgatgctaccacgaaacatttggttgagatgttgtgggctatggatgaaagtcgtgcggagactgtgttagcagctcaagatcgtgaagatcggaatcgtggtaagatttgcaagttagaagacaaggtggatcgtttggagaaggaattagccgcattgaagggagaagcaccgccgcagaaggccaggattcgtcttaccgcaaggaagagagctctatttgtccctcgctatcaactggcgccaaaggttcgtgtggtggagaaagaagttgctccagctcaagcggatcctccggtcatcatcataagtagtgatgaagaagaagaatctaagcgcaacaattccaagattgagtgggagaaggtctcatttgcatcacatcagttgcatggccctgcctctgaatggtgggatcacttccgccttaacaggactactgctgaacctatcacttggcttgaattcaccgctgctttccggaagacgcatataccatcgggagtagtgtctctcaagaagaaggagttcaggtcgctttcccagggatctcgctctgttacggagtatctgcacgagttcaatcgtcttgctcgttatgctccggaagatgtgcgcaatgatgaagagcgccaggagaagtttttgggaggacttaatgatgagctttcttacccactcatggttggagattatcctgatttccagaaattagtggataaggctattcgtcaggaggacaagtacaatcgcatggagcagaagaaacgtcggattgctcaattcaagacacaacagggaaataatcagaagccgcgtcttactttaggaccccagcccatgccacagggaggttcttcgtctgttgttcgtccgcaacgtcagttcttcaacaacaatgctggcaacaacatccgtaatcaagctccacgtcctgttgcagctccagcacagcaacaacctgccaagagggagcaaggcaacaagcccgtggtgtgtttcaactgtggagatccaggacattatgctgacaagtgtccgaagccccgacgcgtgaaggttgtccctgcccagaataactctgctgtaccagcatccaaggctcgtgtaaatcatgtcgctgctgcagaagctcaagatgctccagatgtgattttggtccgggagtatcctgatgtgttcccagatgatttacctgccaatgagttggcagaagttaagaggcaagtagatgatttgctacagaaaggatacatcagaccgagttcatcaccatggggagctccggttatttttgtggaaaagaaagaccatactcagagaatgtgtgtggactatcgtgcactaaacgatgtgactattaagaataagtatccactacccaggattgatgatttgtttgatcaacttaaaggtgccactgttttctccaagatagatcttcgatcagggtatcatcagttgagaatcaaagaggaagatatacctaagacagcttttaccactaggtatgggttgttcgaatgtactgttatgtcttttggacttaccaatgcccctactttcttcatgaacttgatgaataaggtgtttatggaatacttagacaagttcgtggtggtctttattgatgatattcttatctactctcgaaccaaagaagagcatgaagaacatcttcgccttgcattggagaagctacgagaacatcaactgtatgctaagtttagcaagtgtgaattttggttgtccgaagtgaaattccttggtcacgtcatctcagccggaggagttgccgtcgatcctagtaacgtggaatccgtaaccaattggaagcaaccaaagacagtttcagagattcgcagtttcctaggccttgcaggatattatcggaggtttatagagaatttttccaagattgctaagcccatgacacgactgcttcagaaagatgtgaagtacaagtggtcggaagaatccttagaagcgaagcccactctaattgatcaagttagagaagcccaaattaatgatcctgatattcaagagatcaagaagaatatgagaagaggaaaagctattggtttcttggaggatgagcacggaactccgaaggtttccttcgccgttgccgtcgccgtgggcctccgccgtcgcctccgagcccctttaaaaggatccccgccgtgctccgccgtcgctccagctgtcgccgccgctcgggaagaccgccgtcgtcatcgccaagtcgccgccgtcctcgtccgccccttcgcagccgtcggaacccgccggagcttcgtcgccgtcgacaacccgaagcgccgccgttcgccggtgagcgtgcgccgcccgagccgtccgctccgccgagccgccgccgccgtcggtgacgtcattgctggcgtcatcaaggccgtccgccaggaagagttctacaatgaggctgatggtgtggaggattag

SEQ ID NO: 15170 - DNA, 4209 bp, Oryza sativa
  Clone ID: TFbOSC404471j.C1.o39.gm
atggcgtcgaagcggatcctcaaggaactaaaggacctgcagaaagatcctccaacatcatgcagtgcaggtcctgctggtgaggatatgttccattggcaggcaaccattatgggccctccagatagtccctatgctggtggtgttttcttggtgaatattcatttccccccggactaccccttcaaacctccaaaggtgtcttttaagacaaaggtcttccatccaaacatcaatagcaatggaagcatatgcctcgacattcttaaggaacagtggagccctgctttgacaatatctaaggtcttgctttcgatctgctcgctgctcactgaccccaacccggacgaccctcttgtccctgagattgcccacatgtacaagacggaccgtccaaagagagagagagccgccgccgcccgacgccggcgccgctccaagtcgtccgctcgtcggcgccgagatccgcccggccgcctctccgccgggtgccacgccgtggtggaaggctgcctctccgtcccgccgctcgaccgccccctgcctctccgcccggcgtcgtggcccctcgtgccgccggcgaagtcgccgcgggatctgcctcaccgcccgggctgccccgccggccgccgccactgctcgaccaccccgcccgccgccaccgctcacgacgcggaggccggatccgagcgtcggcgcgccggccgcctctccgcctggccggctgtgctccgccgccagccaccgccgctcgaccccgccatcgccgctcagagagctcactaccgtgggcctttgccgccgcctccgagcccctttaaaaggctccccgcttcgccgtcgccgccgtcgctccagccgtgcgccgccgtcgctccagccgtcgccgtcgctcgggaagaccgccgtcgtggtcgccaagtcgccgccgtcctcgtccgcctcttcgctgccgtcggagatcgccggagcttcatcgccgtcgacaacccgaaggtttccgccgtttcctcctcgtcgccgtcgtcgttcgttgttcctccgccgtcgctttggtcgccgatgccgcgctacaagcctgagtacttgtttggtgttgagggttttgtccaggagttgcgtacgatgtcctttgtcattggatttgggaatgcccctttttatacccagattcctcattatcgtcatgaagagaagtgccgagtcaaagtcaccttgaacagcaatagtgaagaggtcccctcagtgatgttcgaagctggaggaagaaattacatccatgcatgtcaggaggtggcaaggatcgccataggagagctccgtgatcgctacagtgatcagttggccgacactgagtatcgctaccatcctcgtcaacctcagggaagtgaccgtggcagctaccttgagactgaaggaattgagaatgatgctaccacaaggcatttggttgagatgctgtgggctatggatgaaagtcgtgcggagactgtgttagcggctcaagatcgtgaagaccggaatcgtggtaagatttgcaagttagaagacaaggtggatcgtttggagaaggaattagctgcgttgaagggagaagcaccgccgcagaaggccagggttcgtctcaccgcaaggaagagagctctatttgtccctcgctatcaattggcgccaaaggttcgtgtggtggaaaaagaagttgccccaaccctagcagatcctccggtcatcatcataagtgatgatgaagaagaaggatccaagcgcacccgttccaagattgagtgggtagcaactcaagatgatgaagacgagccgaatgagccttcaatcgacctccgatgctcggaagaactagacaacgggaatggtcccaacaatcccaataataacaatggagagaaccccactcttgctcaagttcttgctcaacagactcagcttatgaacatgatgatgcaacaacttcagaatcagcagaaccaaggaaataaccatgtacctcctcagaataagttagcagaatttcttcgtgtgaggccgcctgttttctctagtaccactaatcctgttgaagctggtgattggctgcatgccatagagaagaagttggatttacttcagtgcactgatcaggagaaggtttcatttgcatcgcatcagttgcatggccctgcctctgaatggtgggatcacttccgcctgaataggattactgctgaacctatcacttggcttgaattcgccgctgctttccgaaagacgcatataccatcaggagtagtgtctctcaagaagaaggagttcaggtcgcttactcagggatctcgctctgttacggagtatctgcacgagttcaatcgtcttgctcgttatgctccggaagatgtgcgcaatgatgaagagcgccaggagaagttcttggaaggacttaatgatgagctttcttacccactcatgactggagattatcctgatttccagaagttagtggataaggctattcgtcaggaggacaagtacaatcgcatggagcagaagaaacgccggattgctcacttcaaggcacaacaggggagtaatcagaagccgcgtcttactttaggaccccagcctatgccacagggaggttcttcgtctgttgttcatccgcaacgtcagttcttcaacaacaatgctggcaacaacatccgcaatcaagctccacgccctgttgcagcttcaacacagcaacagcctgccaagagggagcaaggcagcaagcttgtggtgtgtttcaactgtggagacccaggacattatgctgacaagtgtccgaagcctcgacgtgtgaaggttgtccctgcccagaacaactctactgtaccagcatcaaaggctcgtgtcaatcatgtcgctgctgcagaagctcaagatgctccagatgtgattttggtccgggagtatcctgatgtgttcccagatgatttacctgaaaggatacatcagaccaagttcgtcaccatggggagctccagttatttttgtggaaaagaaagaccatacccagagaatcttaaaggtgccactgttttctccaagatagatcttcgatcagggtatcaccagttgagaatcaaagaggaagatatatctaagacagcttttaccactagagccctagcgccgtgtgccctagcttcgccgtcgccgccgtcgctccagccgtgcgccgccgtcgctccagccgtcgccgtcgctcgggaagaccgccgtcgtggtcgccaagtcgccgccgtcctcgtccgcctcttcgctgccgtcggagatcgccggagcttcgtcgccgtcgacaacccgaaggtttccgccgtttccttctcgtcgccgtcgtcgttcgttgttcctccgccgtcgctttggtcgccgatgccgcgctacaagcctgagtacttgtttggtgttgagggttttgtccaggagttgcgtacgatgtcctttgtcattggatttgggaatgcccctttttatacccagattcctcattatcgtcatgaagagaagtgccgagtcaaagtcaccttgaacagcaatagtgaagaggtcccctcagtgatgttcgaagctggaggaagaaattacatccatgcatgtcaggaggtggcaaggatcgccataggagagctccgtgatcgctacagtgatcagttggccgacactgagtatcgctaccatcctcgtcaacctcagggaagtgaccgtggcagctaccttgagactgaaggaattgagaatgatgctaccacaaggcatttggttgagatgctgtgggctatggatgaaagtcgtgcggagactgtgttagcggctcaagatcgtgaagaccggaatcgtggtaagatttgcaagttagaagacaaggtggatcgtttggagaaggaattagctgcgttgaagggagaagcaccgccgcagaaggccagggttcgtctcaccgcaaggaagagagctctatttgtccctcgctatcaattggcgccaaaggttcgtgtggtggaaaaagaagttgccccaaccctagcagatcctccggtcatcatcataagtgatgatgaagaagaaggatccaagcgcacccgttccaagattgagtgggtagcaactcaagatgatgaagacgagccgaatgagccttcaatcgacctccgatgctcggaagaactagagtga

SEQ ID NO: 15171 - DNA, 2508 bp, Oryza sativa
  Clone ID: TFbOSC405035j.C1.o5.gm
atgggggagagtggtttgaaacaagaaatggtgaacgcggcgagcccaacgacgatgcagacacaggcagcgccgtgcgccgccgccgttccagacgtcgccgtcgctcgggaagaccgtcgtcgtggtcgccaagtcgtcgccgtcctcgtccgcctcttcgtcgccgccgaagaccgccggagcaccgtcgccgccgtcaacccgaagagcgccgccgcttcttcctcgtcgccgtcgccgtccgttcctcttccgccgtcgctttggtcgccgatgccgcgctacaagcctgagtacttgtttggtgttgagggttttgtccaggagttgcgtacaatgtcctttgtcattggatttgggactgcccctttttatgctcagattcctcatgatcgtcatgaagagaagtgccgagtcaaagtcactttgaacagtaatagtgaagatatcccttcagtgatgttcgaagctggaggaagaaactacatccatgcatgtcaggaggtggcaaggatcgccataggagagctccgtgatcgctacagtgatcagttggccgacactgagtatcgctaccatcctcgccaaccccagggaagtgaccgtggcagctaccttgagactgaaggaattgagaatgatgctaccacaaggcatttggttgagatgctgtgggctatggatgaaacccgtgcagagactgtgttagcagctcaagatcatgaagaccggaatcgtggtaagatttgcaagctagaagacaaagtggatcgtttggagaaggaattagccgcattgaagggagaagcaccaccgcagaaggccagggttcgtcttaccgcaaggaagagagttctatttgtccctcgctatcaattggcgccaaaggtccgtgtggtggagaaagaagttgccccaaccctagcagatcctccagtcatcatcataagtgatgatgaagaagaagaatccaagcgcaaccattccaagattgagtgggtagcaactcaagatgatgaagacgagccgaacgagccttcaatcgacctccgatgctcggaaggactagataccactaatcctgttgaagctggtgattggttgcatgccatagagaagaagttggatttgcttcaatgcactgatcaggaaaaggtctcatttgcatcacaccagttgcatggcactgcctctgaatggtgggatcacttccgcctgaataggactactgttgaacctatcacttggcttgaattcaccgctgctttccggaagacgcatataccatcgggagtggtgtctctcaagaagagggaattcagatcgctcactcagggatctcgctctgttacggagtatttgcacgagttcaatcgtctggctcgttatgctccggaagatgtgcgcaatgatgaagagcgccaagagaagttcttggaaggacttaatgatgagctttcttacccactcatgactggagattatcctgatttccagaagttagtggataaggctattcgtcaggaggacaaatacaaccgcatggagcagaagaaacgtcggattgctcaattcaaggcacaacaggggaatagtcagaagccgcgtcttaccttagaaccccagtccatgccacagggaggttcctcgtctgttgttcgtccgcagcgtcagttcttcaacaacaatgctggcaacaacatccgtaatcaagctccacgccctgttgtagctccaacacagcaacaacctgccaagagggagcaaggcagcaagcccgtggtgtgtttcaactgtggagacccaggacattacgctgacaagtgtccgaagccccgacgtgtgaaggttgtccctgcccagagcaactttaccgcaccagcgccaaaggcccgtgtcaatcatgttgctgctgcagaagctcaagatgctccagatgtgattttggtgaagttccttggtcacgtcatctcagccggaggagttgccgttgatcctagtaatgtggaatccgtaaccaactggaaacaaccaaagacagtttcagagatccgcagtttcttaggcctcgcaggatattatcggaggtttatagagaatttctccaagattgctaagcccatgacacgactgcttcagaaagatgtgaagtacaagtggtcggaagaatacgtcgccgtcgctcgggaagaccgtcgtcgtggtcgccaagtcgtcgccgtcctcgtccgcctcttcgtcgccgccgaagaccgccggagcaccgtcgccgccgtcaacccgaagagcgccgccgcttcttcctcgtcgccgtcgccgtccgttcctcttccgccgtcgctttggtcgccgatggtgggagctttgtgtcaaagtcttgcctggtctttaaccaatgctaatgacgttgatgccctctacgagccgttctccttgaaggaagattgctttgtgctttcaattctgcatggcaaccatcaattcagggaagtggagacatgttaa

SEQ ID NO: 15172 - DNA, 1692 bp, Oryza sativa
  Clone ID: TFbOSC406028j.C1.o24.gm
atggtgaacactcgcagcaacgggaatggccccaacaacaacaataacaataacaatggagagaatcccacacttgctcaagttcttgctcaacagacacagctaatgaacatgatgatgcagcaacttcagaaccagcaaaaccaaggaaataaccatgcacctccccaaaacaagttagcagaatttcgtcgtgtgaggccgcctattttctctagtaccactaatcctgttgaagctggtgattggttgcatgccatagagaagaagttggatttgcttcaatgcactgatcaggaaaaggtctcatttgcatcacaccagttgcatggcactgcctctgaatggtgggatcacttccgcctgaataggactactgttgaacctatcacttggcttgaattcaccgctgctttccggaagacgcatataccatcgggagtggtgtctctcaagaagagggaattcagatcgctcactcagggatctcgctctgttacggagtatttgcacgagttcaatcgtctggctcgttatgctccggaagatgtgcgcaatgatgaagagcgccaagagaagttcttggaaggacttaatgatgagctttcttacccactcatgactggagattatcctgatttccagaagttagtggataaggctattcgtcaggaggacaaatacaaccgcatggagcagaagaaacgtcggattgctcaattcaaggcacaacaggggaatagtcagaagccgcgtcttaccttagaaccccagtccatgccacagggaggttcctcgtctgttgttcgtccgcagcgtcagttcttcaacaacaatgctggcaacaacatccgtaatcaagctccacgccctgttgtagctccaacacagcaacaacctgccaagagggagcaaggcagcaagcccgtggtgtgtttcaactgtggagacccaggacattacgctgacaagtgtccgaagccccgacgtgtgaaggttgtccctgcccagagcaactttaccgcaccagcgccaaaggcccgtgtcaatcatgttgctgctgcagaagctcaagatgctccagatgtgattttggtccgggagtatcccgatgtgttccccgatgatttacctgtgaagttccttggtcacgtcatctcagccggaggagttgccgttgatcctagtaatgtggaatccgtaaccaactggaaacaaccaaagacagtttcagagatccgcagtttcttaggcctcgcaggatattatcggaggtttatagagaatttctccaagattgctaagcccatgacacgactgcttcagaaagatgtgaagtacaagtggtcggaagaatacgtcgccgtcgctcgggaagaccgtcgtcgtggtcgccaagtcgtcgccgtcctcgtccgcctcttcgtcgccgccgaagaccgccggagcaccgtcgccgccgtcaacccgaagagcgccgccgcttcttcctcgtcgccgtcgccgtccgttcctcttccgccgtcgctttggtcgccgatggtgggagctttgtgtcaaagtcttgcctggtctttaaccaatgctaatgacgttgatgccctctacgagccgttctccttgaaggaagattgctttgtgctttcaattctgcatggcaaccatcaattcagggaagtggagacatgttaa

SEQ ID NO: 15173 - DNA, 4005 bp, Oryza sativa
  Clone ID: TFbOSC409249j.C1.o3.gm
gttccccatggtctcctctacccgccgccaccctcgccttcgcctctcgtcgtcggaatcgccctagcgtcgtgtgccctagctttgccgccgccgccgccgctccagccgtgcgccgccgtcgttccagccgtcgccgtcgctcgggaaggccaccgtcgtgatcgccaagtcgtcaccgtcgtcgtccgccccttcgccgccgccgaagaccgccggagcgtcatcgccgtcgtcgacccgaaaagcttcgccgtttcctcctcgtcgccgtcgccgtccgttgatcttccgtcgccgttttggtcgccggtgagttcgccgtgccgcccgctttgtcttggtgctttccgtttgtgtcctcgcgccgccgttcgccggcgagcgtgcgccgcccgagccgtccgccccgccgagccgccgccgccgtcggtgacgtcaccgctgacgtcatcaaagccgtccgccatgccgcgctacaagcctgagtacttgtttggtgttgagggttttgtccaggagttgcgtacaatgtcctttgtcattggatttgggactgcccctttttatgcccagattcgtcatgatcgtcatgaagagaggtgccgagtcaaagtcaccttgaacagtaatagtgaagatattccatcggtgatgttcgaagctggaggaagaaactacatccatgcatgtcaggaggtggcaaggatcgccataggagagctccgtgatcgctacagtgatcagttggccgacactgagtatcgttaccatcctcgtcaaccacaggggagtgaccgtagcagttaccttgagactgaaggaattgagaatgatgttaccacaagacatttggttgagatgctgtgggctatggatgaaagtcgtgcggaaactgtgttagcggctcaagatcgtgaagattggaatcgtggtaagatttgtaagctagaagacaaggtggatcgtttggagaaggaactagctgcgttgaagggagaagcaccgccgcagaaggccaggattcgtcttaccgcaaggaagagagctttatttgtccctcgttatcaattggcgccaaaggtccgtgtggtggagaaagaagttgccccagcagatcctccggtcgtcaacgtgagtgatgatgaagaagaacccaagcacactcattccaagattgagtgggtagcaactcaggatgatgaagaagagccgaacgaaccttcaatcgacctccgatgctcggaagaactagacaacgggaatggtcccaacaaccccaataacaacaatggagagaaccccactcttgctcaagttcttgctcaacagactcagcttatgcacatgatgatgcaacaacttcagaatcagcagaaccaaggaaataaccatgcaactccccagaacaagttagcagaatttcttcgtgtgaggccgcctgttttctctagtaccactaatcctgtcgaaactggtgattggctgcatgccatagagaagaagttggatttgcttcaatgcactgatcaggagaaggtctcatttgcatcacatcagttgcatggccctgcctctgaatggtgggatcacttccgcctgaataggactactgctgaacctatcacttggcttgaattcaccactgctttccggaagacgcatataccatcgggagtggtgtctctcaagaagaaggagttcaggtcgcttacccagggatctcgctctgttacggagtatctgcacgagttcaatcgtctagctcgttatgctccggaagatgtgcacaatgatgaagagcgtcaggagaagttcttggaaggacttaatgatgagctttcttacccactcatgactggagattattctgatttccagaagttggtggataaggctattcatcaggaggacaaatacaatcgcatggagcagaagaaacgccggattgctcaattcaagacgcaacaggggaataatcagaagccgcgtcttactttaggacctcagtccatgccaccgggaggttcttcgtcggttgttcgtccgcagcgtcagttcttcaacaacaatgctggcaacaacatccgcaatcaagttccacgccctgttgtagctccaacacagcaacagcctgctaagagggagcaaggtagcaagcccgtggtgtgtttcaactgtggagacccaggacattatgctgacaagtgtccgaagccccgtcgcgtgaaggttgttcctgctcagagcaactctaccgcaccagtatcaaaggcccgtgtcaatcatgttgcagctgcagaggctcaagatgctccagatgtgattttggtccgggagtattctgatgtgttcccagatgatttacctgccaatgagttggcagaagttaagaggcaagtagatgatttgcttcagaaaggatacatcagaccgagttcatcaccatggggagctccggttatatttgtggaaaagaaagaccatacccaaaggatgtgtgtggactatcgtgcactaaacgatgtgactatcaagaataagtacccgctacccagaattgatgatttgtttgatcagcttaaaggtgccaccgttttctccaagatagatcttcgctcagggtatcaccagttaagaatcaaagaggaagatatccctaagacagcttttaccactaggtatgggttgttcgaatgtactgttatgtcttttggacttaccaatgcccctgctttctacatgaacttgatgaataaggtgtttatggaatacctagataagtttgtggtggtctttattgatgacattcttatctactctcgaaccaaagaagagcatgaagaacatcttcgccttgcattggagaagctacgagaacatcaactgtatgctaagtttagcaagtgtgaattttggttgtctgaagtgaaattccttggtcacgtcatctcagcaggaggagttgccgtcgatcctagtaatgtggaatccgtaaccaattggaaacaaccaaagacagtttcagagattcgcagtttcctaggcctcgcaggatattaccggaggtttatagagaatttttccaagattgctaagcccatgacacgattgcttcagaaagatgtgaagtacaagtggtcagaagaatccgtcgccgtcgctcgggaaggccaccgtcgtgatcgccaagtcgtcgccgtcctcgtccgccccttcgccgccgccgaagaccgccggagcgtcatcgccgtcgtcgacccgaaaagcttcgccgtttcctcctcgtcgccgtcgccgtccgttgatcttccgtcgccgttttggtcgccggtgagttcgccgtgccgcccgctttgtcttggtgctttccatttgtgtcctcgcgccgccgttcgccggcgagcgtgcgccgctcgagccgtccgccccgccgagccgccgctgccgtcggtgacgtcaccgctgacgtcatcaaggccgtccgcccgtggttcattgcggggcaccagactgagaagtggcggagataagcccacgggggtcgctggggagtccatgccttgttataagggggtgattatgatccaggaaggtgcgctgcagtggattgtgttgtataaggggtattgtcacaactcctttccgaggtaccgtggtggtattgaggcacatggtgacatgatccacgggaacgcagagctcgccgacgatgctctggagcgcgcactggacgccgtcatcgggttctcatcgtcgttccgaccgaaccgaaccaccccaagccgaacccttgcgccaccaggatcacctcgacgtcctcttcaagataccccaagaaaacccatccaatggcgcagcgatcttggagatcgacatcgtgttctccaactccattcaatcgcttccatcatcgattccattctctccgccgacgtcattcctggagttgtgccatgccgccatggagcttcgccgtcgctgtggctctgcagacatccctag

SEQ ID NO: 15174 - DNA, 2754 bp, Oryza sativa
  Clone ID: TFbOSC410860j.C1.o1.gm
atgccgcgttacaagcctgagtacctgtttggtgttgagggttttgtccaggagttgcgcacgatgtcctttgtcattggatttgggactgcccctttttatgcccagattcctcatgatcgtcatgaagagaagtgccgagtcaaagtcaccttgaacagcaatagtgaagaggtcccctcagtgatgtttgaagctggaggaagaaactacatccatgcatgtcaggaggtggcaaggatcgccataggagagctccgtgatcgctacagtgatcaattggccgacactgagtatcgctaccatcctcgccaacctcagggaagtgaccgtggcagttaccttgagactgaaggaattgagaatgatgttaccacgaaacatttggttgagatgttgtgggctatggatgaaagtcgtgcggagactgtgttagcagctcaagatcgtgaagatcggaatcgtggtaagatttgcaagctagaagacaaggtggatcgtttggagaaggaattagccgcattgaagggagaagcaccgccgcagaaggccaggattcgtcttaccgcaaggaagagagctttatttgtccctcgctatcaactggcgccaaaggttcgtgtggtggagaaagaagttgccccagctcaagcggatcctccggtcatcatcataagtagtgatgaagaagaagaatccaagcgcaaccattccaagattgagtgggtagcaactcaagatgatgaagatgagccttcaattgacctccgatgcttggaagaactagataccactaatcctgttgaagctagtgattggctgcatgccatagagaagaagttggatttacttcagtgtactgatcaggagaaggtctcatttgcatcacatcagttgcatggccctgcctctgaatggtgggatcacttccgccttaacaggactactgctgaacctatcacttggcttgaattcaccgctgctttccggaagacgcatataccatcgggagtagtgtctctcaagaagaaggagttcaggtcgctttcccagggatctcgctctgttacggagtatctgcacgagttcaatcgtcttgctcgttatgctccggaagatgtgcgcaatgatgaagagcgccaggagaagtttttgggaggacttaatgatgagctttcttacccactcatggttggagattaccctgatttccagaaattagtggataaggctattcgtcaggaggacaagtacaatcgcatggagcagaagaaacgtcggattgctcaattcaagacacaacagggaaataatcagaagccgcgtcttactttaggaccccagtccatgccacagggaggttcttcgtctgttgttcgtccgcaacgtcagttcttcaacaacaatgctggcaacaacattcgtaatcaagctccacgtcctgttgcagctccagcacagcaacaacctgccaagagggagcaaggcaacaagcccgtggtgtgtttcaactgtggagacccaggacattatgctgacaagtgtccgaagccccgacgcgtgaaggttgtccctgcccagaataactctgctgtaccagcatccaaggctcgtgtaaatcatgtcgctgctgcagaagctcaagatgctccagatgtgattttggtccgggagtatcctgatgtgttcccagatgatttacctgccaatgagttggcagaagttaagaggcaagtagatgatttgctacagaaaggatacatcagaccgagttcatcaccatggggagctccggttatctttgtggaaaagaaagaccatactcagagaatgtgtgtggactatcgtgcactaaacgatgtgactatcaagaataagtatccactacccaggattgatgatttgtttgatcagcttaaaggtgccactgttttctccaagatagatcttcgatcagggtatcatcagttgagaatcaaagaggaagatatacctaagacagcttttaccactaggtatgggttgttcgaatgtactgttatgtcttttggacttaccaatgcccctgctttcttcatgaacttgatgaataaggtgtttatggaatacttagacaagttcgtggtggtctttattgatgatattcttatctactctcgaaccaaagaagagcatgaggaacatcttcgccttgcattggagaagctacgagaacatcaactgtatgctaagtttagcaagtgtgaattttggttgtccgaagtgaaattccttggtcacgtcatctcagccggaggagttgccgtcgatcctagtaacgtggaatccgtaaccaattggaagcaaccaaagacagtttcagagattcgcagtttcctaggccttgcaggatattatcggaggtttatagagaatttttccaagattgctaagcccatgacacgactgcttcagaaagatgtgaagtacaagtggtcggaagaatccttagaagcgaagcccactctaattgatcaagttagagaagcccaaattaatgatcctgatattcaagagatcaagaagaatatgagaagaggaaaagctattggtttcttggaggatgagcaaggaacaccgtgctccgccgtcgctccagctgtcgccgccgctcgggaagaccgccgtcgtcatcgccaagtcgccgccgtcctcgtccgccccttcgcagccgtcggaacccgccggagcttcgtcgccgtcgacaacccgaag

SEQ ID NO: 15175 - DNA, 4655 bp, Oryza sativa
  Clone ID: TFbOSC412750j.C1.o1.fg
ctcctggtttggaatggtatattcctggtttggagatagaactgtgcagccgggatggttgttcagattggttgggcctatacaacaggatgccgcgctacaagcctgagtacttgtttggtgttgagggatttgtccaggagttgcgtacgatgtcctttgccataggatttgggactgcccctttttatgcccagattcctcatgatcatcacgaaaagaagtgccgagtcaaagtcaccttgaacagtaatagtgaggatatcccctcagtgatgttcgaagctggaggaagaaactgcatccatgcatgtcaggaggcggcaaggatcgccataggagagcttcgcgatcgctacagtgatcagttggccgacactgagtatcgctaccatcctcgtcaaccccagggaagtgaccgtggcagctaccttgagactgaaggaattgagaatgatgctaccacaaggcatttggttgagatgctgtgggctatggatgaaagtcgtgcggagactgtgttagcggctcaagatcgtgaagatcggaatcgtggtaagatttgcaagctagaagacaaggtggatcgtttggagaaggagctagctatattgaagggagaagcaccgccgcagaaggccaggattcgtcttaccgcaaggaagagagctctatttgtccctcgctaccaattggcgccaaaggttcgtgtggtggagaaagaagttgccccagccttagcggatcctccggtcatcatcataagtgatgatgaggaagaagaatccaagcacaaccattccaagattgagtgggtagcaactcaagatgatgaagacgagccgaacgagccttcaatcgacctccgatgctcggaagaactagatgggattaccactaatcctgttgaagctggtgattggctgcatgccatagagaagaagttggatttgcttcaatgcactgatcaggaaaaggtctcatttgcatcccatcagttgcatggccctgcctctgaatggtgggatcacttccgccttaacaggactactgctgaacctatcacttggcttgaattcaccgctgctttccggaagacgcatataccatcgggagtggtgtctctcaagaagaaggaattcaggtcgctcacccagggatctcgctctgttacggagtatctgcacgagttcaatcgtctggctcgttatgctccggaagatgtgcgcaatgatgaagagcgccaggagaagttcttggaaggacttaatgatgagctttcttacccactcatgactggagattatcatgatttccagaagttagtggataaggctattcgtcaggaggacaaatacaatcgcatggagcagaagaagcgccggattgctcaattcaagacacaacaggggaataatcagaagtcgcgtcttactttaggaccccagtccatgccacagggaggttcttcgtctgttgttcgtccgcagcgtcagttcttcaacaacaatgctggcaacaacatccgtaatcaagctccacgtcctgttacagctccaacacagcaacaacctgccaagagggagcaaggcagcaagcccgtggtgtgtttcaactgtggagacccaggacattatgctgacaagtgtccgaagccccgacgcatgaaggttgtccctgcccagaacaactctaccgtaccagcatcaaaggcccgtgtcaatcatgttgctgctgcagaagctcaagatgctccagatgtgattttggatgatttacctggtatgccgcctaaaagggatatagagttcagaatagattgggtaccaggaacaactccgatccataagagaccttatagaatggcagccaatgagttggcagaagtcaagaggcaagtagatgatttgcttcagaaaggatacatcagaccaagttcatctccatggggagctccggttatttttgtggaaaagaaagatcatacccagaggatgtgtgtggactatcgtgccctaaatgatgtgactatcaagaataagtatccgctacccagaattgatgatttgtttgatcagcttaaaggtgctactgttttctccaagatagatcttcgatcagggtatcaccagttgagaatcaaagaggaagatatacctaagacagcttttaccactaggtatgggttgttcgaatgtactgttatgtcttttggacttaccaatgcccctactttcttcatgaacttgatgaataaggtatttatggaatacctagacaagttcgtagtggtctttatagatgatattcttatctattctcgaaccagagaagagcatgaagaacatcttcgccttgcattggagaagctacgagaacatcaactatatactaagtttagcaagtgtgaattttggttgtctgaagtgaagttccttggtcacgtcatctcagcaggaggagttgccgtcgatcctagtaatgtggaatccgtaaccaactggaagcaaccgaagacagtttcagagattcacagtttcttaggcctcgcaggatattaccggaggtttatagagaatttttccaagattgctaagcccatgacacgattgcttcagaaagatgtgaagtacaagtggtcggaagaatgtgagcagagttttcaagaattgaagaatcgcttaatatcagctcctattttgattttgcctgatccaaagaagggtttccaggtgtattgcgatgcatccaaacttgggttaggttgtgtactgatgcaagatgggaaggtggttgcctatgcatctcgtcagttacgtccgcatgagaagaactaccctactcatgatcttgaattagctgcagtagttcatgcgttgaagatttggcgtcattatcttttcggtactcgtacagaggtatataccgatcacaagagtttaaagtatatctttactcagccggatctgaacatgagacaacggagatggtcggaattaattaaggactatgacatgggaattcattatcacccgggaaaggctaatgttgtagcagatgctcttagcaggaaaggctattgcaatgctacggaaggacgacagttgccattggaattatgcaaggaatttgaaagattaaatttgggaattgtcagtagaggtttcgttgcagccttagaagcgaagcccactctaattgatcaagttagagaagcccaaattaatgatcctgatattcaagaaatcaagaagaatatgagaagaggaaaagctattggtttcttggaagatgagcacggaactgtatggttgggtgagagaatctgcgtccccgacaacaaagatttaaaagatgcaattctgaaagaagctcatgatactttatactctattcaccctggtagtactaagatgtaccaggatctcaaggaaagattttggtgggcaagtatgaagcgtgaaatcgcagaatacgtagcagtatgtgatatttgtcagcgagtcaaggcagaacatcagaaacccgccggtttgctgcagcctttgaagattcctgaatggaaatgggaagaaatcggtatggattttatcactggtttacccagaacgtcatcgggccatgactctatttgggtgattgtcgacagacttacaaaagtagctcatttcattccggtaaagacaacctattccggaagtcggttagcggaattgtatatggcaagaattgtgtgtttgcatggcgttcctaagaagatagtgtctgatcgaggcagtcaatttacttcaaatttttggaagaagcttcaggaagagatgggttctaagctgaactttagtactgcttatcatccgcagacagacggacagaccgaaagggtgaatcagattttggaagacatgttgagagcttgtgctttagacttcggtggaagttgggataagaatctaccttatgcagaattttcgtacaacaacagttatcaagctagtcttcagatggctccttacgaagcactgtatggtcggaagtgccgcactccgcttttgtgggatcaaacgggagaacgtcaggttttcgggacggatatccttagggaagcagaagaaaaggtaaagatcattcaagaaagattgcgagtggctcagtctcgacataagagttatgccgacaatcgccgcagagatctaagttttgaagaaggagattatgcgtatcttcgtgtcacgcctcttcgaggagttcatcgtttccacaccaaaggaaaattggcaccgcgttttgtgggaccttataagattgtcagtagaagaggagaggttgcttatcagttggagttacctcaatctttggcaggagtccataatgtgttccatgtgtcgcaactgaaaaagtgtttaagggtacctaccgaagaagctaatcttgaacagatcgaagtccaagaggatctgacctatgttgagaaaccaatccgtatcttggaaatagatgagagaagaaccaggaatcgagttatccgtttttgcaaagtccaatggagtaatcactcggaagaagagtcaacttgggaacgagaagatgaattgaagtcagctcatccgtatctgttcgccagttcttccgaatctcgaggacgagattctgtttaa

SEQ ID NO: 15176 - DNA, 10188 bp, Oryza sativa
  Clone ID: TFbOSC412948j.C1.o13.fg
atggtgaacactcgtagcaatgggaatggtcccaacaaccccaataacaacaacaatggagagaatcccactctggcccaagttcttgctcaacagacacagcttatgaacatgatgatgcagcaatttcagaatcagcaaaaccaagggaataatcatgcacctccacagaacaagttagcagaatttcttcgtgtgaggccgcctgttttctctagtaccactaatcctgttgaagctagtgattggctgcatgccatagagaagaagttggatttacttcagtgtactgatcaggagaaggtctcatttgcatcacatcagttgcatggccctgcctctgaatggtgggatcatttccgccttaacaggactactgctgaacctatcacttggcttgaattcaccgctgctttccggaagacgcatataccatcgggagtagtgtctctcaagaagaaggagttcaggtcgctttcccagggatctcgctctgttacggagtatctgcacgagttcaatcgtcttgctcgttatgctccggaagatgtgcgcaatgatgaagagcgccaggagaagtttttgggaggacttaatgatgagctttcttacccactcatggttggagattatcctgatttccagaaattagtggataaggctattcgtcaggaggacaagtacaatcgcatggagcagaagaaacgtcggattgctcaattcaagacacaacagggaaataatcagaagccgcgtcttactttaggaccccagcccatgccacagggaggttcttcgtctgttgttcgtccgcaacgtcagttcttcaacaacaatgctggcaacaacatccgtaatcaagctccacgtcctgttgcagctccagcacagcaacaacctgccaagagggagcaaggcaacaagcccgtggtgtgtttcaactgtggagatccaggacattatgctgacaagtgtccgaagccccgacgcgtgaaggttgtctctgctcaaagtaactctgctgtaccagcatcaaaggcccgtgtcaatcatgttgctgctgcagaagctcaagatgctccagatgtgattttgggtacgttccttgttaactcagttcctgcaacagtacttttcgattctggtgctacacattcattcttatctatgagttttgcgggaaatcatgggatggaagtagaagatcttagacgtcctttgatggttagtactccaagtaatcaagcactctctttgcaacgtagcccctctgtcagaatagaaattcaaggagtaccatttctggccaatcttatcttgttagaatccaaagaccttgatgtcatcctagggatggactggttagccagacataaaggtgtgatagactgtgccaacagaaaagtaactctcaacagctatgatggtcgagttgtaactgttcatgcattgtcatctgagtctttaaggtcaagactgaaccagataactttggaagagattcctatagtccgggagtatcctgatgtgttcccagatgatttacctggtatgccgcctaaaagggatatagagttcagaatagatttggtacctggaacaactccgatccataagagaccttatcgaatggcagccaatgagttggcagaagttaagaggcaagtagatgatttgctacagaaaggatacatcagaccgagttcatcaccatggggagctccggttatttttgtggaaaagaaagaccatacccagagaatgtgtgtggactatcgtgcactaaacgatgtgactatcaagaataagtatccactacccaggattgatgatttgtttgatcagcttaaaggtgccactgttttctccaagatagatcttcgatcagggtatcatcagttgagaatcaaagaggaagatatacctaagacagcttttaccactaggtatgggttgttcgaatgtactgttatgtcttttggacttaccaatgcccctgctttcttcatgaacttgatgaataaggtgtttatggaatacttagacaagttcgtggtggtctttattgatgatattcttatctactctcgaaccaaagaagagcatgaggaacttcttcgccttgcattggagaagctacgagaacatcaactgtttatagagaatttttccaagattgctaagcccatgacacgactgcttcagaaagatgtgaagtacaagtggtcggaagaatgtgaacagagttttcaagaattgaaaagtcgcttaatatcagctcctattttgattttgcctgatccaaagaagggttttcaagtgtattgtgatgcatccaaacttgggttaggttgtgttctgatgcaagatgggaaggtggttgcctatgcctctcgacagttacgtccgcatgagaagaactaccctactcatgatattgagttagctgcagtcgttcatgcattgaagatttggcgtcattatcttttcggtactcatacagaagtgtacaccgatcacaagagtttaaagtatatctttactcagccggatctgaacatgagacaacggagatggttggaattaattaaggattatgacatgggaattcattatcatccgggaaaggctaatgttgtagcagacgctcttagcagaaaaggccattgcaatgctacagaaggacgacagttgccattggaattatgtaaggaatttgaaagattaaatttgggaattgtcggtagaggtttcgttgcagccttagaagcgaagcccactctaattgatcaagttagagaagcccaaattaatgatcctgatattcaagagatcaagaagaatatgagaagaggaaaagctattggtttcttggaggatgagcaaggaactgtatggttgggtgagagaatctgtgtccccgacaacaaagatctaaaagatgcaattctgaaagaagctcatgatactttatactccattcaccctggtagtactaagatgtaccaggatcttaaggaaagattttggtgggcaagtatgaagcgtgaaatcgcagaatacgtagcagtatgtgatgtttgtcagcgagtcaaggcagaacatcagaaacccgccggtttgttgcaacctttgaagattcctgaatggaaatgggaagaaattggtatggattttattactggtttacccagaacgtcatcaggccatgactctatttgggtgatagtcgacagacttaccaaagtggctcatttcattccggtaaagacaacttattccggaagtcgcttagcggaattgtatatggcaaggattgtgtgtttgcatggcgtccctaagaagatagtgtctgatcgaggcagtcagtttacttcaaatttttggaagaaacttcaggaagagatgggttctaagctgaactttagtactgcttatcatccgcagacagacggacaaaccgaaagggtgaatcaaattttggaagacatgttgagagcttgtgctctagatttcagtggaagttgggataagaatctaccctatgcagaattttcatacaacaacagttatcaagctagtctacagatggctccgtacgaagcactgtatggtcgaaagtgccgcactccgcttttgtgggatcaaacgggagaacgtcaggttttcggaacggatatcctaagggaagcagaagaaaaggtaaagatcattcaagaaagattgcgagtggctcagtctcgacataagagttatgccgacaatcgccgtagagatttgagttttgaagaaggagactatgtgtatcttcgtgtcacgccttttcgaggagttcatcgttttcataccaaggaaaaattggcaccgcgttttgtgggaccttataagattgtcagtagaagaggagaggttgcttatcagttggagttacctcaatctttggcaggaatccataatgtgttccatgtgtcacaattgaaaaagtgtttaagggtacctaccgaagaagctaatattgagcagatagaagtccaagaggatttgacttatgttgagaaaccaatccgtatcctggaaacaactcctggtttggaatggtacattcctagtttggagatagaactgtgcagccggggtggttgttcagaatggttgggcctatacaacaggggttcacacacatgtaagcgtttggaattttggatagaaattccgggcgtgacaggcaagatctctctccttgactcggtgtcagaccagtcgggagagaaccggatttcagccccgtttggactcccaaacgcggctgaaagttacttcaagaccatctcaatcgagttggcttcaaaccactcgggtgagatcgcatcttctccaacatcaccagatcaagatgatggggcttacccaccgatcctgatgaagctccccgacgatttggcggccgtctccatcacgacagcgtctccatcccgtaggcctaggcggaagtcggcttcaacaccgacttcgcctagcttcagggaagtcggcgtcatcctccaaccactcggcacggtttcgacggatcagctggatggctactacagctctcccaccgtcgactcgcgccccaccgacatcgtggagtacgacgagtttagctctcgctacaacgacccggatctcgacgacttcgacggaagcctagatgacaactacacccctctctacttcggtgtcttcatggctgataacgagacggaggagcaatgccaagcccgggagaccgaagcacgtcgcgagactgaacgtcgccgactggaggaggagcatcaagcacaagaacaagaacggctacggcgtgagcagcaggagcgtgagcggaccgcgaaggaggctgaggatcgacggcagcgagctttggaagcagggcgccgagcgcgtgatctcatcggccaacaagatgttgaagggacaccggttttccgcacccctcagcagaatgcggttgccgcgatcaccctcctcgacaccctcctcaaggaaaacgagctcaatcaatctgatcacgtcgtcaacatcttaaaccagacgaagaccatgattgcggcttcggtcccagttaactccgaaagcgtccacacgccgactggcagccgagtcccccactcccgatctcatgactaccgtcatctaagcctcagcatcaccggcgcaggatccaatcgcaggagcaggggtcacgacgagcggtccgttcactcacctcccgaccatcatagggagcgccgagtggaacggcctcgctcaccacctcgtcgccgccccgtcgatcttcgcgacacaatcatacagcgccgagcagctcgaggccatcatcatgcgccggaccgccacgacgacgacctcgacggagtagcagccttcaccgacgacctgcgtcgagtggattggccagccggcttcaagccgactggaatagagaagtatgacggtaccactaacccagaatcgtggcttaccgtctacggtctcgcaatccgcgcagcaggaggagacagcaaggccatggcgaactatttaccagtggctttagcggattccgcccgatcttggctccatggattgccccgtggtacaattggatcttgggctgaattacgcgaccacttcatcgccaactttcaaggcaccttcgagcgtcccggcacacaatacgacctctacaacgttattcagaagtccggagaatcccttcgagattacatccgacgattttccgaacaacgtaacaagatctccgacatcaccgacgacgttatcatcgccgcattcaccaaagggattcgccacgaagaattggtcggcaagttcgggcgtaagcctcccaagacagtcaagcttatgttcgaaaaagccaacgagtacgccaaggccgaagacgccgtcaccgcatcaaagcagtcaggtcccagttggaagccaaacaagggtacgccggctaagggaggaggtggaagtaacaatcataaggaccgcaagcgtaagcctgaggaacttgttgcaaccgccactcactcttctcgacagcgttcgcgcgtcaacacgttcgacaagatcatgaactcccaatgcccgcaccatcctaactccaaccacgtggccaaagattgtttcgtctacaagcagtttgcggagcaatacaccaagactacacggaagaactccgacgaagaacaaagtacgtcgaggaagaaggacgacggtgacaccccggcaggatttcaagaccaccgcaaggagctcaaccatatcttcagcggccccctggcttatgagtctaaaaggaagcaaaagttgactgaacgggagatcaatgctgttcagcccgacacaccccagtatcttcgatggtcagaaattgcaatcaagtttgaccgctcggatcatcctgaccgagtggtccacccggggcggtaccccctggtactagacccagtggtccgtaatgtcaagcttcgcagaaccctcatcgacggcggcagtgcactcaatatcctcttcgccaagaccttggatgatatgcagattcctcgctccgagctaaaaccaagcaatgcgccttttcacggagtaattccaggattatccgcaactccactcggccagatcaccctcccggtcacttttggcactcgggaaaacttccgcacagagaatatcagctttgaagtcgccgatttcgagacaacataccatgccatactcggacgcccggcgttagccaagtttatggccgtcccgcactacacttacatgatgacgaagatgcctggtccccgaggagtcctatccctacggagcgacatcaagcaagccgtcacatgcgacaaggagagttgcgacatggcccaaacccgcgagatggcgtcagcccgagaggatatccgactggctgcagccacggcgagcgaaggagaagtgcccgctaccaagatttcaaaaagtggagaaagcgaagccaagactaaaaagattcccttagatccttctgattctactaaaactgctaacaataaagatatctttgcgtggaaaccatctgatatgcccggtattcctagagaggtgattgagcactccttatatgtcaaagaagatgccaagcctatcaaacaacgactccgccgattcgcacaagacagaaaagacgcgatcaaggaggaattaaccaagctgttagcagcaggcttcattaaagaagtccttcatcccgactggctagcaaacccggttctagttcggaagaaaacggggcaatggcgcatgtgtgttgattatactgacctcaacaaatcttgccctaaagatccttttgggttgcctcgcattgaccaggtagtcgactcgaccgccggctgtgagcttctcagttttttggactgctactcggggtatcatcagatccgactgaaggaatccgactgcttgaagacttcattcatcacgccctttggagcatactgctatgtcaccatgccgtttggactaaaaaacgcaggagcaacttatcaacgtatgatccagagatgcttctcaacgcagatcggtcgcaacgttgaagcctatgtggatgatgtagttgtcaagaccaagcaaaaggatgatttgatctcggatctagaagaaaccttcgcgagcatccgcgctttcaggatgaaattaaaccctgaaaagtgcaccttcggagtactgtcagggaagctgcttggttttatggtgtctcataggggcatccaagccaacccggagaaaattactgctatcctcaacatgaaaccgccaagtacccagaaagatgttcagaagctgactggatgcatggcggcgctcagccgatttgtttcaagacttggcgagcgggggatgcccttctttaagctactaaagaaaacagacgacttccagtggggacccgatgcacagaaggccttcgaagatttcaagaaactcctcaccgagccaccggtcttagcctcaccacacccgcaggagccgttgttgttgtatatagcagccgcctcccaggttgtgagcacagtcttggtcgttgagcgcgaggaagaaggccatgtccagaaagtccaacgatcgatttactttgtcagcgaagtcctagccgactccaaaacgaggtaccctcaggttcagaagctgttatatggtattctaattactaccaggaagctatctcactactttcaaagtcactcggtaacggtggtcacatcatttccactcggtgatatactgcacaaccacgaagcaaacgggcggattgctaagtgggctttggagttgatgtctttggacatatcattcaagccccgaatttcaattaagtcccaagcgttagctgattttgtcgccgaatggaccgagtgccaggaggatacccccgcggagaagatggagcactggaccatgcattttgacggatcaaaacgactttcgggcactggagcaggagtggttttgatttccccaactggagaaagattaagctatgtgctttggatacatttttcggcatcccacaacgtcgccgagtatgaggcgctccttcatggactgcggattgcaatttccctaggaataaagcgtctaatagttcgaggcgattcacagctggttgtcaaccaggttatgaaagagtggtcctgccttgacgacaatatgatggcatatcgacaagaggtacgcaaattggaagacaagttcgatggactcgagcttagtcatgttcttcgacacaacaatgaagccgccgacagacttgccaactttggatccaagcgcgaggtggcgccctctgatgttttcgtcgaacacctttatacgccgaccgtacctcacaaggatactacccaaattgcgggcactcatgacgtagctctggttgaagccgattggcgagagcccctcatacgatttttgacttctcaagaactcccacaagacaaagatgaagccgagcggatttcaaggcggagcaaactttacgttatgcatgaagctgagttgtacaagaaaagcccttcagggattctgcaacgctgcgtatctttagaggaagggaggcaattgctgaaagacatacattctgggatatgcggaaaccatgctgccgcacgcaccattgtcggcaaagcttaccggcagggttttttctggcccactgcagtgtccgacgccgacaaaattgtgcgcacgtgcgaaggttgccaatttttcgccagacaaattcatctaccagctcaagagttgcagaccatcccactgtcttggccgtttgcggtttgggggctcgacatggttggcccgtttaaaaaggcagtcggcggttacacgcacctttttgtggccattgacaaattctccaagtggattgaagctaagccggttgtcacaatcacagcagataacgctcgagacttcttcatcaacattgtgcatagatttggagtgcccaatcggatcatcactgacaatggcagacaattcaccggcggagtttttaaagacttttgtgaagactttggaatcaagatttgctatgcctcagtggcacatcccatgagcaatggacaggtggaacgagccaatggcatgatacttcaagggattaaagcgcgtgtttttgaccggctaaaaccctatgccggcaaatgggtgaaacagctgccatcagtactttggtctttgcgaactacacccagtcgggccacaggccagtcaccttttttccttgtctatggggcagaagcaatgttgccgagtgaagttgaattcgagtctttgcgctttcgaaatttccgtgaagaacgctacgaagaggaccgagtggatgacttgcaccgattggaagaagtccgcgaagcagctttgattcagtcggctcgatacttacaagggctgcgacgttatcataatcgcaatgttcgatcccgtgcctttctagtcggcgacctagttttgaggaaaattcaaactacacgagatcggcacaagttatctcctctatgggaagggccatttatcatctctgaagtcacccgaccaggttcctatcgactcaagcgcgaagacggtacactcgttgacaactcttggaacattgaacatcttcgtcgtttctacgcttaa

SEQ ID NO: 15177 - DNA, 5313 bp, Oryza sativa
  Clone ID: TFbOSC413683j.C1.o8.fg
atggtgcgctgcggtggattgtgttatgcaaggggtattgtcacagctcctttccgagctcctggtttggaatggtatattcctggtttggagatagatctgtacagccggatgccacactacaagcctgagtacttgtttggtgttgagggatttgtccaggagttgcgtacgatgtcctttgccataggatttgggactgcccctttttatgcccagattcctcatgatcgtcacgaagagaagtgccgagtcaaagtcaccttgaacagtaatagtgaagatatcccctcagtgatgttcgaagctggaggaagaaactacatccatgcatgtcaggaggtggcaaggatcgccataggagagcttcgcgatcgctacagtgatcagttggccgacactgagtatcgctaccatcctcgtcaaccacagggaagtgatcgtggtagttaccttgagactgaaggaattgagaatgatgctaccacaaggcatttggttgagatgctgtgggctatggatgaaacccgtgcggagactgtgttagcagctcaagatcgtgaagaccggaatcgtggtaagatttgcaagctagaagacaaggtggatcgtttggagaaggaattagccgcgttgaagggagaagcaccaccgcagaaggccagggttcgtcttaccgcaaggaagagagctctatttgtccctcgttaccaattggcgccaaaggtccgtgtggtggagaaagaagttaccccagccctagcggatcctccggtcgtcaattggtgggatgtaagtgcatgcgtttgtttgcttttgagtgttaggaagttgatggtgctcactcgcagcaacgggaatggccccaacaacaacaacaataacaataacaacaacaatggagagaatcccacacttgcccaagtcctggctcaacaggcacagcttatgaacatgatgatgcagcaactccagaaccagcagaaccagggaaataaccatgcacctccccagaacaagttagcagaatttcttcgtgtgaggccgcccattttctccagtaccactaatcctgttgaagctggtgattggctgcatgccatagagaagaagttggatttgctccagtgcactgatcaggagaaggtctcatttgcatcacaccagttgcatggccctgcctctgaatggtgggatcacttccgcctgaatcgaactactgctgaacctatcacttggcttgaattcaccgctgctttccggaagacgcatataccatcgggagtggtgtccctcaagaagaaggaattcaggtcgctcaaccagggatctcgctctgttaccgagtatctgcacgagttcaatcgtctggctcgttatgctctggaagatgtgcgcactgatgaagagcgtcaggagaggttcttggaaggacttaatgatgagctttcttatccactcatgactggggattatcctgatttccagaagttagtggataaggctattcgccaggaggacaagtacaaccgcatggagcaaaagaaacgccggattgctcaattcaagacacaacaggggaataatcagaggctgcgtcttactttaggaccccagtccatgccacagggaggttcttcgtctgttgttcgtccgcagcgtcagttcttcaacaaccatgccggcaacaacatccgtaatcaagctccacgccctgttgcagcttcgacacagcaacaacctgccaagagggagcaaggcagcaagcccgtggtgtgtttcaactgtggagacccaggacattacgctgacaagtgtccgaagccccgacgcgtgaagattgtccctgtccagagcaactctaccgcaccagcatcaaaggcccgtgtcaatcgcgttgctgttgcagaagctcaaggtgctccagatgtgattttgggtacgttccttgttaacttagttcctgcaacagtgcttttcgattctggtgctacacattcattcttatctatgagttttgcgggaaatcatgggatggaagtagaagatcttagacgtcctttgatggttagtaccccatgtaatcaagcactctctttgcaacgtagcccctccgtcagaatagaaattcaaggagtaccatttctggccaatcttatcttgttagaatccaaagaccttgatgtcatcctagggatggactggttagccagatataaaggtgtgatagactgtgctaacagaaaagtaactctcaccagcaatgagggtcaagttgtaactgtttatgcattgtcttctgagtctttaaggtcaagactaaaccaaataactttggaagagattcctatagtccgagagtatcctgatgtgttcccagatgatttacctggaatgcctcctaaaaggggtatagagttcagaatagatttggtaccaggaacaactccgatccataagagaccttatagaatggcagccaatgagttggcagaagttaagaggcaagtagatgatttgcttcagaaaggatacatcagaccgagttcatctccatggggagctccggttatttttgtggaaaagaaagatcatacccagaggatgtgtgtggactatcgtgcactaaatgatgtgactatcaagaataagtacccgctacccagaattgatgatttgtttgatcagcttaaaggtgccaccgttttctccaagatagatcttcgatcagggtatcaccagttgagaatcaaagaggaagatatacctaagacagcttttaccactaggtatgggttgttcgaatgtactgttatgtcttttggacttaccaatgcccccgctttcttcatgaacttgatgaataaggtgtttatggaatacctagacaagttcgtggtggtctttattgatgacattcttatctactcccgaaccaaagaagagcatgaagaacatcttcgccttgcactagagaagctacgagaacatcaactgtatgctaagttcagtaagtgtgaattttggttgtcggaagtgaagttccttggtcacgtcatctcagcaggaggagttgccgtcgatcctagtaatgtggaatccgtaaccaactggaaacaaccaaagacagtttcagagattcgcagtttcctaggcctcgcaggatattatcggaggtttatagagaatttttccaagattgctaagcccatgacacgattacttcagaaagatgtaaagtacaagtggtcagaagaatgtgagcagagttttcaagagttgaaggatcgcttaatatcagctcctattttgattttacctgatccaaagaagggattccaagtgtattgcgatgcatccaaatttgggttaggttgtgttctgatgcaagatgggaaggtggttgcctatgcatctcgtcagttacgtccgcatgagaagaactaccctactcatgatcttgagttagatgcagtggttcatgcgttgaagatttggcgtcattatcttttcggtactcgtacagaggtgtataccgatcacaagagtttaaaatatatctttactcagccggatctgaacatgagacaacggagatggttggaattaattaaggattatgacatgggaattcattatcacccgggaaaggctaatgttgtagcagacactcttagcaggaaaggctattgcaatgctacggaaggacgacagttgccgttggagttatgtaaggaatttgaacgattgaatttgggaattgtcagtagaggtttcgttgccgccttagaagcgaagcccactctaattgatcaagttagagaagcccaaattaatgatcctgatattcaagaaatcaagaagaatatgagaagaggaaaagctatcggtttcttggaggatgagcaaggaactgtatggttgggcgagagaatctgcgtccccgacaacaaagatttaaaagatgcaattctgaaggaagcccatgataccttatactccattcaccctggtagtactaagatgtaccaggatctcacggaaggattttcgtgggcaagtatgaagcgtgaaatcgcagaatacgtagcagtatgtgatgtttgtcagcgagtcaaggcagaacatcagaaacccgccggtttgttgcagcctttgaagattcctgaatggaaatgggaggaaatcggaatggattttatcactggtttacccagaacatcatcgggccatgactctatttgggtgatagtcgacagacttaccaaagtggctcatttcatcccagtaaagacaacttattccggaagtcggttggcggaattgtatatggcaaggattgtgtgtttgcatggcgtccctaagaaaatagtgtctgatcgaggcagtcagtttacttcaaatttttggaagaagcttcaggaagagatgggttctaagctgaactttagtactgcttatcatccgcagacagatggacaaaccgaaagggtaaatcaggttttggaagacatgttgagagcttgtgctttagacttcggtggaagttgggataagaatctaccttatgcagaattttcgtacaacaacagttatcaagctagtcttcagatggctccgtacgaagcactgtatggtcggaagtgccgcactccgcttttgtgggatcaaacgggagaacgtcaggttttcgggacggatatcctgagggaagcagaagaaaaggtgaaaatcattcaagaaaggttgcgtgtggctcagtctcgtcataagagttatgccgacaatcgtcgtagagatctaagttttggcaaaggagattatgtgtatcttcgtgtcacgccttttcgaggagttcatcgttttcacaccaaaggaaaattggcaccgcgttttgtgggaccttataagattgtcagtagaagaggagaggttgcttatcagttggagttacctcaatctttggcaggagtccataatgtgttccatgtttcgcaattgaaagtgtttaaggccgtcgccgtcgctcggggaggtcgccatcgtggtcgccaagtcgtcgccgtccttgtccgccccttcgtcgtcgccgaagaccgccggagcaccgtcgccgccgtcgacccgatcttctccgccgcttcgacctcgtcgccgtcgccgtccgttgatcttccgccgccgttttggtcaccgattccgatgtttccggagagtccgttttcgcaggagaagaatttgaagagttccaaggccagcaaggcaagtcacacagatcccaaacaaccctttgagcatgttgatcccgattaa

SEQ ID NO: 15178 - DNA, 3027 bp, Oryza sativa
  Clone ID: TFbOSC414224j.C1.o3.gm
atgccgcgttacaagcctgagtacctgtttggtgttgagggttttgtccaggagttgcgtacgatgtcctttgtcattggatttgggactgcccctttttatgcccagattcctcatgatcgtcatgaagagaagtgccgagtcaaagtcaccttcaacagtaatagtgaagatatcccctcagtgatgtttgaagctggaggaagaaactacatccatgtatgtcaggaggtggcaaggatcgccataggagagctccgtgatcgctacagtgatcaattggccgacactgagtatcgctaccatcctcgccaaccccagggaagtgaccgtggcagttaccttgagactgaaggaattgagaatgatgctaccacgaagcatttggttgagatgttgtgggctatggatgaaagtcgtgcggagactgtgttagccgctcaagatcgtgaagaccggaatcgtggtaagatttgcaagttagaagacaaggtggatcgtttggagaaggaattagccgcattgaagggagaagcaccgccgcagaaggccaggattcgtcttaccgcaaggaagagagctctatttgtccctcgctatcaactggcgccaaaggttcgtgtggtggagaaagaagttgccccagctcaagcggatcctccggtcatcatcataagtagtgatgaagaagaagaatccaagcgcatcaattccaagattgagtgggtagcaactcaagatgataaagacaagccttcaatcgacctccgatgcttggaagaactagatactactaatcctgttgaagctagtgattggctgcatgccatagagaagaagttggatttacttcagtgtactgatcaggagaaggtctcatttgcatcacatcagttgcatggccctgcctctgaatggtgggatcacttccgccttaacaggactactgctgaacctatcacttggcttgaattcaccgctgctttccggaagacgcatataccatcaggagtagtgtctctcaagaagaaggagttcaggtcgcttacccagggatctcgctctgttacggagtatctgcacgagttcaatcgtcttgctcgttatgctccggaagatgtgcgcaatgatgaagagcgccaggagaagtttttgggaggacttaatgatgagctttcttacccactcatggttggagattatcctgatttccagaaattagtggataaggctattcgtcaggaggacaagtacaatcgcatggagcagaagaaacgtcggattgctcaattcaagacacaacagggaaataatcagaaaccgcgtcttactttaggaccccagcccatgccacagggaggttcttcgtctgttgttcgtccgcagtgtcagttcttcaacaacaatgctggcaacaacatccgtaatcaagctccacgtcctgttgcagctctagcacagcaacaacctgccaagagggagcaaggcagcaagcccgtggtgtgtttcaactgtggagatccaggacattatgctgacaagtgtccgaagccccgacgcgtgaaggttgtccctgcccagaataactctgctgtaccagcatctaaggctcgtgtaaatcatgtcgctgctgcagaagctcaagatgctccagatgtgattttggtccgggagtatcctgatgtgttcccagatgatttacctgccttagaagcgaagcccactctaattgatcaagttagagaagcccaaattaatgatcctgatattcaagagatcaagaagaatatgagaagaggaaaagctattggtttcttggaggatgagcaaggaactgtatggttgggtgagagaatctgtgtccccgacaacaaagatctaaaagatgcacttctgaaagaagctcatgatactttatactccattcaccctggtagtactaagatgtaccaagatctcaaggaaagattttggtgggcaaccgtcgccgtcgctcgggaagaccaccgtcgtgctcgccaagtcgtcgccgtcctcgtccgccccttcgccgtcgccggagatcgccggagcttcgtcgccgtcgacaacccgaaggtttccgccgtttcctcctcgtcgtcgtcgtcgtccgttgtttttccgccgccgttttggtcaccggtgtgttcgccgcgtcgtcctctacgtgctggtgccctccgtttgcgtcctggtgccgccgttcgccggcaagcgtgcgccgcccgagccgtccgctccgccgagccgccgccgctgtcggtgacgtcaccgttgacgtcatcggggtcgtccgccggcatccccgcgccgacgccgccgccgtatctcgccgtcgtctcgcgctcgtcgtcgtcgccgccgtctccgcctcctccgccgccgccgcatctctggggtgaacaagggcaggcgatgatggaaagaaacaaagaaaatgccgccaagaagaaataccatcactacttggggtcaggcggctatagcgtcgcgatgccgaagtgggaggagatggaggctagcttgcttgagaggggtatcgaaccggccaccgctaattggccggaacgatcgaagttctggtactatgctcaaggtggaacgctcaacccagctgatggctcactggtcttcggcgatcagatacgagaggctgcgcatcgactaacagacgcaatggaagcctcttctcagggcacgttccgaccggacagagagagggtcgagctgtcactcgccctgcagactccagagcatcaaggacgaacacgagggaaaggggtgattccttggaagattgggttcaaggaggacatccacacgtacaggagtcggatgaggagcaagagagataccttggcgaagattgcagatctagagttcagggtatcgagctacgagcgcatcatacaagtggaggtggcaaggaaggttgatgaacgcatggccgcacatcagtcccatgatccccagccgaccattcctcctgcaatggtgagcccgtaa

SEQ ID NO: 15179 - DNA, 4959 bp, Oryza sativa
  Clone ID: TFbOSC415905j.C1.o6.fg
atgtctttcgtgattagtcccacacttctcaccatagtaaatgatgctatatttggtaataatttgattagctcctggtttggaatgatgccgcgctacaagcctgagtacctgtttggtgttgagggttttgtccaggagttgcgtacaatgtcctttgccataggatttgggactgcccctttttatgcccagattcctcatgatcgtcacgaagagaagtgccgagtcaaagtcactttgaacagtaatagtgaagatatcccctcagtgatgttcgaagctggaggaagaaactacatccatgcatgtcaggaggtggcaaggatcgccataggagagctccgtgatcgctacagtgatcagttggccgacacggagtatcgctatcatcctcgccaaccccagggaagtgaccgtggcagttatcttgagactgaaggaattgagaatgatgctaccacaaggcatttggttgagatgctgtgggctatggatgaaagtcgtgcagagactgtgttagcggctcaagatcgtgaagaccggaatcgtggtaagatttgcaagctagaagacaaggtggatcgtttggagaaggagctagctacgttgaagggagaagcaccaccgcagaaggctaggattcgtctcaccgcaaggaagagagctctatttgtccctcgctatcaattggcgccaaagatggtgaacactcgcagcaatgggaatggccccaacaaccccaataacaacaacaatggagagaatcccacacttgcccaagttcttgctcaacagacacagctaatgaacatgatgatgcagcaactccagaaccagcaaaaccaaggaaataaccatgcacctccccagaacaagttagcagaatttcttcgtgtaaggccgcctactttctctagcaccactaatcctgttgaagctggtgattggttgcatgccatagagaagaagttggatttgcttcagtgcactgatcaggagaaggtctcatttgcatcacctcagttgcatggccctgcctctgaatggtgggatcatttccgcctgaataggactactgcggaacctatcacttggcttgaattcaccgctgctttccggaagacgcatataccatcgggagtggtgtctctcaagaagaaggaattcaggtcgctcacccagggatctcgctctgttacggagtatttgcacgagttcaatcgtctggctcgttatgctccggaagatgtgcgcaatgatgaagagcgccaggagaagttcttggaaggacttaatgatgagctttcttacccactcatgactggagattatcatgatttccagaagttagtggataaggctattcgtcaggaagacaagtacaatcgcatggagcagaagaaacgccggattgctcaattcaagacacaacaggggaataatcagaagccgcgtcttactttaggaccccagtccatgccacagggaggttcttcgtctgttgttcgtccgcagcgtcagttcttcaacaacaatgctggcaacaacatccgcaatcaagctccacgtcctgttgcagctccagcacagcaacaacctgccaagagggagcaaggcagcaagcccgtggtgtgtttcaactgtggagacccaggacattatgctgacaagtgtccgaagccccgacgcgtgaaggttgtccctgcccagagcaactctaccgcacctgcgccaaaggcccgtgtcaatcatgttgctgctgcagaagctcaagatgctccagatgtgattttggaagatcttagacgtcctttgatggttagtaccccaagtaatcaagcactctctttgcaacgtagcccctctgtcagaatagaaattaaaggagtaccatttctggccaatcttatcttgttagaatccaaagaccttgatgtcatcctagggatggactggttagccagacataaaggtgtgatagactgtgctaacagaaaagtaactctcacccgcaatgatggtcgagttgtgactgttcatgcattgtcttctgagtttttaaggtcaagactgaaccaaataattctggaaaagattcctatagtccgggagtatcccgatgtgttccccgatgatttgcctagtatgccgcctaaaagggatatagagttcagaatagatttggtaccaggaacaactccgatccataagagaccttatagaatggcagccaatgagttggcagaagtcaagaggcaagtagataatttgcttcagaaaggatacatcagaccaagttcatctccatggggagctccggttatttttgtggaaaagaaagatcatacccagaggatgtgtgtggactatcgtgccctaaacgatgtgactatcaagaataagtatccgctacccagaattgatgatttgtttgatcagcttaaaggtgctactgttttctccaagatagatcttcgatcagggtatcaccagttgagaatcaaagaggaagatatacctaagacagcttttaccactaggtatggattgttcgaatgtactgttatgtcttttggacttaccaatgcccccgctttcttcatgaacttgatgaataaggtgtttatggaatacctagacaagttcgtggtggtctttattgatgatattcttatctactctcgaaccaaagaagagcatgaagaacatcttcgccttgcactagagaagctacgagaacatcaactgtatgctaagtttagcaagtgtgaattttggttgtctgaagtgaagttccttggtcacgtcatctcagctggaggagttgccgttgatcctagtaatgtggaatccgtaaccaactggaaacaaccaaagacagtttcagagattcgcagtttcttaggcctcgcaggatattaccggaggtttatagagaatttttccaagattgctaagcccatgacacgactgcttcagaaagatgtgaagtacaagtggtcggaagaatgtgagcagagttttcaagagttgaagaatcgcttgatatcagctcctattttgattttacctgatccaaagaagggtttccaagtgtattgcgatgcatctaaacttgggttaggttgtgttctgatgcaagatgggaaggtggttgcctatgcatctcgtcagttacgtccgcatgaaaagaactaccctactcatgatcttgagttagctgcagtagttcatgcgttgaaaatttggcgtcattatcttttcggtactcgtacagaggtatataccgatcacaagagtttaaagtatatctttactcagccggatctgaacatgagacaaaggagatggttgaaattaattaaggattatgacatgggaattcattatcacccgggaaaggctaatgttgtagcagacgctcttagcaggaaaggctattgcaatgctacggaaggacgacagttgccattggaattatgcaaggaatttgaaagattaaatttgggaattgtcagtagaggttttgttgcagccttagaagcgaagcccactctaattgatcaagttagagaagcccaaattaatgatcctgatattcaagagatcaagaagaatatgagaagaggaaaagctatcggtttcttggaggatgagcacggaactgtatggttgggtgagagaatctgcgtccccgacaacaaagatttaaaagatgcaattctgaaagaagctcacaatactttatactctattcaccctggtagtactaagatgtaccaggatctcaaggaaagattttggtgggcaagtatgaagcgtgaaatcgcagaatacgtagcacctttgaagattcctgaatggaagtgggaagaaatcggtatggattttatcactggtttacccagaacgtcatcaggccatgactctatttgggtaatagtcgacagacttaccaaagtggcatatttcattccggtaaagacaacttattccggaagtcgcttagcggaattgtatatggcaaggattgtgtgtttgcatggcgtccctaagaagatagtgtctgatcgaggcagtcagtttacttcaaatttttggaagaaacttcaggaagagatgggttctaagctgaactttagtactgcttatcatccgcaaacagacggacaaaccgaaagggtgaatcaaattttggaagacatgttgagagcttgtgctttagacttcggtggaagttgggataagaatctaccttatgcagaattttcgtacaacaacagttatcaagctagtcttcagatggctccttacgaagcactgtatggtcggaagtgccgcactccgcttttgtgggatcaaacgggagaacgtcaggttttcgggacggatatcctaagggaagcagaagaaaaggtaaaggtcattcaagaaagattgcgagtggctcagtctcgacataagagttatgccgataatcgccgcagagatttgagttttgaagaaggagattatgtgtatcttcgtgtcacgcctcttcgaggagttcgtcgttttcacaccaaaggaaaattggcaccgcgttttgtgggaccttataagatcgtcagtagaagaggagaggttgcttatcagttggagttacctcaatctttggcaggagtccataatgtgttccatgtttcgcaattgaaaaagtgtttaagggtacctaccgaagaagctaatcttgaacagatagaagtccaagaagatctgacctatgttgagagaccaatccgtatcctggaaatagatgagagaagaaccaggaatcgggttatccgtttttgcaaagtccaatggagtaatcactcggaagaagagtcaacttgggaacgagaagatgaattgaagtcagctcatccgcatctattcgccagttcttccgaatctcgtggacgagattccgtttaa

SEQ ID NO: 15180 - DNA, 5641 bp, Oryza sativa
  Clone ID: TFbOSC416072j.C1.o1.fg
atgggttctaagctgaactttcgtactgcttatcatccgcagacagacggacaaaccgaaagggtgaatcaaattttggaagacatgttgagagcttgtgctctagatttcggtggaagttgggataagaatctaccttatgcagaattttcatacaacaacagttatcaagctagtcttcagatggctccttacgaagcactatatggtcggaagtgccgcactccgcttttgtgggatcaaacgggagaacgtcaggttttcggaatggatatcctaagggaagcagaagaaaaggtaaagatcattcaagaaagattgcgtgtggctcagtctcgtcataagagttatgccgacaatcgccgcagagatttgagttttgaagagggagattatgtgtatcttcgtgtcacgcctcttcgaggagttcatcgttttcataccatgggaaaattggcaccgcgttttgtgggaccttataagattgtcagtagaagaggagaggttgcttatcagttggagttacctcaatctttggcaggagtacataatgtgttccatgtgtcgcaattgaaaaagtgtttaagggtacctaccgaagaagctaatattgagcagatagaggtccaagaggatttgacttatattgagaaaccaatccgtatcctggaaacaactcctggtttggaatggtacattcctggtttggagatagaactgtgcagccggggtggttgttcagaatggttgggcctatacaacaggatgccgcgttacaagcctgagtacctgtttggtgttgagggttttgtccaggagttgcgcacgatgtcctttgtcattggatttggaactgcccctttttatgcccagattcgtcatgatcatcatgaagagaagtgccgagtcaaagtcaccttaaatagcaatagtgaagaggtcccctcagtgatgtttgaagctggaggaagaaactacatccatgcatgtcaggaggtggcaaggatcgccataggagagctccgtgatcgctacagtgatcaattggccgacactgagtatcgttaccatcctcgtcaacctcagggaagtgaccgtggcagttaccttgagactgaaggaattgagaatgatgttaccacgaaacatttggttgagatgttgtgggctatggatgaaagtcgtgcggagactgtgttagcagctcaagatcgtgaagatcggaatcgtggtaagatttgcaagctagaatacaaggtggatcgtttggagaaggaattagccgcattgaagggagaagcaccgccgcagaaggccaggattcgtctcaccgcaaggaagagagctttatttgtccctcgctatcaactggcgccaaagatggtgaacactcgtagcaatgggaatggtcccaacaaccccaataacaataacaatggagagaatcccactcttgctcaagttcttgctcaacagactcagttaatgaacatgatgatgcagcaacttcagaatcagcaaaaccaagggaataatcatgcacctccacagaacaagttagcagaatttcttcgtgtgaggccgcctgttttctctagtaccactaatcctgttgaagctagtgattggctgcatgccatagagaagaagttggatttacttcagtgtactgatcaggagaaggtctcatttgcatcacatcagttgcatggccctgcctctgaatggtgggatcacttccgccttaacaggactactgctgaacctatcacttggcttgaattcaccgctgctttccggaagacgcatataccgtcgggagtagtgtctctcaagaaaaaggagttcaggtcgctttcccagggatctcgctctgttacggagtatctgcacgagttcaatcgtcttgctcgttatgctccggaagatgtgcgcaatgatgaagagcgccaggagaagtttttgggaggacttaatgatgagctttcttacccactcatggttggagattatcctgatttccagaaattagtggataaggctattcgtcaggaggacaagtacaatcgcatggagcagaagaaacgtcggattgctcaattcaagacacaacagggaaataatcagaagccgcgtcttactttaggaccccagcccatgccacagggaggttcttcgtctgttgttcgtccgcaacgtcagttcttcaacaacaatgctggcaacaacatccgtaatcaagctccacgtcttgttgcagctccagtacagcaacaacctgccaagagggagcaaggcaacaagcccgtggtgtgtttcaactgtggagatccaggacattatgctgacaagtgtccgaagccccgacgcgtgaaggttgtccctgcccagaataactctgctgtaccagcatccaaggctcgtgtaaatcatgtcgctgctgcagaagctcaagatgctccagatgtgattttgggtatgttccttgttaactcagttcctgcaacagtacttttcgattctggtgctacacattcattcttatctatgagttttgcgggaaatcatgggatggaagtagaagatcttagacgtcctttgatggttagtaccccaagtaatcaagcactctctttgcaacgtagcccctctgtcagaatagaaattcaaggagtaccatttctggccaatcttatcttgttagaatccaaagaccttgatgtcatcctagggatggactggttagccagacataaaggtgtgatagactgtgccaacagaaaagtaactctcaacagctatgatggtcgagttgtaactgttcatgcattgtcatctgagtctttaaggtcaagactgaaccagataactttggaagagattcctatagtccgggagtatcctgatgtgttcccagatgatttacctggtatgccgcctaaaagggatatagagttcagaatagatttggtacctggaacaactccgatccataagagaccttatcgaatggcagccaatgagttggcagaagttaagaggcaagtagatgatttgctacagaaaggatacattagaccgagttcatcaccatggggagctccggttatttttgtggaaaagaaagaccatactcagagaatgtgtgtggactatcgtgcattaaatgatgtgactatcaagaataagtatccgctgcccagaattgatgatttgtttgatcagcttaaaggtgccactgttttctccaagatagatcttcgaccagggtatcatcagttgagaatcaaagaggaagatatacctaagacagcttttaccactaggtatggattgttcgaatgtactgttatgtcttttggacttaccaatgcccctgctttcttcatgaacttgatgaataaggtgtttatggaatacttagacaagttcgtggtggtctttattgatgatattcttatctactctcgaaccaaagaagagcatgaggaacatcttcgccttgcattggagaagctacgagaacatcaactgtatgctaagtttagcaagtgtgaattttggttgtccgaagtgaaattccttggtcacgtcatctcagccggaggagttgccgttgatcctagtaacgtggaatccgtaaccaattggaagcaaccaaagacagtttcagagattcgcagtttcctaggccttgcaggatattatcggaggtttatagagaatttttccaagattgctaagcccatgacacgactgcttcagaaagatgtgaagtacaagtggtcggaagaatgtgagcggagttttcaagagttgaaaagtcgcttaatatcagctccaattttgattttgcctgatccaaagaagggttttcaagtgtattgtgatgcatccaaacttgggttaggttgtgttctgatgcaagatgggaaggtggttgcctatgcctctcgacagttacgtccgcatgagaagaactaccctactcatgatattgagttagctgcagtcgttcatgcattgaagatttggcgtcattatcttttcggtactcgtacagaagtgtacaccgatcacaagagtttaaagtatatctttactcagccggatctgaacatgagacaacggagatggttggaattaattaaggattatgacatgggaattcattatcatccgggaaaggctaatgttgtagcagacgctcttagcagaaaaggctattgcaatgctacagaaggacgacagttgccattggaattatgcaaggaatttgaaagattaaatttgggaattgtcgatagaggtttcgttgcagctttagaagcgaagcccactctaattgatcaagttagagaagcccaaattaatgatcctgatattcaagagatcaagaagaatatgaaaagaggaaaagctattggtttcttggaggatgagcacggaactgtatggttgggtgagagaatctgtgtccccgacaacaaagatttaaaggatgcaattctgaaagaagctcatgatactttatactccattcaccctggtagtactaagatgtaccaggatcttaaggaaagattttggtgggcaagtatgaagcgtgaaatcgcagaatacgtagcagtatgtgatgtttgccagcgagtcaaggcagaacatcagaaacccgccggtttgttgcaacctttgaagattcctgaatggaaatgggaagaaattggtatggattttattactggtttacccagaacgtcatcaggccatgactctatttgggtaatagttgacagacttaccaaagtggctcatttcattccggtaaagacaacttattccggaagtcgcttagcggaattgtatatggcaaggattgtgtgtttgcatggcgtccctaagaagatagtgtctgatcgaggcagtcagtttacttcaaatttttggaagaaacttcaggaagagatgggttctaagctgaactttcgtactgcttatcatccgcagacagacggacaaaccgaaagggtgaatcaaattttggaagacatgttgagagcttgtgctctagatttcggtggaagttgggataagaatctaccttatgcagaattttcatacaacaacagttatcaagctagtcttcagatggctccttacgaagcactatatggtcggaagtgccgcactccgcttttgtgggatcaaacgggagaacgtcaggttttcggaatggatatcctaagggaagcagaagaaaaggtaaagatcattcaagaaagattgcgtgtggctcagtctcgtcataagagttatgccgacaatcgccgcagagatttgagttttgaagagggagattatgtgtatcttcgtgtcacgcctcttcgaggagttcatcgttttcataccatgggaaaattggcaccgcgttttgtgggaccttataagattgtcagtagaagaggagagtttgcttatcagttggagttacctcaatctttggcaggagtacataatgtgttccatgtgtcgcaattgaaaaagtgtttaagggtacctaccgaagaagctaatattgagcagatagaggtccaagaggatttgacttatattgagaaaccaatccgtatcctggaaacaa

SEQ ID NO: 15181 - DNA, 4968 bp, Oryza sativa
  Clone ID: TFbOSC416688j.C1.o1.np
cgaaagtcggcccaaaacctctcttctctctcctcggcccaaattccgtcgtttccggagagtccgttttcgcagaagaagagtttgaagagttccaaggccagcaaggcaactcctggtttggaatggtacattcctggtttggagatagaactgtgcagctgggatggttgttcagaatggttgggcctatacaacaggatgccgcgttacaagcctgagtacctgtttggggttgagggttttgtccaggagttgcgtacgatgtcctttgtcattggatttgggactgcccctttttatgcccagattcctcatgatcgtcatgaagagaagtgccgagtcaaagtcaccttgaacagtaatagtgaagatatcccctcagtgatgtttgaagctggaggaagaaactacatccatgcatgtcaggaggtggcaaggatcgccataggagagctccgtgatcgctacagtgatcaattggccgacactgagtatcgctaccatcctcgccaaccacagggaagtgaccgtggcagttaccttgagactgaaggaattgagaatgatgctaccacgaagcatttggttgagttattgtgggctatggatgaaagtcgtgcggagactgtgttagccgctcaagatcgtgaagaccggaatcgtggtaagatttgcaagttagaagacaaggtggatcgtttggagaaggaattagccgcattgaagggagaagcaccgccgcagaaggccaggattcgtcttaccgcaaggaagagagctctatttgtccctcgctatcaactggcgccaaagatggtgaacactcgcagcaatgggaatggtcccaacaaccccaataacaacaacaatggagagaatcccactcttgctcaagttcttgctcaacagacacagcttatgaacatgatgatgcagcaatttcagaatcagcaaaaccaaggaaataatcatgcacctccacagaacaatttagcagaatttcttcgtgtgaggccgcctgttttctctagtaccactaatcctgttgaagctagtgattggctgcatgccatagagaagaagttggatttgcttcagtgtactgatcaggagaaggtctcatttgcatcacatcagttgcatggccctgcctctgaatggtgggatcacttccgccttaacaggactactgctgaacctgtcacttggcttgaattcaccgctgctttccggaagacgcatataccatcaggagtagtgtctctcaagaagaaggagttcaggtcgcttacccagggatctcgctctgttacggagtatctgcacgagttcaattgtcttgctcgttatgctccggaagatgtgcgcaatgatgaagagcgccaggagaagtttttgggaggacttaatgatgagctttcttacccactcatggttggagattatcctgatttccagaaattagtggataaggctattcgtcaggaggacaagtacaatcgcatggagcagaagaaacgtcggattgctcaattcaagacacaacagggaaataatcagaagccgcgtcttactttaggaccccagcccatgccacagggaggttcttcgtctattgttcgtccgcagcgtcagttcttcaacaacaatgctggcaacaacatccgtaatcaagctccacgtcctgttgcagctccagcacagcaacaacctgccaagagggagcaaggcagcaagcccgtggtgtgtttcaactgtggagatccaggacattatgctgacaagtgtccgaagccccgacgcgtgaaggttgtccctgcccagaataactctgctgtaccagcatccaaggctcgtgtaaatcatgtcgctgctgcagaagctcaagatgctccagatgtgattttgggtacgttccttgttaactcagttcctgcaacagtacttttcgattctggtgctacacattcattcctatctatgagttttgcgggaaatcatgggatggaagtagaagatcttagacgtcctttgatggttagtaccccaagtaatcaagcactctctttgcaacgtagcccctctgtcagaatagaaattcaaggagtaccatttctggccaatcttatcttgttagaatccaaagaccttgatgtcatcctagggatggactagttagccagacataaaggtgtgatagactgtgccaacaaaaaagtaactctcaccagctatgatggtcgagttgtaactgttcatgcattgtcatctgagtctttaaggtcaagactgaaccagataactttggaagagattcctatagtccgggagtatcctgatgtgttcccagatgatttacctggtatgccgcctaaaagggatatagagttcagaatagatttggtacctggaacaactccgatccataagagaccttatcgaatggcagccaatgagttggcagaagttaagaggcaagtagatgatttgctacagaaaggatacatcagaccgagttcatcaccatggggagctccggttatttttgtggaaaagaaagaccatactcagagaatgtgtgtggactatcgtgcactaaacgatgtgactatcaagaataagtatccactacccaggattgatgatttgtttgatcagcttaaaggtgccactgttttctccaagatagatcttcgatcagggtatcatcagttgagaatcaaagaggaagatatacctaagacagcttttaccactaggtatgggttgttcgaatgtactgttatgtcttttggacttaccaatgcccctgctttcttcatgaacttgatgaataaggtgtttatggaatacctagacaagttcgtggtggtctttattgatgatattcttatctactctcgaaccaaagaagagcatgaggaacatcttcgccttgcattggagaagctacgagaacatcaactgtatgctaagtttagcaagtgtgaattttggttgtctgaagtgaaattccttggtcatgtcatctcaagcggaggagttgccgtcgatcctagtaacgtggaatccgtaaccaattggaagcaaccaaagacagtttcagagattcgcagtttcctaggcctcgcaggatattatcggaggtttatagagaatttttccaagattgctaagcccatgacacgactgcttcagaaagatgtgaagtacaagtggtcggaagaatgtgagcggagttttcaagagttgaaaagtcgcttaatatcagctcctattttgattttgcctgatccaaagaagggttttcaagtgtattgcgatgcgtccaaacttgggttaggttgtgttctgatgcaagatgggaaggtggttgcctatgcctctcgacagttacgtccgcatgagaagaactaccctactcatgatattgagttagctgcagtcgttcatgcattgaagatttggcgtcattatcttttcggtactcgtacagaagtgtacaccgatcacaagagtttaaaggatatctttactcagccagatctgaacatgagacaacggagatggttggaattaattaaggattatgacatgagaattcattatcatccgggaaaggctaatgttgtagcagacgctcttagcagaaaaggctattgcaatgctacagaaggacgacagttgccattggaattatgcaaggaatttgaaagattaaatttgggaattgtcagtagaggtttcgttgcagccttagaagcgaagcccactctaattgatcaagttagagaagcccaaattaatgatcctgatattcaagaaatcaagaagaatatgagaagaggaaaagctatcggtttcttggaggatgagcaaggaactgtatggttgggtgagagaatctgtgtccccgacaacaaagatctaaaagatgcagttctgaaagaagctcatgatactttatactccattcaccctggtagtactaagatgtaccaggatctcaaggaaagattttggtgggcaagtatgaagcgtgaaatcgcagaatatgtagcagtatgtgatgtttgtcagcgagtcaaggcagaacatcagaaacccgtcggtttgttgcagcctttgaagattcctgaatggaaatgggaagaaataggtatggattttattactggtttacccagaacgtcatcaggccatgattctatttgggtgatagtcgacagacttaccaaagtggctcattttattccggtaaagacaacctattccggaagtcgcttggcggaattgtatatggcaaggattgtgtgtttgcatggcgtccctaagaagatagtgtctgatcgaggcagtcagtttacttcaaaattttggaagaaacttcaggaagagatgggttctaagctgaactttagcactgcttatcatccgcagacagacggacaaaccgaaagggtgaatcagattttggaagacatgttgagagcttgtgctttagatttcggtggaagttgggataagaatctaccttatgcagaattttcatacaacaacagttatcaagctagtttacagatggctccttacgaagcactgtatggtcggaagtgccgcactccgcttttgtgggatcaaacgggagaacgtcaggttttcgggacggatatcctaagggaagcagaagaaaaggtgaaaatcattcaagaaagattgcgagtggctcagtctcgtcataagagttatgccgacaatcgccgtagagatttgagttttgaagaaggagactatgtgtatcttcgtgtcacgcctcttcgaggagttcatcgttttcacaccaagggaaaattggcaccgcgttttgtgggaccttataagattgtcagtagaagaggagaggttgcttatcagttagaattacctcaatctttggcaggagtccataatgtgttccatgtgtct

SEQ ID NO: 15182 - DNA, 5232 bp, Oryza sativa
  Clone ID: TFbOSC417326j.C1.o1.np
ccgccttctctctcttctcggcccagtccggccattccgtcgtttccggagagtccgtttttgcagaagaagagtttgaagagttccaaggccagcaaggcaactcctggtttggaatggtacattcctggtttggagatagaactgtgcagccggggtggttgttcagaatggttgggcctatacaacaggatgccgtgttacaagcctgagtacctgtttggtgttgagggttttgtccaggagttgcgtacgatgtcctttgtcattggatttgggactgcccctttttatgcccagattcgtcatgatcgtcatgaagagaagtgccgagtcaaagtcaccatgaacagtaatagtgaagatatcccctcagcgatgttcgaagctggaggaagaaactacatccatgcatgtcaggaagtggcaaggatcgccataggagagctccgtgatagctacagtgatcaattggccgacactgagtatcgctaccatcctcgtcaaccacagggaagtgaccgtggcagttaccttgagactgaaggaattgagaatgatgctactacaaggcatttggttgagatgctgtgggctatggatgaaagtcgtgcggagactgtgttagcagctcaagatcgtgaagaccggaatcgtggtaagatttgcaagctagaagacaaggtggatcgtttggagaaggaattagccgcattgaagggagaagcaccgccgcagaaggccaggattcgtctcaccgcaaggaagagagctttgtttgtccctcgttatcaattggcgccaaagatggtgaacactcgcagcaacgggaatggtcctaacctcaacaaccccaataacaacaacaatggagagaatccaacccttgctcaagttcttgctcaacagactcagttaatgcacatgatgatgcagcaatttcagaatcagcaaaaccaagggaataatcatgcacctccacagaacaagttagcagaatttcttcgtgtgaggccgcctgttttctctagtaccactaatcctgttgaagctagtgattggctgcatgccatagagaagaagttggatttacttcagtgtactgatcaggagaaggtctcatttgcatcacatcagttgcatggccctgcctctgaatggtgggatcacttccgccttaacaggactactgctgaacctatcacttggcttgaattcaccgctgctttccggaagacgcatataccatcgggagtagtgtctctcaagaagaaggagttcaggtcgcttactcagggatctcgctctgttacggagtatctgcacgaattcaatcgtcttgctcgttatgctccggaagatgtgcgcaatgatgaagagcgccaggagaagtttttgggaggacttaatgatgagctttcttacccactcatggttggagattatcctgatttccagaaattagtggataaggctattcgtcaggaggacaagtacaatcgcatggagcagaagaaacgtcggattgctcaattcaagacacaacagggaaataatcagaagccgcgtcttactttaggaccccagtctatgccacagggaggttcttcgtctgttgttcgtccgcaacgtcagttcttcaacaacaatgctggcaacaacatccgtaatcaagctccacgtcctgttgcagctccagcacagcaacaacctgccaagagggagcaaggcaacaagcccgtggtgtgtttcaactgtggagatccaggacattatgctgacaagtgtccgaagccccgacgcgtgaaggttgtccctgcccagaataactctgctgtaccagcatccaaggctcgtgtaaatcatgtcgctactgcagaagctcaagatgctccagatgtgattttgggtacgttccttgttaactcagttcctgcaacagtacttttcgattctggtgctacacattcattcttatctatgagttttgcgggaaatcatgggatggaagtagaagatcttagacgtcctttgatggttagtaccccaagtaatcaagcactctctttgcaacgtagcccctctgtcagaatagaaattcaaggagtaccatttctggccaatcttatcttgttagaatccaaggaccttgatgtcatcctagggatggactggttagccagacataaaggtgtgatagactgtgccaacagaaaagtaactctcaacagctatgatggtcgagttgtaactgttcatgcattgtcatctgagtctttaaggtcaagactgaaccagataactttggaaaagattcctatagtccgggagtatcctgatgtgttcccagatgatttacctggtatgccgcctaaaagggatatagagttcagaatagatttggtacctggaacaactccgatccataagagaccttatcgaatggcagccaatgagttggcagaagttaagaggcaagtagatgatttgcttcagaaaggatacatcagaccgagttcatcaccatggggagctccggttatttttgtggaaaagaaagatcatacccagaggatgtgtgtggactatcgtgcactaaacgatgtgacaatcaagaataagtatccgctgcccagaattgatgatttgtttgatcagcttaaaggagccactgttttctccaagatagatcttcgatcagggtatcatcagttgagaatcaaagaggaagatatacctaagacagcttttaccactaggtatgggttgttcgaatgtactgttatgtcttttggacttaccaatgcccctgctttcttcatgaacttgatgaataaggtgtttatggaatacttagacaagttcgtggtggtctttattgatgatattcttatctactctcgaaccaaagaagagcatgaggaacatcttcgccttgcattggagaagctacgagaacatcaactgtatgctaagtttagcaagtgtgaattttggttgtccgaagtgaaattccttggtcacgtcatctcagccggaggagttgccgtcgatcctagtaacgtggaatccgtaaccaactggaaacaaccaaagacagtttcagagatccgcagtttcctaggccttgcaggatattatcggaggtttatagagaatttttccaagattgctaagcccatgacacgactgcttcagaaagatgtgaagtacaagtggtcggaagaatgtgaacagagttttcaagagttgaaaagtcgcttaatatcagctcctattttgattttgcctgatccaaagaagggtttccaggtgtattgcgatgcatccaaacttgggttaggttgtgttctgatgcaagatgggaaggtggttgcctatgcctctcgacagttacgtccgcatgagaagaactaccctactcatgatattgagttagctgcagtcgttcatgcattgaagatttggcgtcattatcttttcggtactcgtacagaagtgtacaccgatcacaagagtttaaagtatatctttactcagccggatctgaacatgagacaacggagatggttggaattaattaaggattatgacatgggaattcattatcatccgggaaaggctaatgttgtagcagacgctcttagcagaaaaggctattgcaatgttacagaaggacgacagttgccattggaattatgcaaggaatttgaaagattaaatttgggaattgtcggtagaggtttcgttgcagccttagaagcgaagcccactctaattgatcaggttagagaagcccaaattaatgatcctgatattcaagagatcaagaagaatatgagaagaggaaaagctattggtttcttggaggatgagcacggaactgtatggttgggtgagagaatctgtgtccccgacaacaaagatttaaaggatgcaattctgaaagaagctcatgatactttatactccattcaccctggtagtactaagatgtaccaggatcttaaggaaagattttggtgggcaagtatgaagcgtgaaatcgcagaatacgtagcagtatgtgatgtttgtcagcgagtcaaggcagaacatcagaaacccgccgggttgttgcagcctttgaagattcctgaatggaaatgggaagaaattggtatggattttattactggtttacccagaacgtcatcaggccatgactctatttgggtgatagtcgatagacttaccaaagtggctcattttattccggtaaagacaacttattccggaagtcgcttagcggaattgtatatggcaaggattgtgtgtttgcatggcgtccctaagaaaatagtgtctgatcgaggcagtcagtttacttcaaatttttggaagaaacttcaagaagagatgggttctaagctgaactttagtactgcttatcatccgcagacagacggacaaactgaaagggtgaatcaaattttggaagacatgttgagagcttgtgctctagatttcggtggaagttgggataagaatctaccttatgcagaattttcatacaacaacagttatcaagctagtctacagatggctccttacgaagcactgtatggtcggaagtgccgcactccgcttttgtgggatcaaacgggagaacgtcaggttttcggaacggatatcctaagggaagcagaagaaaaggtaaagatcattcaagaaagattgcgtgtggctcagtctcgtcataagagttatgccgacaatcgccgcagagatttgagttttgaagagggagattatgtgtatcttcgtgtcacgcctcttcgaggagttcatcgttttcataccaaaggaaaattggcaccgcgttttgtgggaccttataagattgtcagtagaagaggagaggttgcttatcagttagagttacctcaatctttggcaggagtccataatgtgttccatgtgtcgcaattgaaaaagtgtttaagggtacctaccgaagaagctaatattgagcagatagaagtccaagaggatttgacttatgttgagaaaccaatccgtatcctggaaacaagtgagagaagaaccaggaatcgagttatccgcttttgcaaagtccagtggagtaatcactcggaagaagaatcaacttgggaacgagaagatgaattgaagtcagctcatccgtatctgtttgtcagttcttccgaatctcgaggacgagattctgtt

SEQ ID NO: 15183 - DNA, 5022 bp, Oryza sativa
  Clone ID: TFbOSC419125j.C1.o3.fg
atggtgtggtacacctctgatcagagtaaaactattcgaatagccgtgcccgcggttatgggcgggtctaacaatgtctttcctcctggtttggaatggtacattcctggtttggagatagaactgtgcagccgggatggttgttcagaatggttgggcctatacaacaggatgccgcgctacaagcctgagtacttgtttggtgttgagggttttgtccaggagttgcgtacgatgtcctttgtcattggatttgggactgcccctttttatgcccagattcctcatgatcgtcatgaagagaagtgccgagtcaaagtcaccttgaacagcaatagtgaagaggtcccctcagtaatgttcgaagctggaggaagaaactacatccatgcatgtcaggaagtggcaaggatcgccataggagagcttcgcgatcgctacagtgatcagttggctgacactgagtatcgctaccatcctcgccaaccccaaggaagtgaccgtggcagttaccttgagactgaaggaattgagaatgatgctaccacaaggcatttggttgagatgctgtgggctatggatgaaagtcgtgtggagactgtgttagcggctcaagatcgtgaagaccggaatcgtggtaagatttgcaagctagaagacaaagtggatcgcttggagaaggaactagccgcgttgaagggagaagcaccgccgcagaaggccaggattcgtcttaccgcaaggaagagagctctatttgtccctcgctatcagttggcgccaaaggggtgggatgtaagtgcatgcgtttgtttgcttttgagtgttaggaagttgtttcccccggtttctcttcttgtgccctgtccatgccagatggtgaacactcgcagcaacgggaatggccccaacaacaacaataacaataacaatggagagaatcccacacttgctcaagttcttgctcaacagactcagcttatgaacatgatgatgcagcaacttcagaatcagcagaaccaaggaaataaccatgcacctcctcagaataagttagcagaatttcttcgtgtgaggccgcctgttttctctagtaccactaatcatgttgaagctggtgattggctgcatgccatagaaaagaagttggatttgcttcagtgcactgatcaggagaaggtctcatttgcatcacatcagttgcatggccctgcctctgaatggtgggatcacttccgcctgaataggattactgctgaacctatcacttggcttgaattcaccgctgctttccggaagacgcatataccatcgggagtggtgtctctcaagaagaaggagttcaggtcgctcacccagggatctcgctctgttacggagtatctgcacgagttcaatcgtcttgctcgttatgctccggaagatgtgcgcaatgatgaagagcgtcaagagaagttcttggaaggacttaatgatgagctttcttacccactcatgactggagaatattctgatttccagaaattagtggataaggctattcgccaggaggacaagtacaatcgcatggagcagaagaaacgccggattgctcacttcaaggcacaacaggggaataatcagaagccgcgtcttactttaggaccccagtccatgccacatggaggttcttcgtctgttattcgtccgcagcgccagttcttcaacaacaatgctggcaacaacatccgcaatcaagttccacgtcctgttgcagctccaacacagcaacaacctgccaagagggagcaaggcagcaagcccgtggtgtgtttcaactgtggagacccagggcattatgctgacaagtgtccgaagccccgacgcgtgaaggttgtctctacccagagcaactctaccgtaccagcatcaaaggcccgtgtcaatcatgtcgctgctgcagaagctcaagatgctccagatgtgattttgggtacgttccctgttaactcagttcctgcaacagtgcttttcgattctggtgctacacattcattcttatctatgagttttgcgggaaatcatgggatggaagtagaagatcttagacgtcctttgatggttagtaccccaagtaatcaagcactctctttgcaacgtagcccctctgtcagaatagaaattaaaggagtaccatttctggccaatcttatcttattagaatccaaagaccttgatgttatcctagggatggattggttagccagacataaaggtgtgatagactgtgccaacagaaaagtaactctcaccagtaatgatggtcgagttgtaactgttcatgcattgtcttctgagtctttaaggtcaagactgaatcagataactttggaagagattcctatagtccgggagtatcccgatgtgttcccagatgatttacctggtatgccgcctaaaagggatatagagttcagaatagatttggtacctggaacaactccaatccataagagaccttatagaatggcagccaatgagttggcagaagtcaagaggcaagtagatgatttgcttcagaaaggatacatcagaccgagttcatctccatggggagctccggttattttttgtggaaaagaaagatcatacccagaggatcttaaaagtgccactgttttctccaagatagatcttcgatcaggatatcaccagttgagaatcaaagaggaagatatacctaagacagcttttaccactaggtatgggttgttcgaatgtactgttatgtcttttggacttaccaatgcccctgctttcttcatgaacttgatgaataaggtgtttatggaatacctagacaagttcgtagtggtctttattgatgatattcttatctactctcgaaccaaagaagagcatgaagaacatcttcgccttgcattggagaagctacgagaacatcaactgtatgctaagtttagcaagtgtgaattttggttgtctgaagtgaaattccttggtcacgtcatctcagcaggaggagttgccgttgatcctagtaatgtggaatccgtaactaattggaagcaaccaaagacagtttcagagatccacagtttcctaggcctcgcaggatattaccggaggtttatagagaatttttccaagattgctaagcccatgacacgactgcttcagaaagatgtgaagtacaagtggtcggaagaatgtgagcagagttttcaagagttgaaaagtcgcttaatatcagctcctattttgattttacctgatccaaagaagggtttccaggtgtattgtgatgcatccaaacttgggttaggttgtgttctgatgcaagatgggaaggtggttgcctatgcatctcgtcagttacgtccgcatgagaagaactaccctactcatgatcttgagttagctgcagtagttcatgcgttgaaaatttggcgtcattatcttttcggtactcgtacagaggtgtataccgatcacaagagtttaaagtatatctttactcagccggatctgaacatgagacaaaggagatggttggaattaattaaggattatgacatgggaattcattatcacccgggaaaggctaatgttgtagcagacgctcttagcaggaaaggctattgcaatgctacggaaggacaacagttgccattggaattattcaaggaatttgaaagattaaatttgggaattgtcagtagaggtttcgttgcagccttagaagcgaagcccactctaattgatcaagttagagaagcccaaattaatgatcctgatattcaagaaatcaagaagaatatgagaagaggaaaggctatcggtttcttggaagatgagcaaggaactcgagtcaaggcagaacatcagaaacctgccggtttgttgcagcctttgaagattcctgaatggaaatgggaagaaattggtatggattttatcactggtttacccagaacgtcatcaggccatgactctatttgggtgatagtcgatagacttaccaaagtggctcattttattccggtaaagacaacttattctggaagtcgattggcggaattgtatatggcaaggattgtgtgtttgcatggcgtccctaagaaaatagtgtctgatcgaggcaatcagtttacttcaaatttttggaaaaagattcaggaagagatgggttctaagctgaactttagtactgcttatcatccgcagacagacgaacaaaccgaaagggtgaatcagattttggaagacatgttgagagcttgtgctttagatttcggtggaagttgggataagaatctaccctatgcagaattttcgtacaacaacagttatcaagctagtcttcagatggctccttacgaagcactgtatgatcggaagtgtcgcactccgcttttgtgggatcaaatgggagaacgtcaggttttcgggacggatatcctaagggaagcagaagaaaaggtaaaaatcattcaagaaagattgcgagtggctcagtcacgtcataagagttatgccgacaatcgtcgcagagatttgagttttgaagaaggagattatgtgtatcttcgtgtcacgcctcttcgaggggttcatcgttttcacaccaaaggaaaattggcaccgcgttttgtgggaccttataagattgtcagtagaagaggagaggtcgcttatcagttggagttacctcaatctttggcaggagtccataatgtgttccatgtgtcgcaattgaagaagtgtttaagagtacctaccgaagaagctaatcttgaacagatagaagtccaagaggatttgacttatgttgaaaaaccaatccgtatcttggaaatagatgagagaagaaccaggaatcgagttatccgtttttgcaaagtccagtggagtaatcactcggaagaagaatcaacttgggaacgagaagatgaattgaagtcagctcatccgcatctgttcgccagttcttccgaatctcgaggacgagattctgtttaa

SEQ ID NO: 15184 - DNA, 3854 bp, Oryza sativa
  Clone ID: TFbOSC5437j.C1.o1.fg
ctcctggtttggaatggtatattcctggtttggagatagaactgtgcagccgggatggttgttcagaacggttgggcctatgcaacaggatgccgcgctacaagcctgagtacttgtttggtgttgagggatttgtccaagagttgtgtacgatgtcctttgccataggatttgggactgcccctttttatgcccagattcctcatgatcgtcatgaagagaagtgccgagtcaaagtcactttgaacagtaatagtgatgaaatcccctcagtgatgttcgaagctggaggaagaaactacatccatgcgtgtcaggaggtggcaaggatcgccataggagagctccgcgatcgctattgtgatcagttggccgacactgagtatcgctaccatcctcgccaaccacagggaagtgatcgtggcagctaccttgagactgaaggaattgagaatgatgctaccacaaggcatttggttgagatgctgtgggctatggatgaaacccgtgcggagactgtgttagcagctcaagatcgtgaagaccggaatcgtggtaagatttgcaagctagaggacaaagtggatcgtttggagaaggaactagccgcattgaagggagaagcaccaccgcagaaggccagggttcgtcttaccgcaaggaagagagctctatttgtccctcgttaccaattggcgccaaagatggtgctcactcgtagcaacgggaatggccccaacaacaacaacaataacaacaacaacaatggagagaatcccacacttgcccaagtcctggctcaacagacacagcttatgaacataatgatgcagcaactccagaaccagcagaaccagggaaataaccatgcacctccccagaacaagttagcagaatttcttcgtgtgaggccgcccactttctctagcaccactaatcctgttgaagctggtgactggctgcacgccatagaaaagaagttggatttgcttcagtgcactgatcaggagaaggtctcatttgcatcacaccagctgcatggccctgcctctgaatggtgggatcatttccgccttaacaggactactactgaacctatcacttggcttgagttcaccgctgctttccggaagacgcatataccatcgggagtggtgtctctcaagaagaaggaattcaggtcgctcactcaagggtctcgctctgttacggagtatctgcacgagttcaatcgtctggctcgttatgctccggaagatgtgcgcactgatgaagagcgccaggagaagttcttggaaggacttaatgatgagctttcttacccactcatgactggggattatcctgatttccagaagttagtggataaggctattcgtcaggaggacaagtacaaccgcatggaacagaagaaacgtcagattgctcaattcatggcacaacaggggaatagtcagaggccgcgtcttactttaggaccccagtccatgcctcagggaggttcttcgtctgttgttcgtccgcagcgtcagttcttcaacaacaatgctggcaacaacctccgtaatcaagctccacgccctgttgcagctccaacacagcaacagcctgccaagagggagcaaggcagcaagcccgtggtgtgtttcaactgtggagacccaggacattacgctgacaagtgtccgaagccccgacgcgtgaaggttgtccctgcccagagcaactctaccgcaccagcatcaaaggcccgtgtcaaccatgttgctgctgcagaagctcaagatgctccagatgtgattttgggtacgttccttgttaacctagttcctgcaacagtgcttttcgattctggtgctacacattcattcttatctatgagttttgcgggaaatcatgggatggaagtagaagatcttagacgtcctttgatggttagtaccccaagtaatcaagcactctctttgcaacgtagcccctctgtcagaatagaaattcagggagtaccatttctggccaatcttatcctgttagaatccaaagaccttgatgtcatcctagggatggactggttagccagatataagggtgtgatagactgtgctaacagaaaagtaactctcaccagcaatgatggtcgagttgtaactgttcatgcattgtcttctgagtctttaaggtcaagactgaaccaaataactttggaagaaattcttgtagtccgggagtatcctgatgtgttcccagacgatttacgtggtatgccgcctaaaagggatatagagttcagaatagatttggtaccaggaacaattccgatccataagagaccttatagaatggcagccaatgaattggcaaaagtcaagaggcaagtagacgaaagaacgacagttgccattggagttattagaggttttgttgcggctttagaagcgaagctcactctaattgatcaagttagagaagcccaaattaatgatcctgatattctagaaatcaaaaagaatatgagaagaggaaaagctatcggtttcttggaggatgagcaaggaactgtatggttgggcgagagaatctgtgtccccgataacaaagatttaaaagatgcaattctgaaagaagctcatgatactttatattccattcaccctggtagtaccaaaatgtaccaggatctcaaggaaagattttggtggcgagtcaaggaagaacatcagaaacctgccggtttgttgcagtctttgaagattcctgaatggaaatgggaggaaatcggtatggatttcatcactggtctacccagaacgtcatcaggccatgactctatttgggtgatagtcgatagacttaccaacgtggctcatttcatcccagtaaagacaacatattccggaagtcggttggcggaattgtatatggcaaggattgtgtgtttgcatggcgtccctaagaaaatagtgtctgatcgaggcagtcagtttacttcaaatttttggaagaaacttcaggaagagatgggttctaagctgaactttagtactgcttatcatccgcagacagacggacaaaccgaaagggtgaatcagattttggaagacatgttgagagcttgtactttagacttcggtggaagttgggataagaatttaccttatgcggaattctcgtataacaacagttatcaagctagtcttcagatggctccttacgaagcactgtatattcggaagtgccgcactccgcttttgtgggatcaaacgggagaacgtcaggttttcgggacggatatcctgagggaagtagaagaaaaggtgaaaatcattcaagaaagattgcgagtggcccagtctcgtcataagagttatgccgacaatcgccgcagagatttgagttttgaagaaggagattatgtgtaccttcgtgtcacgcctcttcgaggtgttcatcgttttcacaccaaaggaaaattggcaccgcgttttgtgggaccttataagattgtcagtagaagaggagaggttgcttatcagttggagttacctcaatctttggcaggagtccataatgtgttccatgtgtcgcaattgaaaaagtgtttaagggtacctatcgaagaagctaatcttgaacagatagaagtccaagaggatctgacctatgttgagagaccaatccgtattttggaaatagatgagagaagaactagaaatcgagttattcgtttttgtaaagtccaatggagtaatcattcggaagaagaatcaacttgggaacgagaagatgaattgaagtcagctcatccgcatctgttcgccagttcttccgaatctcgaggacgagattctgtttaa

SEQ ID NO: 15185 - DNA, 2361 bp, Oryza sativa
  Clone ID: TFbOSC5659j.C1.o1.gm
atgacgtcagcagtgacgtcaccaccggcggcggtggctcggcggctcgggcttgcatgctcgccggcgaacgacggcacggcggcgcgaacggaaggcaccaacggccgcgccgcgccgccgttgcagccgccgtcgtcggtcgccgtcgccaccatcgggatcgcgaggtcgtcgccgtccccgtccaccgcttcgccgccgccgaagaccgccggagcaccgccgtcaccgtcgacccgaagaccgccgccgcttcttcctcatggccggcgccgtccgttgctcttccgccgtggttttggtcaccgcgccctagcgccgagtagcctcgagccgccgtcgccgccgtcgctccagccgtgcgccgccgccgttccggtcatcgccgtcgctcgggaagaccaccgtcgtggtcgccaagtcgccgccgtcctcgtccgccccttcgccgtcgccgaagaccgccggagcaccgtcgccgtcgtcaagccgaagagctccgccgtttcaacctcgtcgccgtcgccgtccgttggtcttccgccgctcctttggtcatcggcgagcatgcgcgtccgagccgccgagccgccgccgccggtggtgcgccaaggtgaagagaagcccggccgcacctcctccttcgtcgccggccgccgtagctcgccgttgccggtcaagccgagccgccgccgccgttcatctcgtcgccggccgtcgtcgttcgtcgtttggctcaagggtgagtaccgttgggttcgtctcgtcgttctccacgtgtacatgtcctccaaatttgcagccgaccatccaatctccggcgaggtcgccaacccgggccggccattgatgatccgcgccgagcagccgtctccgccgtcgccgccgcttgccgccaccgccattagcaccactaatcctgttgaagctggtgattggctccatgccatagagaagaagttggatttgcttcaatgcactgatcaggagaaggtctcatttgcatcccatcagttgcatggccctgcctctgaatggtgggatcacttccgtctgaataggactactgctgaacctatcacttggcttgaattcaccgctgctttccggaagacgcatataccatcgggagtggtgtctctcaagaagaaggaattcaggtcgctcactcagggatctcgctctgttacggagtatctgcacgagttcaatcgtcttgctcgttatgctccggaagataagttagtggataaggctattcgccaggaggacaagtacaatcgcatcgagcagaagaaacgtcggattgctcaattcaagacacaacaggggaatagtcagaggccgcgtcttactttaggaccccagtccatgccacagggaggttcttcgtctgttgttcgtccgcagcgtcagttcttcaacaacaatgctggcaacaacatccgcaatcaagctctacgccctgttgcagcctcgacacagcaacaacctgccaagagggagcaaggcagaaagcccgtggtgtgtttcaactgtggagacccaggacattacgctgacaagtgtccgaagccccgacgcgtgaaggttgtccctgctcagagcaactctaccgcaccagcgccaaaggcccgtgttaatcatgtcgctgctgcagaagctcaagatgctccagatgtgattttggaaaggatacatcagaccgagttcatctccatggggagctccggttatttttgtggaaaagaaagaccatacccagaggatcttaaaggtgccactgttttctccaagatagatcttcgatcagggtatcaccagttgagaatcaaagaggaagatatacctaagacagcttttaccactagatatgggttgttcgaatgtactgttatgtcttttggacttaccaatgcccctgctttcttcatgaacttgatgaataaggtgtttatggaatacctagacaagttcgtggtggtctttattgatgacattcttatgatcggagcgaggatcagggacacggacttcttgcaaggagatgacattctctggatcaatttcaggggaatctacgaactataccagctggacgccctcgacgtctctattatgagttgctggattttaatggagattcaaagggcccgacggcggagggttttcgatactggattcatcgaccctcggagagtaaacgtcacaatgcttgaccaatatccacaagaaacagaggacaatctcgtccatctcctgaaggcgcagcattacaagacgttcatactgttgccgtacaacatagaattccactgggtgcttttactcttcgacctgtcggcctgcaccgtcaac

SEQ ID NO: 15186 - DNA, 5173 bp, Oryza sativa
  Clone ID: TFbOSC5663j.C1.o2.np
atgtctttcgtgattagtctcacacctctcatcataataaaagaactgtgcagccgggatggttgttcagaacggttgggcctatgcaacaggatgccgcgctacaagcctgagtacttgtttggtgttgagggatttgtccaagagttgtgtacgatgtcctttgccataggatttgggactgcccctttttatgcccagattcctcatgatcgtcatgaagagaagtgccgagtcaaagtcactttgaacagtaatagtgatgaaatcccctcagtgatgttcgaagctggaggaagaaactacatccatgcgtgtcaggaggtggcaaggatcgccataggagagctccgcgatcgctattgtgatcagttggccgacactgagtatcgctaccatcctcgccaaccacagggaagtgatcgtggcagctaccttgagactgaaggaattgagaatgatgctaccacaaggcatttggttgagatgctgtgggctatggatgaaacccgtgcggagactgtgttagcagctcaagatcgtgaagaccggaatcgtggtaagatttgcaagctagaggacaaagtggatcgtttggagaaggaactagccgcattgaagggagaagcaccaccgcagaaggccagggttcgtcttaccgcaaggaagagagctctatttgtccctcgttaccaattggcgccaaagttttccccggtttctcttcttgtgctcctgtccatgccagatggtgctcactcgtagcaacgggaatggccccaacaacaacaacaataacaacaacaacaatggagagaatcccacacttgcccaagtcctggctcaacagacacagcttatgaacataatgatgcagcaactccagaaccagcagaaccagggaaataaccatgcacctccccagaacaagttagcagaatttcttcgtgtgaggccgcccactttctctagcaccactaatcctgttgaagctggtgactggctgcacgccatagaaaagaagttggatttgcttcagtgcactgatcaggagaaggtctcatttgcatcacaccagctgcatggccctgcctctgaatggtgggatcatttccgccttaacaggactactactgaacctatcacttggcttgagttcaccgctgctttccggaagacgcatataccatcgggagtggtgtctctcaagaagaaggaattcaggtcgctcactcaagggtctcgctctgttacggagtatctgcacgagttcaatcgtctggctcgttatgctccggaagatgtgcgcactgatgaagagcgccaggagaagttcttggaaggacttaatgatgagctttcttacccactcatgactggggattatcctgatttccagaagttagtggataaggctattcgtcaggaggacaagtacaaccgcatggaacagaagaaacgtcagattgctcaattcatggcacaacaggggaatagtcagaggccgcgtcttactttaggaccccagtccatgcctcagggaggttcttcgtctgttgttcgtccgcagcgtcagttcttcaacaacaatgctggcaacaacctccgtaatcaagctccacgccctgttgcagctccaacacagcaacagcctgccaagagggagcaaggcagcaagcccgtggtgtgtttcaactgtggagacccaggacattacgctgacaagtgtccgaagccccgacgcgtgaaggttgtccctgcccagagcaactctaccgcaccagcatcaaaggcccgtgtcaaccatgttgctgctgcagaagctcaagatgctccagatgtgattttgggtacgttccttgttaacctagttcctgcaacagtgcttttcgattctggtgctacacattcattcttatctatgagttttgcgggaaatcatgggatggaagtagaagatcttagacgtcctttgatggttagtaccccaagtaatcaagcactctctttgcaacgtagcccctctgtcagaatagaaattcagggagtaccatttctggccaatcttatcctgttagaatccaaagaccttgatgtcatcctagggatggactggttagccagatataagggtgtgatagactgtgctaacagaaaagtaactctcaccagcaatgatggtcgagttgtaactgttcatgcattgtcttctgagtctttaaggtcaagactgaaccaaataacgttggaagagattcctatagtccgggagtatcctgatgtgttcccagacgatttacctggtatgccgcctaaaagggatatagagttcagaatagatttggtaccaggaacaactccaatccacaagagaccttatagaatggcaaccaatgagtttgcagaagtcaagaggcaagtagacgatttgcttcagaaaggatacatcagaccgagttcatctccatggggagctccggttatttttgtggaaaagaaagatcatacccagaggatgtgtgtggactatcgtgctctaaatgatgtgactatcaagaataagtatccgctacccagaattgatgatttgtttgatcagcttaaaggtgccaccattttctccaagatagatcttcgatcagggtatcaccagttgagaatcaaagaggaagatatacctaagacagcttttaccactagatacggattgttcgaatgtactgttatgtcttttggacttaccaatgcccccactttcttcatgaacttgatgaataaggtgtttatggaatacctagacaagttcgtggtagtctttattgatgacattcttatctactcccgaaccaaagaagagcatgaagaacatcttcgccttgcactggagaagctgcgagaacatcagctgtatgctaagtttagcaagtgtgaattttggttgtcggaagtgaagttccttggtcacgtcatctcagcaggaggagttgccgtcgatcctagtaatgtggaatccgtaaccaactggaaacaaccaaagacagtttcagagattcgcagtttcctaggcctcgcaggatattatcggaggtttatagagaatttttccaagattgctaagcccatgacacgactgcttcagaaagatgtgaagtacaagtggtcagaagaatgtgagcagagttttcaagagttgaaggatcgcttaatatcagctcctattttgattttgcctgatccaaagaagggttttcaagtgtattgtgatgcatccaagcttgggttaggttgtgttttgatgcaagatgggaaggtggttgcctatgcatctcgtcagttacgtccgcatgaggagaactaccctactcatgatcttaagttagccgcagtggttcatgcgttgaaaatttagcgtcattatcttttcggtactcgtacagaggtgtataccgatcacaagagtttaaagtatatctttactcagccggatctgaacatgagacaacggagatggttggaattaattaaggattatgatatgggaattcattatcacccgggaaaggctaatgttgtagcagacgctcttagcaggaaaggctattgcaatgctacgaaaggacgacagttgccattggaattatgcaaggaatttgaaagatttaatttgggaattgccagtagaggtttcgttgcagccttagaagcaaagcccattctaattgatcaagttagagaagcccaaattaatgatcctgatattctagaaatcaaaaagaatatgagaagaggaaaagctatcggtttcttgagggatgagcaaggaactgtatggttgggcgagaaaatctgtgtccccgataacaaagatttaaaagatgcaattctgaaagaagctcatgatactttatattccattcaccttggtagtaccaaaatgtaccaggatctcaaggaaagattttggtgggcaagtatgaagcgtgaaatcgcagagtacgtagcagtatgtgatgtttgtcagcgagtcaaggcagaacatcaaaaacctgccggtttgttgcagcctttgaagattcctgaatggaaatgggaggaaatcggtatggatttcatcactggtttacccagaacgtcatcaggccatgactctatttgggtgatagttgacagacttaccaaagtggctcatttcatcccagtaaacacaacatattccggaagtcggttggcggaattgtatatggcaaggattgtgtgtttgcatggcgtccctaagaaaatagtgtctgatcgaggcagtcagtttacttcaaatttttggaagaaacttcaggaagagatgggttctaagctgaactttagtactgcttatcatccgcagacagacggacaaaccgaaagggtgaatcagattttggaagacatgttgagagcttgtactttagacttcggtggaagttgggataagaatttaccttatgcggaattctcgtataacaacagttatcaagctagtcttcagatggctccttacgaagcactgtatattcggaagtgccgcactccgcttttgtgggatcaaacgggagaacgtcaggttttcgggacggatatcctgagggaagtagaagaaaaggtgaaaatcattcaagaaagattgcgagtggcccagtctcgtcataagagttatgccgacaatcgccgcagagatttgagttttgaagaaggagattatgtgtatcttcgtgtcacgcctcttcgaggagttcatcgttttcacaccaaaggaaaattggcaccgcgttttgtgggaccttataagattgtcagtagaagaggagaggttgcttatcagttggagttacctcaatctttggcaggagtccataatgtgttccatgtgtcgcaattgaaaaagtgtttaagggtacctatcgaagaagctaatcttgaacaaatagaagtccaagaggatctgacctatgttgagagaccaatccgtattttggaaatagatgagagaagaaccaggaatccagttatccgtttttgtaaagtccaatggagtaatcattcggaagaagaatcaacttgggaacgagaagatgaattgaagtcagctcatccgcatctgttcgccagttcttccgaatctcgaggacgagattctgtt

SEQ ID NO: 15187 - DNA, 838 bp, Oryza sativa
  Clone ID: TFbOSC5862j.C1.o5.np
atgacgtcaccaccggcggcggcggctcggcggctcggacgcgcatgctcgcctgcgaacggcggcacttcggcacgaacggagggcaccaacgggtagagcgcgacgcggcgaactcaccgatgaccaaaggagcggcggaagaccaacggacggcgacggcgacgaggttgaaacggcggagctcttcggcttgacgacggcgacggtgctccggcggtcttcggcgacggcgaaggggcggacgaggacggcggcgacttggcgaccacgacggtggtcttcccgagcgacggcgatgaccggaacggcggcggcgcacggctggagcgacggcggcgacggcggctcgaggctactcggcgctagggcgctacggacgacgagaggcgaaggcgagggtagcggcgggtagagaagagctcgggggtccttttaaaggggttggagggcgacggcgaaggcccacggcggccggcgacgagaaggaaaggtcgggctcggagagagaaaagccgatccgattcgacctcgaatcaaacgctttccaagccgatttagccgatgtttccaaaagggaaaaggtagaggagatcccgaggatcatttcccctctatcaattcggccggagaaggaaaggagcggccggatttggaaggagacggcggcggcgcagcgctagggtttcgggaggcggccgacgcgaggaagacgacgacctgacaggcgggggcgcgcgcgcgtgggcggctgcggactggactgggccgacttgggccgaggagagagagaacggtttttgggccgactttcggcccagagccaaaagagactctt

SEQ ID NO: 15188 - DNA, 2035 bp, Oryza sativa
  Clone ID: TFbOSC5862j.C1.o6.gm
ccgcgccgcgccgccgttgcagccgccgtcgtcggtcgccgtcgccaccatcgggatcgcgaggtcgtcgccgtccccgtccaccgcttcgccgccgccgaagaccgccggagcaccgccgtcaccgtcgacccgaagaccgccgccgcttcttcctcatggccggcgccgtccgttgctcttccgccgtggttttggtcaccgcgccctagcgccgagtagcctcgagccgccgtcgccgccgtcgctccagccgtgcgccgccgccgttccggtcatcgccgtcgctcgggaagaccaccgtcgtggtcgccaagtcgccgccgtcctcgtccgccccttcgccgtcgccgaagaccgccggagcaccgtcgccgtcgtcaagccgaagagctccgccgtttcaacctcgtcgccgtcgccgtccgttggtcttccgccgctcctttggtcatcggcgagcatgcgcgtccgagccgccgagccgccgccgccggtggtgcgccaaggtgaagagaagcccggccgcacctcctccttcgtcgccggccgccgtagctcgccgttgccggtcaagccgagccgccgccgccgttcatctcgtcgccggccgtcgtcgttcgtcgtttggctcaagggtgagtaccgttgggttcgtctcgtcgttctccacgtgtacatgtcctccaaatttgcagccgaccatccaatctccggcgaggtcgccaacccgggccggccattgatgatccgcgccgagcagccgtctccgccgtcgccgccgcttgccgccaccgccattagcaccactaatcctgttgaagctggtgattggctccatgccatagagaagaagttggatttgcttcaatgcactgatcaggagaaggtctcatttgcatcccatcagttgcatggccctgcctctgaatggtgggatcacttccgtctgaataggactactgctgaacctatcacttggcttgaattcaccgctgctttccggaagacgcatataccatcgggagtggtgtctctcaagaagaaggaattcaggtcgctcactcagggatctcgctctgttacggagtatctgcacgagttcaatcgtcttgctcgttatgctccggaagataagttagtggataaggctattcgccaggaggacaagtacaatcgcatcgagcagaagaaacgtcggattgctcaattcaagacacaacaggggaatagtcagaggccgcgtcttactttaggaccccagtccatgccacagggaggttcttcgtctgttgttcgtccgcagcgtcagttcttcaacaacaatgctggcaacaacatccgcaatcaagctctacgccctgttgcagcctcgacacagcaacaacctgccaagagggagcaaggcagaaagcccgtggtgtgtttcaactgtggagacccaggacattacgctgacaagtgtccgaagccccgacgcgtgaaggttgtccctgctcagagcaactctaccgcaccagcgccaaaggcccgtgttaatcatgtcgctgctgcagaagctcaagatgctccagatgtgattttggaaaggatacatcagaccgagttcatctccatggggagctccggttatttttgtggaaaagaaagaccatacccagaggatcttaaaggtgccactgttttctccaagatagatcttcgatcagggtatcaccagttgagaatcaaagaggaagatatacctaagacagcttttaccactagatatgggttgttcgaatgtactgttatgtcttttggacttaccaatgcccctgctttcttcatgaacttgatgaataaggtgtttatggaatacctagacaagttcgtggtggtctttattgatgacattcttatgatcggagcgaggatcagggacacggacttcttgcaaggagatgacattctctggatcaatttcaggggaatctacgaactataccagctggacgccctcgacgtctctattatgagttgctggattttgtaa

SEQ ID NO: 15189 - DNA, 5272 bp, Oryza sativa
  Clone ID: TFbOSC6233j.C1.o1.np
gcttgtcagtcgtcgtcttcctcgggccgaaaccctagtttcgcgccgccgagctgccgtcgccgccgctttccaaatattccgtcgtttccggagagtccgttttcgcagaagaagagtttgaagagttccaaggccagcaaggcaactcctggtttggaatggtacattcctggtttggagatagaactgtgcagccgggatggttgttcagaatggttgggcctatacaacaggatgccgcgttacaagcctgagtacctgtttggtgttgagggttttgtccaggagttgcgcacgatgtcctttgtcattggatttgggactgcccctttttatgcccagattcctcatgaccgtcatgaagagaagtgccgagtcaaagtcaccttgaacagcaatagtgaagaggtcccctcagtgatgtttgaagctggaggaagaaattacatccatgcatgtcaggaagtggcaaggatcgccataggagagctccgtgatcgctacagtgatcaattggccgacactgagtatcgctaccatcctcgccaaccccagggaagtgaccgtggcagttaccttgagactgaaggaattgagaatgatgttaccacgaaacatttggttgagatgttgtgggctatggatgaaagtcgtgcggagactgtgttagcagctcaagatcgtgaagatcggaatcgtggtaagatttgcaagctagaagacaaggtggatcgtttggagaaggaattagccgcattgaagggagaagcaccgccgcagaaggcctggattcgtcttaccgcaaggaagagagctctatttgtccctcgctatcaattggcgccaaagatggtgaacactcgtagcaatgggaatggtcccaacaaccccaataacaacaacaatggagagaatcccactctggcccaagttcttgctcaacagactcagcttatgaacatgatgatgcagcaatttcagaatcagcaaaaccaagggaataatcatgcacctccacagaacaagttagcagaatttcttcgtgtaaggccgcctgttttctctagtaccactaatcctgttgaagctagtgattggctgcatgccatagagaagaagttggatttacttcagtgtactgatcaggagaaggtctcatttgcatcacatcagttgcatggccctgcctctgaatggtgggatcacttccgccttaacaggactactgatgaacctatcacttggcttgaattcaccgctgctttccgaaagacgcatataccatcgggagtagtgtctctcaagaagaaggagttcaggtcgcttactcagggatctcgctctgttacggagtatctgcacgagttcaatcgtcttgctcgttatgctccggaagatgtgcgcaatgatgaagagcgccaggagaagtttttgggaggacttaatgatgagctttcttacccactcatggttggagattatcctgatttccagaaattagtggataaggctattcgtcaggaggacaagtataatcgcatggagcagaagaaacgtcggattgctcaattcaagacacaacagggaaataatcagaagccgcgtcttactttaggaccccagcccatgtcacagggaggttcttcgtctgttgttcgtccgcagcgtcagttcttcaacaacaatgctggcaacaacatccgtaatcaagctccacgtcctgttgcagctccagcacagcaacaacctgccaagagggagcaaggcaacaagcccgtggtgtgtttcaactgtggagatccaggacattatgctgacaagtgtccgaagccccgacgcgtgaaggttgtccctacccagaataactctgctgtaccagcatcaaaggctcgtgtaaatcatgtcgctgctgcagaagctcaagatgctccagatgtgattttgggtacgttccttgttaactcagttcctgcaacagtacttttcgattctggtgctacacattcattcttatctatgagttttgcgggaaatcatgggatggaagtagaagatcttagacgtcctttgatggttagtaccccaagtaatcaagcactctctttgcaacgtagcccctctgtcagaatagaaattcaaggagtaccatttctggccaatcttatcttgttaaaatccaaagaccttgatgtcatcctagggatggactggttagccagacataaaggtgtgatagactgtgccaacaaaaaagtaactctcaacaggctatgatggtcgagttgtaactgttcatgcattgtcatctgagtctttaaggtcaagactgaaccagataactttggaagagattcctatagtccgggagtatcctgatgtgttcccagatgatttacctggtatgccgcctaaaagggatatagagttcagaatagatttggtacctggaacaactccgatccataagagaccttatcgaatggcagccaatgagttggcagaagttaagaggcaagtagatgatttgctacagaaaggatacatcagaccgagttcatcaccatggggagctccggttatttttgtggaaaagaaagaccatactcagagaatgtgtgtggactatcgtgcactaaacgatgtgactattaagaataagtatccactacccaggattgatgatttgtttgatcaacttaaaggtgccactgttttctccaagatagatcttcgatcagggtatcatcagttgagaatcaaagaggaagatatacctaagacagcttttaccactaggtatgggttgttcgaatgtaccgttatgtcttttggacttaccaatgcccctgctttcttcatgaatttgatgaataaggtgtttatggaatacctagacaagttcgtggtggtctttattgatgatattcttatctactctcgaaccaaagaagagcatgaggaacatcttcgtcttgcattggagaagctacgagaacatcaactgtatgctaagtttagcaagtgtgaattttggttgtccgaagtgaaattccttggtcacgtcatctcagccggaggagttgccgtcgatcctagtaacgtggaatccgtaaccaattggaagcaaccaaagacagtttcagagattcgcagtttcctaggccttgcaggatattatcggaggtttatagagaatttttccaagattgctaagcccatgacacgactgcttcagaaagatgtgaagtacaagtggtcggaagaatgtgagcggagttttcaagagttgaaaagtcgcttaatatccgctcctattttgattttgcctgatccaaagaagggttttcaagtgtattgtgatgcatccaaacttgggttaggttgtgttctgatgcaagatgggaaggtggttgcctatgcctctcgacagttacgtccgcatgagaagaactaccctactcatgatattgagttagctgcagtcgttcatgcattgaagatttggcgtcattatcttttcggtactcgtacagaagtgtacaccgatcacaagagtttaaagtatatctttactcagccggatctgaacatgagacaacggagatggttggaattaattaaggattatgacatgggaattcattatcatccgggaaaggctaatgttgtagcagacgctcttagcagaaaaggctattgcaatgctacagaaggacgacagttgccattggaattatgcaaggaatttgaaagattaaatttgggaattgtcggtagaggtttcgttgcaaccttaaaagccaagcccactctaattgatcaagttagagaagcccaaattaatgatcctgatattcaaaagatcaagaagaatatgagaagaggaaaagctattggtttcttggacgatgagcacggaactgtatggttgggtgagagaatctgtgtccccgacaacaaagatttaaaggatgcaattctgaaagaagctcatgatactttatactccattcatcctggtagtactaagatgtaccaggatcttaaggaaagattttggtgggcaagtatgaagcgtgaaatcgcagaatacgtagcagtatgtgatgtttgtcagcgagtcaaggcagaacatcagaaacccgccggtttgttgcaacctttgaagattcctgaatggaaatgggaagaaattggtatggattttattactggtttacccagaacgtcatcaggccatgactctatttgggtgatagtcgacagacttaccaaagtggctcatttcattccggtaaagacaacttattccggaagtcgcttagcagaattgtatatggcaaggattgtgtgtttgcatggcgtccctaagaagatagtgtctgatcgaggcagtcagtttacttcaaatttttggaagaaacttcaggaagagatgggttctaagctgaactttagtactgcttatcatccgcagacagatggacaaaccgaaagggtgaatcaaattttggaagacatgttgagagcttgtgctctagatttcggtggaagttgggataagaatctaccctatgcagaattttcgtacaacaacagttatcaagctagtctacagatggctccgtacgaagcactgtatggtcggaagtgccgcactccgcttttgtgggatcaaacgggagaacgtcaggttttcggaacggatatcctaagggaagcagaagaaaaggtaaagatcattcaagaaagattgcgtgtggctcagtctcgtcataagagttatgccgacaatcgccgcagagatttgagttttgaagagggagattatgtgtatcttcgtgtcacgccttttcgaggagttcatcgttttcgtaccaaaggaaaattggcaccgcgttttgtgggaccttataagattgtcagtagaagaggagaggttgcttatcagttggagttacctcaatctttggcaggagtacataatgtgttccatgtgtcgcaattgaaaaagtgtttaagggtacctaccgaagaagctaatattgagcagatagaagtccaagaagatttgacttatgttgagaaaccaatccgtatcctggaaacaagtgagagaagaaccaggaatcgagttatccgtttttgcaaagtccaatggagtaatcactcggaagaagaatcaacttgggaacgagaagatgaattggagtcagctcatccgcaattgttcgccagttcttccgaatctcgaggacgagattctgtt

SEQ ID NO: 15190 - DNA, 1824 bp, Oryza sativa
  Clone ID: TFbOSC6318j.C1.o1.fg
atgccgcgctacaagcctgagtacttgtttggtgttgagggatttgtccaagagttgcgtacgatgtcctttgccataggatttgggactgcccctttttatgcccagattcctcatgatcgtcacgaagaaaagtgccgagtcaaagtcaccttgaacagtaatagtgaagatatcccctcagagatgttcgaagctggaggaagaaactacatccatgcatgtcaggaggtggcaaggatcgccataggggagctccgcgatagctacagtgatcagttggccgacactgagtatcgctaccatcctcgccaaccacagggaagtgaccgtggcagctaccttgagactgagggaattgagaatgatgctaccacaaggcatttggttgagatgctgtgggctatggatgaaacccgtgcggagactatgttagcagttcaagatcgtgaagatcggaatcgtggtaagatttgcaagctagaggacaaggtggatcgtttggagaaggaactagccgcgttgaagggagaagcaccaccgcagaaggccaggattcgtcttaccgcaaggaagagagctctatttgtccctcgctaccaattggcgccaaaggtccgtgtggtggaaaaagaagttaccccagccctagcggatcctccggtcgttaacatggtgctcactcgcagcaacgggaatggccccaacaacaacaataacaacaacaatggagagaatcccacacttgcccaagtcctggctcaacaggcacagcttatgaacatgatgatgcagcaactccagaaccagcagaaccagctcaaccaaggaaacaacaatgctccgccgccgcagaacaagttagcagaatttcttcgtctgcatgccatagagaagaagttggatttgctccagtgcactgatcaggagaaggtctcatttgcatcacaccagctgcatggcccagcctctgaatggtgggatcacttccgccttaataggactactgctgaacctatcacttggcttgagttcaccgctgctttccggaagacacatataccatcgggagtggtgtttctcaagaagaaggaattcaggtcgctcacccagggatctcgctctgtcaccgagtatctgcacgagttcaatcgtctggctcgttatgctccagaagatgttcgcaatgatgaagagcgccaggagaagttcttggaaggacttaatgatgagctttcttaccccctcatgactggagattatcctgatttccagaagttggtggataaggctattcgtcaggaggacaagtacaatcgcatggaacaaaagaaacgccggattgctcacttcaaggcacaacaggggaatacttcgacacagcaacaacctgccaagaaggagcaaggcagcaagcccgtagtgtgtttcaactgtggagacccaggacattatgctgacaagtgtccgaagccccgacgcgtgaaagttgtccctgcccagagcaactctaccgcaccagcatccaaggctcgtgtcaatcatgttgctgctgcagaagctaaagatgctccagatgtgattttgggtacgttctttgttaactcagttcctgcaacagtgcttttcgattctggtgctacacattcattattatctatgagttttgcgggaaatcatgggatggaagtagaagatcttagacgtcctttgatggttagtaccccaagtaatcaagcactctctttgcaacgtagcccctctgtcagaatagaaattcaagaagtaccatttctggccaatcttattctgttagaatcctag

SEQ ID NO: 15191 - DNA, 859 bp, Oryza sativa
  Clone ID: TFbOSC6410j.C1.o3.np
gtgacatcaccgacagcggcggcggctcggtggaggagacggctcgaacggcgcacgctcgccggcgaacggcggcgcgaggacgcaaacggagggcaccaagatgaagcgggcggcacggcgaactcaccggcgaccaaaacgacggcggaaggtcaacggacggcgacggcgacgaggaggaagcggcgaagctcttcggcttgacgacggcgacgaagctccgacgatctctggcgacggcgaaggggcggacgaggacggcgacgacttggcgagcacgacggtggtcttcccgagcgacggcgacggctgaaacgacggcggcgcacggctggagcggcggcggcgacggcaaagctagggcacacggcgctagggcttttccgacgacgagaggcgaaggcgaaggtggcgacgggtagaggagacaccgggggtccttttaaaggggctcagaggcggcggcgaaggcccatggcggcggcaacggcgaaggaaagctcggcttggagagagggaaaccgatccgaaacgaactcgattccacgaacttccaaaacgatttagccaaagattccaaaggagaaaaggtagaggagatcccggagattgttttccctcaaacaattcggccggagaaggaaaggaacggccggatttggaaaggaacggcggcggcggcgcgctagggtttcgggcggcggcggacgaaggtagacgatgggtccgacaggtgggacccacctgtcagcgaccgaacgcgcgcgcgcggcggctgcggactgggccgaactgggccgaggagagagagagcggttttgggccgactttcggcccaaagccaaaagagactttt

SEQ ID NO: 15192 - DNA, 3951 bp, Oryza sativa
  Clone ID: TFbOSC7927j.C1.o1.fg
atggtgaacactcgcagcaatgggaatggtcccaacaaccccaataacaacaatggagagaatcctactctggcccaagttcttgctcaacagacacagcttatgaacatgatgatgcagcaatttcagaatcagcaaaaccagggaataatcatgcacctccccaaaacaaagaagaagttggatttacttcagtgtactgatcaggagaaggtttcatttgcatcacatcagttgcatggccctgcctctgaatggtgggatcacttccgccttaacaggactactgctgaacctatcacttggcttgaattcaccgctgctttccggaagacgcatataccatcgggagtagtgtctctcaagaagaaggagttcaggtcgcttactcagggatctcgctctgttacggagtatctgcacgagttcaatcgtcttgctcgttatgctccagaagatgtgcgcaatgatgaagagcgccaggagaagtttttgggaggacttaatgatgagctttcttacccactcatggttggagattaccctgatttccagaaattagtggataaggctattcgtcaggaggacaagtacaatcgcatggagcagaagaaacgtcggattgctcaattcaagacacaacaggggaataatcagaagccgcgtcttactttaggaccccagtccatgccacagggaggttcttcgtctgttgttcgtccgcaacgtcagttcttcaacaacaatgctggcaacaacatccgtaatcaagctccacgtcctgttgcagctccagcacagcaacaacctgccaagagggagcaaggcagcaagcccgtggtgtgtttcaactgtggagatccaggacattatgctgacaagtgtccgaagccccgacgcgtgaaggttgtccctacccagaataactctgctgtaccagcatccaaggctcgtgtaaatcatgtcgctgctgcagaagctcaagatgctccagatgtgattttggggatggactggttagccagacataaaggtgtgatagactgtgccaacagaaaagtaactctcaacagctatgatggtcgagttgtaactgttcatgcattgtcatctgagtctttaaggtcaagactgaaccagataactttggaagagattcctatagtccgggagtatcctgatgtgttcccagatgatttacctggtatgccgcctaaaagggatatagagttcagaatagatttggtacctggaacaactccgatccataagagaccttatcgaatggcagccaatgagttggcagaagttaagaggcaagtagatgatttgctacagaaaggatacattagaccgagttcatcaccatggggagctccggtgccactgtttttttccaagatagatcttcgatcagggtatcatcagttgagaatcaaagaggaagatatacctaagacagcttttaccactaggtatgggttgttcgaatgtactgttatgtcttttggacttaccaatgcccctgctttcttcatgaacttgatgaataaggtgtttatggaatacttagacaagttcgtggtggtctttattgatgatattcttatctactctcgaaccaaagaagagcatgaggaacatcttcgccttgcattggagaagctacgagaacatcaactgtatgctaagtttagcaagtgtgaattttggttgtctgaagtgaaattccttggtcacgtcatctcagcaggaggagttgccgtcgatcctagtaatgtggaatccgtaaccaattggaagcaaccaaagacagtttcagagattcgcagtttcctaggccttgccggatattatcggaggtttatagagaatttttccaagattgctaagcccatgacacgactgcttcagaaagatgtgaagtacaagtggtcggaagaatgtgagcagagttttcaagagttgaagaatcgcttagtatcagctcctattttgactttgcctgatccaaagaagggtttccaagtgtattgcgatgcatccaaacttgggttaggttgtgttttgatgcaagatgggaaggtggttgcctatgcctctcgacagttacgtccgcatgagaagaactaccctactcatgatattgagttagctgcagtcgttcatgcattgaagatttggcgtcattatcttttcggtactcgtacagaagtgtacaccgatcacaagagtttaaagtatatctttactcagccagatctgaacatgagacaacggagatggttggaattaattaaggattatgacatgggaattcattatcatccgggaaaggctaatgttgtagcagacgctcttagcagaaaaggctattgcaatgctacagaaggacgacagttgccattggaattatgcaaggaatttgaaagattaaatttgggaattgtcggtagaggtttcgttgcagccttagaagcgaagcccactctaattgatcaagttagagaagcccaaattaatgatcctgatattcaagagatcaagaagaatatgagaagaggaaaagctattggtttcttggaggatgagcacggaactgtatggttgggtgagagaatctgtgtccccgacaacaaagatttaaaggatgcaattctgaaagaagctcatgatactttatactccattcaccctggtagtactaagatgtaccaggatcttaaggaaagattttggtgggcaagtatgaagcgtgaaatcgcagaatacgtagcagtatgtgatgtttgtcagcgagtcaaggcagaacatcagaaaccagccggtttgttgcagcctttgaagattcctgaatggaaatgggaagaaatcggtatggattttatcactggtttacccagaacgtcatcgggccatgattctatttgggtgatagtcgacagacttaccaaagtggctcatttcattccggtaaagacaacttattccggaagtcgcttagcggaattgtatatggcaaggattgtgtgtttgcatggtgtccctaagaaaatagtgtctgatcgaggcagtcaatttacttcaaatttttggaagaaacttcaggaagagatgggttctaagctgaactttagtactgcttatcatccacagacagacggacaaaccgaaagggtgaatcagattttggaagacatgttgagagcttgtgctttagatttcggtggaagttgggataagaatttaccttatgcagaattttcatacaacaacagttatcaagctagtctacagatggctccgtacgaagcactgtatggtcggaagtgccgcactccgcttttgtgggatcaaacgggagaacgtcaggttttcggaacggatatcctaagggaagcagaagaaaaggtaaagatcattcaagaaagattgcgagtggctcagtctcgacataagagttatgccgacaatcgccgcagagatttgagttttgaagagggagattatgtgtatcttcgtgtcacgcctcttcgaggagttcatcgttttcataccaagggaaaattggcaccgcgttttgtgggaccttataagattgtcagtagaagaggagaggtcgcttatcagttggagttacctcaatctttggcaggagtccataatgtgttccatgtgtcgcaattgaaaaagtgtttaagggtacctaccgaaggagctaatattgaccagatagaagtccaagaggatttgacttatgttgagaaaccaatccgtatcctggaaacaagtgagagaagaaccaggaatcgagttatccgtttttgcaaagtccaatggagtaatcactcggaagaagaatcaacttgggaacgagaagatgaattgaagtcagctcatccgcttctgttcgccagttcttccgaatctcgaggacgagattctgtttaa

SEQ ID NO: 15193 - DNA, 3240 bp, Oryza sativa
  Clone ID: TFbOSC900039j.C1.o20.fg
atggagcagaagaaacgccggattgctcaattcaagacacaacaggggaataatcagaagccgcgtcttactttaggaccccagaccatgccacatggaggttcttcgtctgttgttcgtccgcagcgtcagttcttcaacaacaatgctggcaataacaaccgcaatcaagctccacgtcctgttgcagctccaacacagcaacagcctgccaagagggagcaaggcagcaagcccgtggtgtgtttcaactgtggagacccggggcattatgctgacaagtgtccgaagccccgacgcgtgaaggttgtccctgcccagagcaactctaccgtaccagcatcaaaggcccgtgtcaatcatgttgctgctgcggaagctcaagatgctccagatgtgattttgggtacgtttcttgttaacttagttcctgcagcagtgcttttcgattctggtgctacacattcattcttatctatgagttttgcgggaaatcatgggatggaagtagaagatcttagacgtcctttgatggttagtaccccaagtaatcaagcactctctttgcaacgtagcccctctgtcagaatagaaattaaaggagtattatttctggccaatcttatcctgttagaatccaaagaccttgatgtcatcctagggatggactggttagccagacataaaggtgtgatagactgtgccaacagaaaagtaactctcaccagtcatgatggtcgagttgtgattgttcatgcattgtcttctgagtctttaaggtcaagactgaaccagataactttggaagagattcctatagtccgggagtatcccgatgtgttcccagatgatttacctggtatgccgcctaaaagggatatagagttcggaatagatttggtacctggaacaactccgatccataagagaccttatagaatggcagccaatgagttggcagaagtcaagaggcaagtagatgatttgcttcagaaaggaaacatcagaccgagttcgtctccatggggagctccggttatttttggtggaaaagaaagatcatacccagaggatcttaaaggtgctactgttttctccaagatagatcttcgatcagggtatcaccagttgagaatcaaagaggaagatatacctaagacagcttttaccactaggtatgggttgtttgaatgtactgttatgtcttttggacttaccaatgcccctgctttcttcatgaacttgatgaataaggtgtttatggaatacctagacaagttcgtggtggtctttattgatgatattcttatctactcccgaactaaagaagagcatgaagaacatcttcgccttgcattagagaagctacgagaacatcaactgtatgctaagtttagcaagtgtgaattttggttgtctgaagtgaagttccttggtcacaaacaaccgaagacagtttcagagatctgcagtttcttaggcctcgcaggatattatcggaggtttatagagaatttttccaagattgctaagcccatgacacgactgcttcagaaagatgtgaagtacaagtggtcggaagaatgtgagcagagttttcaagagttgaagaatcgcttgatatcagctcctattttgattttacctgatccaaagaagggtttccaggacgggaaggtggttgcctatgcatctcgtcagttacgtccgcatgaaaagaactaccctactcatgatcttgaattggccgcagtagttcatgcgttgaaaatttggcgtcattatcttttcggtactcgtacagaggtatataccgatcacaagagtttaaagtatatctttactcagccggatctgaacatgagacaaaggagatggttggaattaattaaggactatgacatgggaatctgtgtccccgataacaaagatttaaaagatgcaattctgaaagaagcccatgataccttatactccattcaccctggtagtacaaaaatgtaccaggatctcaaggaaagattttggtgggcaagtatgaagcgtgaaatcgcagaatacgtagcagtatgtgatgtttgtcagcgagtcaaggcagaacatcagaaacccgccggtttgttgcagcctttgaagattcctgaatggaaatgggaagaaatcggtatggattttatcactggtttacccagaacgtcatcaggccacgactctatttgggtgatagtcgatagacttaccaaagtggctcatttcatcccggtaaagacaacctattccggaagtcggttggcggaattgtatatggcaaggatcgtgtgtttgcatggcgtccctaagaaaatagtgtctgatcgaggcagtcagtttacttcaaatttttggaagaagcttcaggaagagatgggttctaaattgaactttagtactgcttatcatccgcagacagacggacaaaccgaaagggtgaatcagattttggaagatatgttgagagcttgtgctttagatttcggtggaagttgggataagaatctaccttatgcagaattttcgtacaacaacagttatcaagctagtcttcagatggctccttacgaagcactgtatggtcggaagtgccgcactccgcttttgtgggatcgaacgggagaacgtcaggttttcgggacggatatcctaagggaagcagaagaaaaggtgaaaatcattcaagaaagattgcgtgtggcccagtcgcattataagagttatgccgacaatcgccgcagagatttgagttttgaagaaggggattatgtgtatcttcgtgtcacgcctcttcgaggagttcatcgttttcacaccaaaggaaaattggcaccgcgttttgtgggaccttatatgattgtcagtagaagaggagaggttgcttatcagttggagttacctcaatctttggcaggagtccataatgtgttccatgtgtcgcaattgaagaagtgtttaagggtacctaccgaagaagctaatcttgaacagatagaagtccaagaggatctgacctatgttgagaaaccaatccgtatcttggaaacaaatgagagaagaaccaggaatcgagttatccggttttgtaaagtccaatggagtaatcactcggaagaagaatcaacttgggaacgagaagatgaattgaagtcagctcatccgcatctgttcgccagttcttccgaatctcgaggacgagattctgtttaa

SEQ ID NO: 15194 - DNA, 2442 bp, Oryza sativa
  Clone ID: TFbOSC900061j.C1.o6.gm
atggtgaacactcgtagcaacgggaatggccccagtaacaataacaacaacaatggagagaatcccacacttgctcaagttcttgctcaacagactcagttaatgaacatgatgatgcagcaacttcagaaccagcagaaccaaggaaataaccatgcacttccccagaacacgttagcagaatttcttcgtgtgaggccgcctattttttctagtaccacaaatcctgttgaagctggtgattggctgcataccatagagaagaagttggatttgcttcagtgcaccgatcaggagaaggtctcatttgcatcacacaagttgcatggccctgcctctgaatggtgggatcacttccgcctgaataggactaccgctgaacctatcacttggcttgagttcaccgctgctttccggaagacgcatataccatcgggagtggtgtctctcaagaagaaggagttcaggttgctcacccagggatctcgctctgttacggagtatctgcacgagttcaatcgtcttactcgttatgctccggaagatgtgcgcaatgatgaagagcgccaggagaagttcttggaaggacttaatgatgagctttcttacccactcatgactggagattattatgatttccagaagttagtggataaggctattcgccaggaggacaagtacaatcgcatggagcaaaagaaacgccggattgctcaattcaagacacaacaggggaataatcagaagccacgtcttactttaggaccccagtctatgccacagggaggttcttcgtctgttgttcgtccgcagcgtcagttcttcaacaacaatgctggcaacaacatccgcaatcaagctctacgtcctgttgcagtttcgacacagcaacaacctgccaagaaggagcaaggcagcaagcccgtggtgtgtttcaattgtggagacccaggacattacgctgacaagtgtccgaagccccgacgcgtgaaggttgtccctgcccagagcaactctaccgcaccagcatcaaaggcccgtgtcaatcatgttgctgctgcagaagctcaagatgctccagatgtgattttggtgaagttccttggtcacgtcatctcagcgggaggagttgccgttgatcctagtaatgtggaatccgtaaccaactggaaacaaccgaagacagtttcagagattcgcagtttcctaggcctcgcaggatattaccggaggtttatagagaatttttccaagattgctaagcccatgacacgactgcttcagaaagatgtgaagtacaagtggtcagaagaatccttagaagcgaagcccactctaattgatcaagttagagaagcccaaattaatgatcctgatattcaagagatcaagaagaatatgagaagaggaaaagctatcagtttcttggaagatgagcaaggaactgtatggttgggtgaaagaatctgcgtccccgacaacaaagatttaaaagatgcaattctgaaagaagctcatgataccttatactccattcaccctggtagtaccaagatgtaccaggatctcaaggaaagattttggtgggcaatcatcgtcgtcgctcgggaagaccgccatcgtgctcgccaagtcgtcgccgtcctcgtctgccgcttcgccaccgtcggagaccgccggagcatcgtcgccgtcatcaagccgaagagcgccgccatttcaacctcgtcgccgtcgccgtccgttggtcttccgccgtcgctttggtcgccggaaggtgcgctgcggtggattgtgttatgcaaggggtattgtcacaactcctttccgaggtaccgtggtggtattgaggcacatggtgacatgataggcaagcgagtggtgcggcagttggcaagcgtgacgaggggtgtgcagcgagggcagtgcagcagccacggcggccggcgagtgcccgatgagcgcattgagctggcaaccacgatgaggggatcggagcactactacagaaggcctaaatggtgccggttgagaaaccccctaagaaaaacaacacatcaagaacacatccatcaagaatacaacaagaagaatacattcatcaagaaccggatggagaggaggagggcgccactgccttctccaccgccacagacgtctccactgccaccgccgtcgtcggatggagaggaggagggcgccgctgtcttctccaccaccaccactaccactgtcgcgggaagccgctgtcgccacctcccgggctatcggaccaccgccgcctcccctcccatcgccaagccgccacagccacctcccctcccgccagatctggcggaggggagggcgccgccgctgggccatcggaccaccgccgcctccgctcccgccgtcgagccgccgcagagccaccgccgccacctcctctcccgccagatctag

SEQ ID NO: 15195 - DNA, 5127 bp, Oryza sativa
  Clone ID: TFbOSC900076j.C1.o12.fg
atgccgcgctacaagcctgagtacttgtttggtgtcgatggttttgtccaggagttgcgtacgatgtcctttgtcattggatttgagactgcccctttttatgctcagattcgtcatgatcgtcatgaagagaagtgccgagtcaaagtcaccttgaacagtaatagtgaagatattccctcagtgatgttcgaagctggaggaagaaactacatccatgcatgtcaggaggtggcaaggatcgccataggagagctccgtgatcgctacagtgatcagttggccgacactgagtatcgctaccatcctcgccaaccccagggaagtgaccgtggcagctaccttgagactgaaggaattgagaatgatgctaccacaaggcatttggttgagatgctgtgggctatggatgaaagtcgtgcggagactgtgttagcggctcaagatcgtgaagaccggaatcgtggtaagatttgcaagttagaagacaaggtggatcgtttggagaaggaattagctgagttgaagggagaagcaccgccgcagaaggccaggattcgtcttaccgcaaggaagagagctttatttgtccctcgctatcaattggcgccaaagattcgtgtggtggagaaagaagttgccccaactttagcagatcctccggttatcatcataagtgatgatgaagaagaagaatccaagcgcaacaattccaagattgagtggttttccccggtttctcttcttgtgccctgcccatgcctgatggtgaacactcgcagcaacgggaatggccccagtaacaataacaatggagagaatcccactcttgctcaagttcttgctcaacagactcagcttatgaatatgatgatgcagcaacttcagaatcaaggaaataaccatgcatctcctcagaataagttagcagaatttcttcgtgtgaggccgcctattttctctagcaccactaatcctgttgaagctggtgattggttgcatgccatagataagaagttggatttgcttcaatgcactgatcaggagaaggtctcatttgcatcacatcagttgcatggccctgcctctgaatggtgggatcacttccgccttaacaggactactgctgaacctatcacttggcttgaattcaccgctgctttccggaagacgcatataccatcgggagtggtgtctctcaagaagaaggaattcaggtcgctcacccagggatctcgctctgttacggagtatttgcacgagttcaatcgtctggctcgttatgctccagaagatgtgcgcaatgatgaagagcgccaggagaagttcttggaaggacttaatgatgagctttcttacccactcatgactggagattatgctgatttccagaagttggtggataaggctattcgtcaggaggacaaatacaatcgcatggagcagaagaaacgccggattgctcaattcaagacacaacaggggaataatcagaggccgcgtcttactttaggaccccagtctatgccacagggaggttcttcgtctgttgttcgtccgcagcgtcagttcttcaacaacaatgctggcaacaatatccgtaatcaagctccacgccctgttgcagctccaacacagcaacaacctgccaagagggagcaaggcagcaagtccgtggtgtgtttcaactgtggagacccaggacattatgctgataagtgtccgaagccccgacgcgtgaaggcccgtgtcaatcatgttgctgctgcagaagctcaagatgctccagatgtgattttgggtacgttccttgttaactcagttcatgcaacagtgcttttcgattctggtgctacacattcattcttatctatgagttttgcgggaaatcatgggatggaagtagaagatcttagacgtcctttgatggttagtaccccaagtaatcaagcactctctttgcaacgtagcccctctgtcagaatagaaattcaaggaataccatttctggccaatcttatcttgttagaatccaaagaccttgatgtcatcttagggatggactggttagccagatataaaggtgtgatagactgtgctaacagaaaagtaactctcaccagcaatgatggtcgagttgtgactgttcatgcattgtcttctgagactttaaggtcaagactgaaccaaataactttggaagagattcctgtagtccgggagtattccgatgtgttcccagatgatttacctggtatgccgcctaaaagggatatagagttcagaatagatttggtaccaggaacaactccgatccataagagaccttatagaatggcagccaatgagttggcagaagtcaagaggcaagtagacgatttgcttcagaaaggatacatcagaccaagttcatctccatggggagctccggttatttttgtggaaaagaaagatcatacccagaggatgtgtgtggactatcgagccctaaacgatgtgactatcaagaataagtatccgctacctagaattgatgatttgtttgatcagcttaaaggtgctactgttttctccaagatagatcttcgatcagggtatcaccagttgagaatcaaagaggaagatatacctaagacagcatttaccactaggtatgggttgttcgaatgtactgttatgtcttttggacttaccaatgcccctgctttcttcgtgaacttgatgaataaggtgtttatggaatacttagacaagttcgtggtggtctttattgatgatattcttatctattctcgaaccaaagaagagcatgaagaacatctttgccttgcactagagaagctacgagaacatcaactgtatgctaagtttagcaagtgtgaattttggttgtctgaagtgaagttccttggtcacgtcatctcagcaggaggagttgccatcgatcctagtaatgtggaatccgtaaccaactggaagcaaccaaagacagtttcagagattcgcagtttcttaggcctcgcaggatattatcgaaggtttatagagaatttttccaagattgctaagcccatgacacgattacttcgaaaggatgtgaagtacaagtggtcagaagaatgtgagcggagttttcaagagttgaagaatcgcttaatatcagctcctattttgattttacctgatccaaagaagggtttccaagtgtattgcgatgcatccaaacttgggttaggttgtgttctgatgcaaaatgggaaggtggttgcctatgcatctcgtcagttacgtccgcatgagaagaactaccctactcatgatattgagttagccgtagtagttcatgcgttgaaaatttggcgtcattatcttttcggtactcgtacagaggtatataccgatcacaagagtttgaagtatatctttactcagccggatctgaacatgagacaaaggagatggttggaattaattaaggattatgacatgggaattcattatcacccggggaaggctaatgttgtagcagacgctcttagcagaaaaggctattgcaatgctacggaaggacgacagttgccgttggaattatgcaaggaatttgaaagattaaatttgggaattgtcagtagaggtttcgttgcagccctagaagcgaagcccactctaattgatcaagttagagaagcccaaattaatgatcctgatattcaagaaatcaagaagaatatgagaagaggaaaagctattggtttcttggaagatgagcaaggaactgtatggttgggtgagagaatctgtgtccccgacaacaaagatttaaaagatgcaattctgcaagaagctcatgatactttatactccattcaccctggtagtaccaagatgtaccaggatctcaaggaaagattttggtgggcaagtatgaagcgtgaaatcgcagaatacgtagtagtatgtgatgtttgtcagcgagtcaaggcagaacatcagaaacccgccggtttgttgcagcctttgaagattcctgaatggaaatgggaagaaatcggtatggattttatcactggtttgcccagaacgtcatcaggccatgactctatttgggtaatagtcgacagacttaccaaagtggcacatttcattccggtaaagacaacttattctagaagtcgattggcggaattgtatatggcaaggattgtgtgtttgcatggtgtccctaagaagatagtgtctgatcgaggcagtcagtttacttcaaatttttggaagaaacttcaggaagagatgggttctaagctgaactttagtactgcttatcatccgcagacagacggacaaaccgaaagggtgaatcagattttggaagacatgttgagagcttgtgctttagatttcggtggaagttgggataagaatctaccttatgcagaattttcgtacaacaacagttatcaagctagtctacagatggctccttacgaagcactgtatggtcggaagtgccgcactccgcttttgtgggatcaaacgggagaacgtcaggttttcgggacggatatcctaagggaagcagaagaaaaggtgaaaatcattcaagaaagattgcgagtggctcagtctcgacataagagttatgccgacaatcgctgcagagatttgagttttgaagaaggagattatgtgtatcttcgtgtcacgcctcttcgaggtgttcatcgttttcacaccaaaggaaaattggcaccgcgttttgtgggaccttataagattgtcagtagaagaggagaggttgcttatcaattggaattacctcaatccttggcaggagtccataatgtgttccatgtgtcgcaattgaagaagtgtttaagggtacctaccgaagaagctaatcttgaacagatagaagtccaagaggatctgacctatgttgagaaaccaatccgtatcttggaaacgaatgagagaagaaccaggaatcgagttatccgtttttgcaaagtccaatggagtaatcactcggaagaggagtcaacttgggaacgagaagatgaattgaagtcagctcatccacatctgttcgccagttcttccgaatctcgaggacgagattctgtttaa

SEQ ID NO: 15196 - DNA, 5478 bp, Oryza sativa
  Clone ID: TFbOSC900077j.C1.o11.gm
atggctgaccgcgatgaggaacagatattgtacgatacaatcgcggagggaagcagccagtactggaatgaagaagaggggaacgaggatccaaaccagtacttgaacgaggaagggaacatggagtgggatgcggaggggaaccagcaggggcacgtggaaagggatgtggaggggaaccaggaggaggaggctagtggtagtcaaccctccgttggacagaagagggcacgcgggcaacgaggtgcagcgaagaagcttgagggtcggcacatcataacggaagtggaagaagatggacgtcctagtgccccggccgaagccgccaagaactatgtacgtcacagcggttgggttgtgcgggataacatgcctgtcagtacggtgtactggcgaagaacaagggcacgcggagatcatgagagctttgtcccagattcggagaaagagatgctgtggaccacaatgctcgagacattcacccttcctgcgggtacagaggacaaagtgaaaaggtggattctgaagaaaatggcagaacagtttcagagcttcaagggagatctgtaccagaagtatatactgaaggggcagacaccgaacttcgacacattcccaaagctaagggatcactgggacgagttcgttgcatataagacaagtgaacaagggcaggcgatgatggaaagaaacaaagaaaatgccgccaagaagaagtaccatcaccacttggggtcaggaggctatagcgtcgcgatgccgaagtgggagcagatggaggctaccttgattgagaggggtatcgaaccggcaacagccaattggccggaacgatcgaagttctggtactatgctcacggtggaacgctcaacccagctgatggctcactggtcttcggcgatcagatacgagaggttgcgcgacgactaacagatgcagtggaagcctcctctcagagcacgttccgaccagacagagatagggacgagctgacactcgccctgcagactccagagcatccaggacgaacacgagggaaaggggtgattccttggaagattggtttcaaggaggacatccacacgtacaggagtcggatgaggagcaagagagataccgaggcgaagattgcagacctagagttccgggtatcgagctacgaactcaacatgcaagacgaggtggcaaggaaggttgatgaacgcatggccgcacatcggtcccatgatccccagccgaccattcctcctgcaatgccgtgcgccgccgccgtctcggtcgtcgtcatcgctcgggaaggccaccgtcgtgatcgccaagtcaccgccgttctcgtccgctccttcgccgccgccgaagaccgccggaacaccgtcgccgccgtcgacccgaagtttgccgccgcttcctcctcgtcgccgtcgccgtccgttgatcttccgccgctcttttggtcaccgatgccgcgctacaagcctgagtacttgtttggtgttgagggatttgtccaggagttgcgtacgatgtcctttgtcattggatttgggactgcccctttttatgcccagattcctcatgatcgtcacgaagagaagtgccgagtcaaagtcaccttgaacagtaatagtgaagatatcccctcagtgatgttcgaagctggaggaagaaactacatccatgcatgtcaggaggtggcaagaatcgccataggagagctccgtgatcgctacagtgatcagttggccgacactgagtatcgctatcatcctcgccaaccacagggaagtgaccgtggcagttaccttgagactgaaggaatcgagaatgatgctaccacaaggcatttggttgaaatgctgtgggctgtggatgaaactcgtgcagagactgtgttagcagctcaagatcgtgaagatcagaatcgtggtaagatttgcaagttaaaggacaaggtggatcgtttggagaaggaactagccgcattaaagggagaagcatcgccgcagaaggccaggattcgtcttaccgcaaggaagagagctctatttgtccctcgctatcaattggcgccaaatgttcgtgtggtggagaaagaagttgccccagcagatcctccggtcatcatcataagtgatgatgaagaagaagaatccaagcgcaatcattccaagattgagtgggtagcaactcaagatgatgaaaatgagccgaacgagccttcaatcgacctccgatgctcggaagaactagacaacgggaatggccccaataacaataacaatgaagggaacccaactcttgctcaagttctgtctcaacagactcagcttatgaacatgatgatgcagcaactccagaaccagcagaaccaaggaaataaccatgcacctccccataacaagttagcagaatttcttcgtgtgaggccgcctattttctctagtaccactaatactgttgaagctggtgattggttgcatgccatagagaagaagttggatttgcttcattgcactgatcaggagaaggtctcatttgcatcacaccagttgcatggccctgcctctgaatggtgggatcacttccgcctgaataggactactgctgaacctatcacttggcttgaattcaccgctgcttttcggaagacgcatataccatcgggagtggtgtctctcaagaagaaggaattcaggtcgctcacccagggatctcactctgttacggagtatctgcacgagttcaatcgtctggctcgttatgctccggaagatgtgcgcaatgatgaagagcgtcaggagaagttcttggaaggacttaatgatgagctttcttacccactcatgactggagattattctgatctccagaagttagtggataaggctattcgtcaggaggacaaatacaaccgcatggagcagaagaaacgccggattgctcaattcaagacacaacaggggaataatcagaagccgcgtcttactttagaaccccagtccatgccacagggaggttcttcgtcggttgttcgtccgcagcgtcagttcttcaacaacaatgctggcaacaacatccgcaatcaagctccacgtcctgttgcagctccagcacagcaacaacctgccaagagggagcaaggcagcaagcccgtggtgtgtttcaactgtggagacccaggacattatgctgacaagtgtccgaagccccgacgtgtgaaggttgtccctgcccagagcaactctaccgtaccagcatcaaaggcccgtgtcaatcatgttgctgctgcagaagctcaagatgctccagatgtgattttggtccggaagtatcccgatgtgttccctgatgatttgcctgccaatgagttggcagaagtcaagaggcaagtagatgatttgcttcagaaaggatacatcagaccgagttcatctccatggggagctccggttatttttgtggaaaagaaagatcatacccagaggatagctctagcgccgtgcaacctagcgccgctgtcgccgccgtcgctccagccgtgcgccgccgccgtctcggtcgtcgtcatcgctcgggaaggccaccgtcgtgatcgccaagtcgccgccattctcgtctgctccttcgccgcgaccgaagaccgccggaacgccgtcgccgctgtcgacccgaagtttgccgccgcttcctcctcgtcgccgtcgccgtccgttgatcttccgccgctcttttggtcaccggtggcgtcgggcatggccatcccaacggacccttcaggtacttaccactgcaggccgattccagcaggatactcgaaggtcgaagttgagttggtcgaaggcgcgtacgaggacctcgagctggattaccctggaggagacggcggtacatcatcctccctgggcgacaagcggcgtcttgtgcaccatctcctccggctccgccatctcctcctcaggatcctgcaccgtctcctcctcatgctccaccagcaccgtctccacctcaggctccagcatcgactcctcctcaggatcctgcaccgactcctcctcgtgctcctacacctactcccccgcaagctcctcttccggcaccttcaaaaagtcaagagacaattcaagcctcgaagtccagaaaagaagattcctatagaccccagtgtcaggaacttcttcaggggtatgtctgcatctgccaaggaggccatcaagctatcggactatgagcgaacgctaaagaaagcatcttctggaaagtccaaaccagtccctcaacttggagagcaaccaaaccaggagatcgagccattggtgaccggtaaagaaatgacgatagaacaatttattactgacaccggtctaactacgtatcaattgctaggagtcgcaccaatcgaaaaggcggaagtgaaatacatgtacgaactcggtaaaccgcttgtcaagcctgagctactgcagtccctacccacacaaatgtacaagttccgtcagctgtacatggagatgagcgccaccggtagagagatgatcggagcgaggatcagggacacggacttcttgcaaggagatgacattctctggatcaatttcaggggaatctacgaactataccagctggacgccctcgacgtctctattatgagttgctggattttaatggagattcaaagggcccgacggcggagggttttcgatactggattcatcgaccctcggaaagtaaacgtcgcaatgctcgaccaatatccacaagaaacagaggacaatctcgtccatctcttgaaggcgcagcattacaagacgttcatactgttgccatacaacacagaattccactgggtgcttttactcttcgacctggaggcctgcaccgtcaacgacgatatcacgatggactttgtcaagggattaccgtctgtccgcggcaaatcagtcatcctcaccatcgtcaatctactgtcgaaatacgtccacttcattccgttgggctacccatacacaatgatatcggtggcgcaggcgttctttatcgaggtggtcaggctacattacatccccaattcaatcgtcgttgcccacgatccggtgaccaggagcatgttctggccagagctctttcacttggcaagggtaaagctgaatctcagctcagcctttcacccccagagcggcggccaattggaggcagctaaccacgtcatcggggaacgtctcctccaagctcgggactactcaaagctatactgtaacgacagtcatcgcgacatggtcttcagcgtgggcgattctccagccggcgcacgcattcacagcgtgttcatcgttgttgtgtcaaagtcgttccatggtgcaccactggcgtccactatggccttgctagcaatcaccgatggtcttgtgttactggtgccggccaaagcatatccgtggtcgtgtggccctaggtgctcgggaactgctgatttagtgtga

SEQ ID NO: 15197 - DNA, 4365 bp, Oryza sativa
  Clone ID: TFbOSC900086j.C1.o14.fg
atgtcggtttggggagggagggaaaccgaccttggtggcggtcaaggagagcgagctggcgctcctggtttggaatggtacattcctggtttggagatagaactgtgcagccgggatggttgttcagaatggttgggcctatacaacaggatgccgcgttacaagcctgagtacctgtttggtgttgagggttttgtccaggagttgcgtacgatgtcctttgtcattggattcgggactgcccctttttatgcccagattcctcatgatcgtcatgaagaaaagtgccgagtcaaagtcactttgaacagtaatagtgaagatatcccctcagtgatgtttgaagctggaggaagaaattacatccatgcatgtcaggaggtggcaaggatcgccataggagagctccgtgatcgctacagtgatcaattggccgacactgagtatcgttaccatcctcgtcaaccacagggaagtgaccgtggcagttatcttgagactgaaggaattgagaatgatgctaccacaaggcatttggttgagatgctgtgggctatggatgaaagtcgtgcggagactgtactagcagctcaagatcgtgaagaccggaatcgtggtaagatttgcaagttagaagacaaggtggatcgtttggagaaggaattagccgcattgaagggagaagcaccgccgcagaaggccaggattcgtcttaccgcaaggaagagagctttatttgtccctcgctatcaactggcgccaaagatggtgaacactcgcagcaatgggaatggtcccaacaaccccaataacaacaacaatggagagaatcccactctggcccaagttcttgctcaacagacacagcttatgaacatgatgatgcagcaatttcagaatcagcaaaaccaaggaaataatcatgcacctccccagaacaagttagcagaatttcttcgtgtgaggccgcctgttttctctagtaccactaatcctgttgaagctagtgattggctgcatgccatagagaagaagttggatttgcttcagtgtactgatcaggagaaggtctcatttgcatcacatcagttgcatggccctgcctctgaatggtgggatcacttccgcctgaataggattactgctgaacctatcacttggcttgaattcaccgctgctttccggaagacgcatataccatcaggagtagtgtctctcgagaagaaggagttcagcgccaggagaagttttttgggaggacttaatgatgagctttcttacccactcatggttggagattatcctgatttccagaaattagtggataaggctatacgtcaggaggacaagtacaattgcatggagcagaggaaacgtcggattgctcacttcaaggcacaacaggggagtaatcagaagccgcgtcttactttaggaccccagcccatgtcacagggaggttcttcgtctgttgttcgtccgcagcgtcagttcttcaacaacaatgctggcaacaacatccgtaatcaagctccacgtcctgttgcagctccagtacagcaacaacctgccaagagggagcaaggcagcaagcccgtggtgtgtttcaactgtggagacccaggacattatgctgacaagtgtccgaagccccgtcgcgtgaaggttgtccctgcccagagtaactctgctgtaccagcatcaaaggcccgtgtcaatcatgtcgctgctgcagaagctcaagatgctccagatgtgattttgggtacgttccttgttaactcagttcctgcaacagtgcttttcgattctggtgctacacattcattcttatctatgagttttgcgggaaatcatgggatggaagtggaagatcttagacgtcctttgatggttagtaccccaagtaatcaagcactctctttgcaacgtagcccctctgtcagaatagaaattaaaggagtaccatttctggccaatcttatcttgttagaatccaaagaccttgatgtcatcctagggatggactggttagccagacataaagatgatttacctggtatgccgcctaaaagggatatagagttcagaatagatttggtacctggaacaactccgatccataagagaccttatcgaatggcagccaatgagttggcagaagttaagaggcaagtagatgatttgctacagaaaggatacatcagaccgagttcatcaccatggggagctccggttatttttgtggaaaagaaagaccatactcagagaatgtgtgtggactatcgtgcactaaacgatgtgactattaagaataagtatccactacccaggattgatgatttgtttgatcaactgaaaggtgccactgttttctccaagatagatcttcgatcagggtatcatcagttgagaatcaaagaggaggatatacctaagacagcttttaccactaggtatgggttgttcgaaggttgtgttctgatgcaagatgggaaggtggttgcctatgcatctcgacagttacgtccgcatgaaaagaactaccctactcatgatcttgagttagctgcagtagttcatgcgttgaagatttggcgtcattatcttttcggtactcgtacagaggtatataccgatcacaagagtttaaagtatatctttactcagccggatctgaacatgagacaacggagatggttggaattaattaaggattatgacatgggaattcattatcatccgggaaaggctaatgttgtagcagacgctcttagcagaaaaggctattgcaatgctacaaaaggacgacagttgccattggaattatgcaaggaatttgaaagattaaatttgggaattgtcggtagaggtttcgttgcagccttagaagcgaagcccactctaattgatcaagttagagaagcccaaattaatgatcctgatattcaagagatcaagaagaatatgagaagaggaaaagctattggtttcttggaggatgagcaaggaactgtatggttgggtgaaagaatttgtgtccctgacaacaaagatttgaaagatgcaattctgaaagaagctcatgatactttatactccattcaccctggtagtactaagatgtaccaggatctcaaggaaagattttggtgggcaagtatgaagcgtgaaatcgcagaatatgtagcagtatgtgatgtttgtcagcgagtcaaggcagaacatcagaaacccgccggtttgttgcagcctttgaagattcctgaatggaaatgggaagaaataggtatggattttatcactggtttacccagaacgtcatcaggccatgattctatttgggtgatagtcgacagacttaccaaagtggctcattttattccggtaaagacaacctattccggaagtcgcttggcggaattgtatatggcaaggattgtgtgtttgcatggcgtccctaagaagatagtgtctgatcgaggcagtcagtttacttcaaatttttggaagaaacttcaggaagagatgggttctaagctgaactttagcactgcttatcatccgcagacagacggacaaaccgaaagggtgaatcagattttggaagacatgttgagagcttgtgctctagatttcggtggaagttgggataagaatctaccttatgcagaattttcatacaacaacagttatcaagctagtcttcagatggctccttacgaagcactgtatggtcggaagtgtcgcactccacttttgtgggatcaaacgggagaacgtcaggttttcgggatggatatcctaagggaagcagaagaaaaggtaaagatcattcaagaaagattgcgtgtggctcagtctcgtcataagagttatgccgacaatcgccgtagggatttgagttttgaagaaggagattatgtgtatcttcgtgtcacgccttttcgaggagttcatcgttttcataccaagggaaaattggcaccgcgttttgtgggaccttataagattgtcagtagaagaggagaggtcgcttatcagttggagttacctcaatctttggcaggagtccataatgtgttccatgtttcgcaattgaaaaagtgtttaagggtacctaccgaagaagctaatcttgaccagatagaagtccaagaggatctgacctatgttgaaaaaccaatccgtatcctggaaacaagtgagagaagaaccaggaatcgagttatccgtttttgcaaagtccagtggagtaatcactcggaagaagaatcaacttgggaacgagaagatgaattgaagtcagctcatccgcacctgttcgccagttcttccgaatctcgaggacgagattctgtttaa

SEQ ID NO: 15198 - DNA, 3141 bp, Oryza sativa
  Clone ID: TFbOSC900094j.C1.o9.gm
atgccgcgttacaagcctgagtacctgtttggtgttgagggttttgtccaggagttgcgtacgatgtcctttgtcattggatttgggactgcccctttttatgcccagattcctcatgatcgtcatgaagagaagtgccgagtcaaagtcaccttgaacagtaatagtgaagatatcccctcagtgatgttcgaagctggaggaagaaactacatccatgcatgtcaggaggtggcaaggatcgccataggagagctccgtgatcgctacagtgatcaattggccgacactgagtatcgctaccatcctcgccaaccccagggaagtgaccgtggcagttaccttgagactgaaggaattgagaatgatgctaccacgaagcatttggttgagatgctgtgggctatggatgaaagtcgtgcggagattgtgttagccgctcaagatcgtgaagaccggaatcgtggtaagatttgcaagttagaagacaaggtggatcgtttggaaaaggaattagccgcattaaagggagaagcaccgccgcagaaggccaggattcgtcttaccgcaaggaagagagctctatttgtccctcgctatcaactggcgccaaaggttcgtgtggtggagaaagaagttgccccagctcaagcggatcctccggtcatcatcataagtgatgaagaagaagaatccaagcgcaaccattccaagattgagtgggtagcaacccaagatgatgaagacgagccgaacgagccttcaattgacctccgatgcttggaagaactagataccactaatcctgttgaagctagtgattggctgcatgccatagagaagaagttggatttgcttcagtgtactgatcaggagaaggtctcatttgcatcacatcagttgcatggccttgcctctgaatggtgggatcacttccgcctgaataggattactgctgaacctatcacttggcttgaattcaccgctgctttccggaagacgcatataccatcaggagtagtgtctctcaagaagaaggagttcaggtcgcttactcagggatctcgctctgttacggagtatctgcacgagttcaatcgtcttgctcgttatgctccggaagatgtgcgcaatgatgaagagcgccaggagaagtttttgggaggacttaatgatgagctttcttacccactcatggttggagattatcctgatttccagaaattagtggataaggctattcgtcaggaggacaagtacaatcgcatggagcagaagaaacgtcggattgctcaattcaagacacaacagggaaataatcagaagccgcgtcttactttaggaccccagcccatgccacatggaggttcttcgtctgttgttcgtccgcagcgtcagttcttcaacaacaatgctggcaacaacatccgtaatcaagctccacgtcctgttgcagctccagcacagcaacaacctgccaagagggagcaaggcagcaagcccgtggtgtgtttcaactgtggagatccaggacattatgctgacaagtgtccgaagccccgacgcgtgaaggttgtccctgtccagaataactctgctgtaccagcatccaaggctcgtgtaaatcatgtcgctgctgcagaagctcaagatgctccagatgtgattttggtccgggagtatcctgatgtgttcccagatgatttacctgccaatgagttggcagaagttaagaggcaagtagatgatttgctacagaaaggatacatcagaccgagttcatcaccatggggagctccggttatttttgtggaaaagaaagaccatactcagagaatgtgtgtggactatcgtgcactaaacgatgtgactatcaagaataagtatctactacccaggattgatgatttgtttgatcagctcaaaggtgccactgttttctccaagatagatcttcgatcagggtatcatcagttgagaatcaaagaggaagatatacctaagacagcttttaccactaggtatgggttgttcgaatgtactgttatgtcttttggacttaccaatgcccctgctttcttcatgaacttgatgaataaggtgtttatggaatacctagacaagttcgtggtggtctttattgatgatattcttatctactctcgaaccaaagaagagcatgaggaacatcttcgccttgcattggagaagctacgagaacatcaactgtatgctaagtttagcaagtgtgaattttggttgtctgaagtgaaattccatggtcacgtcatctcagccggaggagttgccgtcgatcctagtaacgtggaatccgtaaccaattggaagcaaccaaagacagtttcagagattcgcagtttcctaggcctcgcaggatattaccggaggtttatagagaatttttccaagattgctaagcccatgacacgactgcttcagaaagatgtaaagtacaagtggtcagaagaatccttagaagcgaagcccactctaattgatcaagttagagaagcccaaattaatgatcctgatattcaagagatcaagaagaatatgagaagaggaaaagctattggtttcttggaagatgagcaaggaactgtatggttgggtgagagaatctgtgtccccgacaacaaagatctaaaagatgcagttctgaaagaagctcatgatactttatactccattcaccctgcgccgtgtgccctagcttcgccgtcgccgccgccgctccagccgtgcgccgccgtcgtttcagccgtcgccatcgctcgggaagaccaccgtcgtgctcgccaagtcgtcgccgtcctcgtccgccccttcgccgtcgccggagatcaccggagcagcttcgccgtcgtcgacccgaaggttcccgccgcttcctcctcgtcgccgtcgccgtccgttggtcttccgccgccgtttaggtcaccgtgccgccgttcgccggcgagcgtgcgccgcccgagccgtctgctccgccgagccgccgccgctgtcggtgacgtcaccgctgacgtcatcggggtcgtccgccgtgagccggtcgtggaccgttcgatctcggccgtccgttttggatggatcgatctcggccgtccgttcgcgtga

SEQ ID NO: 15199 - DNA, 4605 bp, Oryza sativa
  Clone ID: TFbOSC900137j.C1.o1.fg
atgtcctttgtcataggatttgggactgcccctttttatgcccagattcctcatgatcgtcatgaagagaagtgccgagtcaaagtcaccttgaacagtaatagtgaagatatcccctcagtgatgttcgaagctggaggaagaaactacatccatgcatgtcaggagggaagtgaccgtggcagctaccttgagactgagggaattgagaatgatgctaccacaaggcatttggttgagatgctgtgggctatggatgaaacccgtgcagagactgtgttagcggctcaagatcgtgaagatcggaatcgtggtaagatttgcaagctagaagacaaggtggatcgtttggagaaggaattagccgcattaaagggagaagcaccgccgcagaaggccaggattcgtctcaccgcaaggaagagagctctatttgtccctcgctaccaattggcgccaaaggtccgtgtggtggagaaagaagttaccccagccctagcggatcctccggtcgtcaatatggtgaatactcgcagcaacgggaatggccccaacaacaacaatggagagaatcctacacttgcccaagttctggctcaacagactcagttaatgaacatgatgatgcagcaacttcagaaccagcagaaccaaggaaataactatgcacctcctcagaataagttagcagaatttcttcgtgtaaggccgcctactttctctagcaccactaatcctgttgaagctggtgattggctgcatgccatagagaagaagttggatttgcttcaatgcactgatcaggagaaggtctcatttgcatcccatcagttgcatggccctgccactgaatggtgggatcacttccgtctgaacaggactactgctgaacctatcacttggcttgagttcaccgctgctttccggaagacgcatataccatcgggagtggtgtctctcaagaagaaggaattcaggtcgctcactcaggggtctcgctctattacggagtatctgcacgagttcaatcgtctgactcgttatgctccggaagatgtgcgcaatgatgaagagcgtcaggagaagttcttggaaggacttaatgatgagctttcttacccactcatgactggggattatcctgattttcagaagttagtggataaggctattcgtcaggaagacaaatacaatcgcatggagcagaagaaacgtcggatcgctcaattcaagacacaacaggggaataatcaaaggccacgtcttactttaggaccccagtccatgccacagggaggttcttcgtctattgttcgtccgcagcgtcagttcttcaacaacaatgctggcaacaacatccgcaatcaagctccacgtcctgttgcagcttcgacacagcaacagcctgccaagagggagcaaggcagcaagcccgtggtgtgtttcaactgtggagacccaggacattatgctgacaagtgtccgaagccccgacgcatgaaggttgtccctacccggagcaactctaccgtaccagcatcaaaggcccgtgtcaatcatgttgctgctgcagaagctcaagatgctccagatgtgattttgggtacgttccttgttaacttagttcctgcaacaatgcttttcgattctggtgctacacattcattcttatctatgagttttgcaggaaatcatgggatggaagtaaaagatcttagacgtcctttgatggttagtaccccaagtaatcaagcactctctttgcaacgtagcccctctgtcagaatagaaattcaaggagtaccatttctggccaatcttatcctgttagaatccaaagaccttgatgtcatcccagggatggattggttagccagacataaaggtgtgatagactgtgctaacagaaaagtaactctcaccagcaatgatggtcgagttgtaactgttcatgcattgtctcctgagtctttaaggtcaagactgaaccaaatcactttggaagagattcctgtagtccgggagtattccgatgtgttcccagatgatttacctggtatgccgcctaaaagggatatagagttcagaatagatttggtacgaggaacaactccgatccataagagaccttatagaatggcagccaatgagttggcagaagtcaaaaggcaagtagatgatttgcttcagagaggatacatcagaccgagttcatcaccatggggagctccagttattttcgtggaaaagaaagatcatacccagaggatgtgtgtggactatcgtgcactaaatgatgtgactatcaagaataagtatccgctgcccaggattgatgatttgtttgatcagcttaaaggtgccactgttttctccaagatagatcttcgatcagggtatcaccagttgagaatcaaagaggaagatatacctaagacagcttttaccactaggtatgggttgttcgaatgtactgttatgtcttttggacttaccaatgcccccgctttcttcatgaacttgatgaataaggtgtttatggaatacctagacaagttcgtggtggtctttattgatgatattcttatctattcccgaaccaaagaagagcatgaagaacatcttcgccttgcattggagaagctacgagaacatcagttgtatgctaagtttagcaagtgtgaattttggttgtctgaagtgaagtttcttggtcacgtcatctcagccggaggagttgccatcgatcctagtaatgtggaatccgtaaccaactggaaacaaccaaagacagtttcagagattcacagtttcttaggcctcgcaggatattatcggaggtttatagagaatttttccaagattgctaagcccatgacacgattgcttcagaaagatgtgaagtacaagtggtcagaagaatgtgagcagagttttcaagagttgaagaatcacttgatatcagctcctattttgattttgcctgatccaaagaagggtttccaagtatattgcgatgcatccaaacttgggttaggttgtgttctgatgcaagatgggaaggtggttgcctatgcatctcgtcagttacgtccgcatgagaagaactaccctactcatgatcttgagttagctgcagtagttcatgcgttgaaaatttggcgtcattatcttttcggtactcgtacagaggtatataccgatcacaagagtttaaagtatatctttactcagccggatctgaacatgagacaaaggagatggttggaattaattaaggattatgacatgggaattcattatcacccgggaaaggctaatgttgtagcagacgctcttagcaggaaaggctattgcaatgctacggaaggacgacagttgccattggaattatgcaaggaatttgaaagattaaatttgggaattgtcagtagaggtttcgtggcagccttagaagtgaagtccactctaattgatcatgttagagaagcccaaattaatgatcctgatattcaagaaatcaagaagaatatgagaagaggaaaagctattggtttcttggaagatgagcaaggaactcgagtcaaggcagaacaccagaaacccgccggtttgttgcagcctttgaagattcctgaatggaaatgggaagaaatcggtatggattttatcactggtttacccagaacgtcatcaggtcatgactctatttgggtgatagtcgacagacttaccaaagtggctcatttcatcccagtaaagacaacctattctggaagtcggttagcggaattgtatatggccaggattacagacggacaaaccgaaagggtaaatcagattttggaagacatgttgagagcttgtgctttagatttcggtggaagttgggataagaatctaccttatgcagaattttcgtataacaacagttatcaagctagtcttcagatggctccttacgaagcactgtatggtcggaagtgccgcactccgcttttgtgggatcaaacgggagaacgtcaggttttcgggacggatatcctaagggaagcagaagaaaaggtgaaaatcattcaagaaagattgcgagtggctcagtatcgacataagagttatgccgacaatcgccgcagagatttgagttttgaagaaggagattatgtgtatcttcgtgtcacgccttttcgaggggttcatcgttttcataccaaaggaaaattggcaccacgttttgtgggaccttataagattgtcagtagaagaggagaggttgcttatcagttggaattacctcaatctttggcaggagtccataatgtgttccatgtgtcgcaactgaaaaagtgtttaagggtacctaccgaagaagctaatcttgaacagatagaagtccaagaggatctgacctatgttgagaaaccaatccgtattttggaaatagatgagagaagaaccagaaatcgagttatccgtttttgcaaagtccaatggagtaatcactcggaagaagaatcaacttgggaacgagaagatgaattgaagtcagctcatccgcatctgttcgccagttcttccgaatctcgaggacgagattctgtttaa

SEQ ID NO: 15200 - DNA, 1716 bp, Oryza sativa
  Clone ID: TFbOSC900177j.C1.o14.gm
atgatgatgcagcaactccagaaccagcagaaccagggaaataaccatgcacctccccagaacaagttagcagaatttcttcgtgtgaggccgcctattttctctagtaccactaatcctgttgaagctggtgattggttgcacgccatagaaaagaagttggatttgcttcagtgcactgatcaggagaaggtctcatttgcatcacaccagctgcatggccctgcctctgaatggtgggatcactcccgccttaataggattactgctgaacctatcacttggcttgagttcaccgctgctttccggaagacgcatataccatcgggagtggtgtctctcaagaagaaggaattcaggtcgctcacccagggatctcgctctgttaccgagtatctgcacgagttcaatcgtctggctcgttatgctctggaagatgtacgcactgatgaagagcgccaggagaagttcttggaaggacttaatgatgagctttcttatccactcatgactggggattatcctgatttccagaagttagtagataaggctattcgccaggaggacaagtacaatcgcatggaacagaagaaacgccggattgctcaattcaagacacaacaggggaataatcagaggccgcgtcttactttaggaccccagtccatgccacagggaggttcttcgtctgttgttcgtccgcagcgtcagttcttcaacaacaatgctggcaacaacatccgcaatcaagctccacgccctgttgcagctccaacacagcaacagcctgccaagagggagcaaggcagcaagcccgtagtgtgtttcaactgtggagacccaggacattatgctgacaagtgtccgaagccccgacgcgtgaaggctgtccctgcccagagcaactctaccgcaccagcgccaaaggcccgtgtcaatcatgttgctgctacagaagctcaagtccgggagtatcctgatgtgttcccagacgatttacctgaaaggatacatcagaccgagttcatctccatggggagctccagtaatttttgtggaaaagaaagaccatacccagaggatcttaaaggtgccaccgttttctccaagatagatcttcgatcagggtatcatcagttgagaatcaaagaggaagatatacctaagacagcttttaccactagcctcgcgccgccgttgtcgccgccgctccagccgtgctccgccgtcgctccagtcgtcgccgtcgctcggggaggtcgccatcgtggtcgccgtcgcgtcgccgtcctcgtccgccccttcgccgtcgctgaagaccgccggagcatcgtcgccgtcgtcaagccgaaggtcgacgccgcttcttcctcgacgccgtcgccgtccgttgatcttccgccgccgttttggtcgctggtgagttcgccgcgtcgccctctacgtcctggtgccctccgttcgcgccgccgcgccatcgttcgccggcgagcttgtgctcccgagccgccgcaggtggtgacgtcaccgctgacgtcatcgtcgtcgtctctcgtggtccggccgtggatcggagaagagtttgaagagttccaagggggtgattatgatccaggaaaggtgcgctgtagtggattgtgttgtgcaaggggtattgtcacagctcctttccgagaggaagagttctacagtgaagctgatggtgtggaggattag

SEQ ID NO: 15201 - DNA, 3738 bp, Oryza sativa
  Clone ID: TFbOSC900195j.C1.o4.gm
atggcgcagacgtgccagccctgcaccagctcgcttgctagcgcgcacgccgtgcgggctggcgcattaacacccccgtccaaaacggaaagagaaatattggttaaagacaagtttgcccatgggcccacttgtcaatccctctttctctctctctttctctgctcatcttcctcccgcgtccccggggtgtggcgctgcgacgaggcgtggaagctgtacgaggctgaggacgagaacgacccgttcgacgtcatacactcggagagcgtgccgtgttccaccgctgggacctcacccggcccgcggcgacgacgagcgcatgtcgccggcgtccaaccacaacctggcccagtcggtgaactggtgctgtctgaggtgcgcttcttccggagctatgcgcaccacgtggccatcagcgacgtcgcgagggagatgttgcgcgacatgtaccagatccccaaccgcgtgcacgtcatcctcaacagcgtcgacgaggcgcagttcgagcccgacggcgctgggccgcgcgttccgggaggacctcacgctgctcaagggcgccaacctggtgctcgcgccctagcgtcgtgtgcccttgcgccgccgtcgccgccgtcgctccagccgtgcgccgccgccgttccagacgtcgccgtcgctcgggaagaccgtcgtcgtggtcgccaagtcgtcgccgtcctcgtccgccccttcgccgtcgctgtagaccgccggagcaccgtcgccgtcgtcaagccgaagagcgccgccgcttcttcttcgtcgccgtcgccgttcgttcctcttccgccgtcgctttggtcgccgatgcggcgttacaagcctgagtacttgtttggtgttgagggatttatccaggagttgcgtacgatgtcctttgtcattggatttgggactgcccctttttatgcccagattcctcatgatcgtcacgaagagaagtgccgagtcaaagtcaccttgaacagtaatagtgaagatatcccctcagtgatgttcgaagctggaggaagaaactacatccatgcatgtcaggaggtggcaaggatcgccataagagagctccgcgatcgctacagtgatcagttggccgacactgagtatcgctaccatcctcgccaatcccaaggaagtgaccgtggcagctaccttgagactgaaggaattgagaatgatgctaccacaaggcatttggttgagatgctgtgggctatggatgaaagtcgtgcggagactgtgttagcggctcaagatcgtgaagaccggaatcgtggtaagatttgcaagctagaagacaaagtggatcgtttggagaaggagctagctacgttgaagggagaagcaccgccgcagaaggccaggattcgtcttaccgcaaggaagagagctctatttgtccctcgctaccaattggcgccaaaggtccgtgtggtggagaaagaagttgccccaaccctagcagatcctccggtcatcatcataagtgatgatgaagaagaagaatccaagcgcaaccattccaagattgagtgggtagctacccaagatgatgaagacgagccgaacgagccttcaatcgacctccgatgctcggaagaactagagactactgctgaacctatcacttggcttgagtttaccgttgctttccggaagacgcatataccatcgggagtggtgtctctcaagaagaaggagttcaggtcgctcacccagggatctcgctctgttacggagtatctgcacgagttcaatcgtctggctcgttatgctccggaagataagttagtggataaggctattcgtcaggaagacaagtacaaccgcatggagcagaagaaacgtcggattgctcaattcaagacacaacaggggaataatcagaagccgcgtcttactttaggaccccagtccatgccacagggaggttctttgtctgttgttcgtccgcagcgccagttcttcaacaacaatgctggcaacaacatccgcaatcaagctccacgtcctgttgcagcctcgacacagcaacaacctgccaagagggagcacggaagtaagcccgtggtgtgtttcaactgtggagacccaggacattacgctgacaagtgtccgaagccccgacgtgtgaaggttgtccctacccagagcaactctaccgtaccagcgtcaaaggctcgtgtcaatcatgtcgctgctgcagaagctcaagatgctccagatgtgattttggtccgggagtatcccgatgtgttcccagatgatttacctgccaatgagttggcagaagtcaagaggcaagtagacgatttgcttcagaaaggatacatcagaccgagttcatcaccatggggagctccagttatttttgtggaaaagaaagaccatacccagaggatgtgtgtggactatcgtgccctaaatgatgtgactatcaagaataagtatctgctacccagaattgatgatttgtttgatcagcttaaaggtgccactgttttctccaagatagatcttcgatcaggatatcaccagttgagaatcaaagaggaagatatacctaagacagcttttaccactaggtatggattgttcaaatgtactgttatgtcttttggacttaccaatgcccctgctttcttcatgaacttgatgaataaggtgtttatggaatacctagacaagttcgtggtggtctttattgatgatattcttatctactcccgaaccaaagaagagcatgaagaacatcttcgccttgcattagagaagctacgagaacatcaactgtatgctaagtttagcaagtgtgaattttggttgtctgaagtgaagttccttggtcacgtcatctcagccggaggagttgccgtcgatcctagtaatgtggaatccgtaaccaactggaagcaaccaaagacagtttcagagattcgcagtttcctaggcctcgcagctttagaagcgaagcccactctaattgatcaagttagagaagcccaaattaatgatcctgatattcaagagatcaagaagaatatgagaagaggaaaagctattggtttcttggaggatgagcaaggaactgtatggttaggtgagagaagctgtgtccccgacaacaaagatttaaaggatgcaattctgaaagaagctcatgatactttatactccattcaccctggtagtactaagatgtaccaggatctcaaggaaagattttggtgggcaaccgtcgccgttgctcgggaaggacgtcatcgtggtcgccaagtcgtcgccgtcctcgtccgtcccttcgccgtcgccggagatcgccggagcatcgtcgccgtcgtcaacccgaaggtttccgccgtttcctcctcgtcgccgtcgtcgtccgttgttcttccgccgccgttttggtcaccggtgtgttcgccgcgtcgtcctctacgtgctggtgtcctccgtttgcgtccttgtgccgccgttcgccggcgagcgtgcgccgcccgagccgttcgctctgccgagccgccgccgctgtcggtgacgtcaccgctgaagtcatcggggtcgtccgccggggcgattacgatccaggaaggtgcgctgcagtggattgtgttatgcgaggggtattgtcacaactcctttccgaggtaccgtggtggtattgaggcacatgaggaagagttctacaatgaggctgatggtgtggaggattag

SEQ ID NO: 15202 - DNA, 5577 bp, Oryza sativa
  Clone ID: TFbOSC900231j.C1.o16.fg
atgccgcatcccagcctccaccacgcttccctgaaccatcgccgaaaccctgctctcaccgctagcctgagccaccactgcctcctaccgctccagccgcgcatagccgcctgtccggtcgaccccgtggtgctctgtcgccctcctcgataccgcggccattgtccgcagcccgtccacccctccatcttcgcgaatcgccgccgaaaatccctcccctctgctcaagctcccttccataccttccccatgtcctaccagtcctcggccgcgctgcggtcttcaccgggaatcgccggagcgccgtcccaccgtcatcctgaggcgcccgccgtcaccttgctcgccgccggccgcctccttccgccgtttggcctctcgattccgtcgtttctggagagtccgttttcgcggaagaagagtttgaagagttccaaggccagcaaggcagctcctggtttggaatggtacattcctggtttggagatagaactgtgcagccggggtggttgttcagaatggttgggcctatacaacaggatgccgcgttacaagcctgagtacctgtttggtgttgagggttttgtccaggagttgcgtacgatgtcctttgtcattggatttgggactgcccctttttatgcccagattcctcatgatcgtcatgaagagaagtgccgagtcaaagtcaccttaaacagcaatagtgaagatgtcccctcagtgatgtttgaagctggaggaagaaactacatccatgcatgtcaggaagtggcaaggatcgccataggagagctccgtgatcgctacagtgatcaattggccgacactgagtatcgctaccatcctcgccaacctcagggaagtgaccgtggcagttaccttgagactgaaggaattgagaatgatgttaccacgaaacatttggttgagatgttgtgggctatggatgaaagtcgtgcggggactgtgttagcagctcaagatcgtgaagatcggaatcgtggtaagatttgcaagctagaagacaaggtggatcgtttggagaaggaattagccgcattgaagggagaagcaccgccgcagaaggccaggattcgtcttaccgcaaggaagagagccctatttgtccctcgctatcaattggcgccaaagatggtgaatactcgcagcaatgggaatggccctaacaaccccaataacaacaacaatggagagaatcctactctggcccaagttcttgctcaacagacacagcttatgaacatgatgatgcagcaatttcagaatcagcaaaaccaagggaataatcatgcacctccacagaacaagttagcagaatttcttcgtgtgaggccgcctgttttctctagtaccactaatcctgttgaagctagtgattggctgcatgccatagagaagaagttggatttacttcagtgtactgatcaggagaaggtctcatttgcatcacatcagttgcatggccctgcctctgaatggtgggatcacttccgccttaacaggactactgctgaacctatcacttggcttgaattcaccgctgctttccggaagacgcatataccatcaggagtagtgtctctcaagaagaaggagttcaggtcgctttcccagggatctcgctctgttacggagtacctacacgagttcaatcgtcttgctcgttatgctccggaagatgtgcgcaatgatgaagagcgccaggagaagtttttgggaggacttaatgatgagctttcttacccactcatggttggagattatcctgatttccagaaattagtggataaggctattcgtcaggaggacaagtacaatcgcatggagcagaagaaacgtcggattgctcaattcaagacacaacagggaaataatcagaagccgcgtcttactttaggaccccagcccatgccacagggaggttcatcgtctgttgttcgtccgcaacgtcagttcttcaacaacaatgctggcaacaacatccgtaatcaagctccacgtcctgttgcagctccaacacagcaacaacctgccaagagagagcaaggcaacaagcccgtggtgtgtttcaactgtggagacccaggacattacgctgacaagtgtccgaagccccgacgcgtgaaggttgtccctgcccagagcaattctaccgtatcagcatcaaaggcccgtgtaaatcatgtcgctgctgcagaagctcaagatgctccagatgtgattttgggtacgttccttgttaactcagttcctgcaacagtacttttcgattctggtgctacacattcattcttatctatgagttttgcgggaaatcatgggatggaagtagaagatcttagacgtcctttgatggttagtaccccaagtaatcaagcactctctttgcaacgtagcccctctgtcagaatagaaattcaaggagtaccatttctggccaatcttatcttgttagaatccaaagaccttgatgtcatcctagggatggactggttagccagacataaaggtgtgatagactgtgccaacagaaaagtaactctcaacagctatgatggtcgagttgtaactgttcatgcattgtcatctgagtttttaaggtcaagactgaaccagataactttggaagagattcctatagtccgggagtatcctgatgtgttcccagatgatttacctggtatgccgcctaaaagggatatagagttcagaatagatttggtacctggaacaactccgatccatacgagaccttatcgaatggcagccaatgagttggcagaagttaagaggcaagtagatgatttgctacagaaaggatacatcagaccgagttcatcaccatggggagctccggttatttttgtggaaaagaaagaccatactcagagaatgtgtgtggactatcgtgcactaaacgatgtgactatcaagaatgagtatccactacccaggattgatgatttgtttgatcaacttaaaggtgccactgttttctccaagatagatcttcgatcagggtatcatcagttgagaatcaaagaggaagatatacctaagacagctttcaccactaggtatgggttgttcgaatgtactgttatgtcttttggacttaccaatgcccctgctttcttcatgaacttgatgaataaggtgtttatggaatacttagacaagttcgtggtggtctttattgatgatattcttatctactctcgaaccaaagaagagcatgaggaacatcttcgccttgcattggagaagctacgagaacatcaactatatgctaagtttagcaagtgtgaattttggttgtccgaagtgaaattccttggtcacgtcatctcagccggaggagttgccgtcgatcctagtaacgtggaatccgtaaccaattggaagcaaccaaagacagtttcagagattcgcagtttcctaggccttgcaggatattatcggaggtttatagagaatttttccaagattgctaagcccatgacacgactgcttcagaaagatgtaaagtacaagtggtcggaagaatgtgaacagagttttcaagaattgaaaagtcgcttaatatcagctccaattttgattttgcctgatccaaagaagggttttcaagtgtattgtgatgcatccaaatttgggttaggttgtgttctgatgcaagaagggaaggtggttgcctatgcatctcgtcagttacgtccgcatgagaagaactaccctactcatgatattgagttagctgcagtcgttcatgcattgaagatttggcgtcattatcttttcggtactcgtacagaagtgtacaccgatcacaagagtttaaagtatatctttactcagccggatctgaacatgagacagcggagatggttggaattaattaaggattatgacatgggaattcattatcatccgggaaaggctaatgtggtagcagacgctcttagcagaaaaggctattgcaatgctacagaaggacgacagttgccattggaattatgcaaggaatttgaaagattaaatttgggaattgtcggtagaggtttcgttgcagccttagaagcgaagcccactctaattgatcaagttagagaagcccaaattaatgatcctgatattcaagagatcaagaagaaaatgagaagaggaaaagctattggtttcttggaggatgagcacggaactgtatggttgggtgagagaatctgtgtccccgacaacaaagatttaaaggatgcaattctgaaagaagctcatgatactttatactccattcaccctggtagtactaagatgtaccaggatcttaaggaaagattttggtgggcaagtatgaagcgtgaaatcgcagaatacgtagcagtatgtgatgtttgtcaacgagtcaaggcagaacatcagaaacccgccggtttgttgcaacctttgaagattcctgaatggaaatgggaagaaattggtatggattttattactggtttacccagaacgtcatcaggccatgactctatttgggtgatagtcgacagacttaccaaagtggctcatttcattccggtaaagacaacttattccggaagtcgcttagcggaattgtatatggcaaggattgtgtgtttgcatggcgtccctaagaagatagtgtctgatcgaggcagtcagtttacttcaaatttttggaagaaacttcaggaagagatgggttctaagctgaactttagtactgcttatcatccgcagacagacggacaaaccgaaagggtgaatcagattttggaagacatgttgagagcttgtgctctagatttcggtggaagttgggataagaatctaccctatgcagaatttttgtacaacaacagttatcaagctagtctacagatggctccgtacgaagcactgtatggtcggaagtgccgcactccgcttttgtgggatcaaacgggagaacgtcaggttttcggaacggatatcctaagggaagcagaagaaaaggtaaagatcattcaagaaagattgcgtgtggctcagtctcgtcataagagttatgccgacaatcgccgcagagatttgagttttgaagagggagattatgtgtatcttcgtgtcacgcctcttcgaggagttcatcgttttcataccaagggaaaattggcaccgcgttttgtgggaccttataagattgtcagtagaagaggagaggttgcttatcagttggagttacctcaatctttggcaggagtacataatgtgttccatgtgtcgcaattgaaaaagtgtttaagggtacctaccgaagaagctaatattgagcagatagaagtccaagaggatttgacttatgttgagaaaccaatccgtatcctagaaacaagtgagagaagaaccaggaatcgagttatccgtttttgcaaagtccagtggagtaatcactcggaagaagaatcaacttgggaacgagaagatgaattgaaatcagctcatccgtacctgttcgccagttcttccgaatctcgaggacgagattctgtttaa

SEQ ID NO: 15203 - DNA, 1899 bp, Oryza sativa
  Clone ID: TFbOSC900259j.C1.o5.gm
atggtgaacactcgcagcaacgggaatggccccaacaacaacaacaacaataacaacaacaatgaagggaacccaacccttgctcaagttcttgctcaacagactcagttaatgaacatgatgatgcagcaacttcagaatcagcaaaaccagggaaataaccatgcacctccccagaacaagttagcagaatttcttcgtgtgaggccgcctattttctctagtaccactaatcctgttgaagctggtgattggttgcatgccatagagaagaagttggatttgcttcagtgcactgatcaggagaaggtctcatttgcatcacaccagttgcatggccctgcctctgaatggtgggatcacttccgcctgaataggactactgctgaacctatcacttggcttgaattcaccgctgctttccggaagacgcatataccatcgggagtggtgtctctcaagaagaaggagttcaggtcgctcacccagggatctcgctctgttacggagtatttgcacgagttcaatcgtctggctcgttatgctccggaagatgttcgcaatgatgaagagcgccaggagaagttcttggaaggacttaatgatgagctttcttacccactcatgactggagattattctgatttccagaagttggtggataaggctattcgtcaggaggacaaatacaatcgcatggagcagaagaaacgccggattgctcaattcaagacacaacaggggaataatcagaagccgcgtcttactttaggaccccagtctgtgccacaggggggttcttcgtctgttgttcgtccgcagcgtcagttcttcaacaacaatgctggcaacaacatccgcaatcaagctccacgtcctgttgcagctccaacacagcaacagcctgccaagagggagcaaggcaacaagcccgtggtgtgtttcaactgtggagacccaggacattatgctgacaagtgtccgaagccccgacgtgtgaaggttgtccctgtccagagcagctctaccgcactagcattaaaggcccgtgtcaatcatgttgctgctgcagaagctcaagatgctccagatgtgattttggtccgggagtatcccgatgtgttcccagatgatttacctgccaatgagttggcagaagttaagaggcaagtagacgatttgcttcagaaaggatacatcagaccgagttcatctccatggggagctccagttatttttgtggaaaagaaagaccatacccagaggatgtgtgtggactatcgtgccctaaatgatgtgactatcaagaataagtacccgctacccagaattgatgatttgtttgatcagcttaaaggtgccaccgttttctccaagatcgatcttcgatcaggccacgaagtttcctcctcgtcgccggccgccgtgggccttcgtcgccgcctccgagcccctttaaaaggaccccgagctcttctctacccgccgccacccttgccttcgcctctcgtcgtcggaaatgccctagcgccgtgtgccctagcgccgtcgtcgccgccgtcgctccagccgtgcgccgccgccgttccagacgtcgccgtcgctcgggaaggacgtcatcgtggtcgccaagtcgtcgccgtcctcgtctgccgcttcgccaccgtcggagaccgccggagcatcgtcgccgccgtcgacccgaagagcttcgccgcttcctcctcgtcgccgtcgccgtccgttgatcttccgccgtcgctttggtcgccggaaggtgcgctgcagtggattgtgttatgcaaggggtattgtcacaactcctttccgaggtaccgtggtggtattgaggcacatgaggaagagttctacagtgaagctgatggtgtggaggattag

SEQ ID NO: 15204 - DNA, 3372 bp, Oryza sativa
  Clone ID: TFbOSC900307j.C1.o3.gm
atggaggtattggtccaagttggctcagtgtcaaatctggcaacaacatgctcaatgtcatcatcatttgtggtctctgctagaatcatcatggtagatgccggcccagtcagccgcgcgcgcgcgccctcgctgtcgctgacagtcgccgtcgctcgggaaggacgtcaacgtggtcgccaagtcgtcgccgtcctcgtccgtcccttcgccgccgtcggagaccaccggagcgtcatcgccgccgtcgacccgaagagcttcgccgcttcctcctcgtcgccgtcgcccgtcctcgcgccgccgttcgccggcgagcgtgcgccgcctgagccgtcccagccgccgagccgccgccgccggggtgacgtcatcgctgacgccatcaagtccgtccgccgtgagccgctgtggacccgatcgatctcggccgtccatcttggatcgatgccgcgttacaagcctgagtacctgtttggtgttgagggttttgtccaggagttgcgtacgatgtcctttgccataggatttgggactgcccctttttatgcccagattcctcatgatcgtcatgaagagaagtgccgagtcaaagtcaccttgaacagtaatagtgaagatatcccctcagtgatgtttgaagctggaggaagaaactacatccatgcatgtcaggaggtggcaaggatcgccataggagagctccgtgatcgctacagtgatcaattggccgacactgagtatcgctaccatcctcgccaaccccagggaagtgaccgtggcagttaccttgagactgaaggaattgagaatgatgctaccacgaagcatttggttgagatgttgtgggctatggatgaaagtcgtgcggagactgtgttagccgctcaagatcgtgaagaccggaatcgtggtaagatttgcaagctagaagacaaggtggatcgtttggagaaggaattagccgcattgaagggagaagcaccgcctcagaaggccaggattcgtcttaccgcaaggaagagagctttatttgtccctcgctatcaactggcgccaaaggttcgtgtggtggagaaagaagttgccccagctcaagcggatcctccggagaaggtctcatttgcatcacatcagttgcatggccctgcctctgaatggtgggatcacttccgcctgaataggattactgctgaacctatcacttggcttgaattcaccgctgctttccggaagacgcatataccatcaggagtagtgtctctcaagaagaaggagttcaggtcgcttactcagggatctcgctctgttacggagtatctgcacgagttcaatcgtcttgctcgttatgctccggaagatgtgcgcaatgatgaagagcgccaggagaagtttttgggaggacttaatgatgagctttcttacccactcatggttggagattatcctgatttccagaaattagtggataaggctattcgtcaggaggacaagtacaatcgcatggagcagaagaaacgtcggattgctcaattcaagacacaacagggaaataatcagaagccgcgtcttactttaggaccccagtccatgccacatggaggttcttcgtctgttgttcgtccgcagcgtcagttcttcaacaacaatgctggcaacaacatccgtaatcaagctccacgtcctgttgcagctccagtacagcaacaacctgccaagagggagcaaggcagcaagcccgtggtgtgtttcaactgtggagacccaggacattatgctgacaagtgtccgaagccccgtcgcgtgaaggttgtccctgcccagagtaactctgctgtaccagcatccaaggcccgtgtcaatcatgtcgctgctgcagaagctcaagatgctccagatgtgattttggtccgggagtatcctgatgtgttcccagatgatttacctgccaatgagttggcagaagtcaagaggcaagtagacgatttgctacagaaaggatacatcagaccgagttcatcaccttggggagctccggttatttttgtggaaaagaaagatcatacccagaggatgtgtgtggactatcgtgcactaaacgatgtgactatcaagaataagtatccgctacccagaattgatgatttgtttgatcagcttaaaggtgccactgttttctccaagatagatcttcgatcagggtatcaccagttgagaatcaaagaggaagatatacctaagacagcttttaccactaggtatgggttgttcgaatgtactgttatgtcttttggacttaccaatgcccctgctttcttcatgaacttgatgaataaggtgtttatggaatacctagacaagttcgtggcggtctttattgatgatattcttatctactctcgaaccaaagaagagcatgaggaacatcttcgccttgcattggagaagctacgagaacatcaactgtatgctaagtttagcaagtgtgaattttggttgtctgaagtgaaattccttggtcacgtcatctcagccggaggagttgccgtcgatcctagtaacgtggaatccgtaaccaattggaagcaaccaaagacagtttcagagattcgcagtttcctaggcctcgcaggatattaccggaggtttatagagaatttttccaagattgctaagcccatgacacgactgcttcagaaagatgtgaagtacaagtggtcggaagaattggctcaaggggaggcgagggaggcgccggccgggctcggctcggcctcaaagccgaccggcggccatggcgaccggcggcggcacgcgcggtcaccggcggtgaccggcagcgcgggagacggcggcggccgagcaaggcatggcgatgctagcggcggcggcggcgcgacgcggcggtggctagggcagagaggagcgacggccggagctcgccggaaagcggcggcgcccgggctcgcggtgcgagcgcgatttgtggcacgggagagctcggggaaattggggaaaagagagaagggagcccgtggatgctttttatgggctcgggaaggcgggatcgaggccggacgtggcggaatcggccggcgaagtggggaggtgaagtggagctcgtggggaggtcaaaccggcgccgtttcttgcggggtgagtgggggaaatggtggaggacgtggagggggtcgtgtccacgtcgttggatgcgagctcgggtgcgggagggcgccggattttgcggcgacgtggggaggctcgggcggccatggcggcggttggagccggaggaaggggatgacaggaatctcgtcccgagattctgggatggctagaaagaaagccggtgctgatggacggtctgactga

SEQ ID NO: 15205 - DNA, 4341 bp, Oryza sativa
  Clone ID: TFbOSC900312j.C1.o15.fg
atgtccgcatcgttttggtgtcctccgttcgcgtcctcgcgccgtcgttcgccggcgagcatgcgcgcccgagccgccgagccgccgccggtggtgacgtcgtcactgacgtcatcgtcgtcgtccctcgtgattccgacgtttccggagagtccgttttcgcaggagaagaatttgaagagttccaaggccagcaaggcaactcctggtttggaatggtatattcctggtttgaagatagaactgtgcagccgggatggttgttcagaatggttgggcctatgcaacaggattcctcatgatcgtcatgaagagaagtgccgagtcaaagtcactttgaacagtaatagtgaagatatcccctcagtgatgttcgaagctggaggaagaaactacatccatgcatgtcaggaggtagcaaggatcgccataggcgagctccgcgatcgctacagtgatcagttggccgacactgagtatcgctaccattctcgtcaaccccagggaagtgaccgtggcagctaccttgagactgagggaattgagaatgatgctaccacaaggcatttggttgagatgctgtgggctatggatgaaacccgtgcagagactgtgttagcagctcaagatcgtgaagatcggaatcgaggtaagatttgcaagctagaggacaaagtggatcgattggagaaggaactagccgcgttgaagggagaagcaccaccgcagaaggccaggatttgtcttaccgcaaggaagagagctctatttgtccctcgctatcaattggcaccaaagatgcatataccatcgggagtggtgtctctcaagaagaaggaatttaggtcgctcacccagggatcccgctctgttacggagtatctacacgagttcaatcgtctggctcgttatgctccggaagatgtgcgcactgatgaagagcaccaggagaagttcttggaaggacttaatgatgagctttcttacccactcatgactggggattatcatgatttccagaagttagtggataaggctattcgtcaggaggacaagtacaatcgcatggagcagaagaaacgccggattgctcaattcaagacacaacaggggaataatcagaggccgcatcttactttaggaccccagtccatgccacagggaggttattcgtctgttgttcgtccgcagcgtcagttcttcaacaacaatgctggcaacaacatccgcaatcaagttccacgtcctgttgcagcctcgacacagcaacaacctgccaagagggagcaaggcagcaagcccgtggtgtgtttcaactgtggagacccaggacattacgctgacaagtgtccgaagccccgatgcgtgaaggttgtccctgcccagagcaactctaccgtatcagcatcaaaggcccgtgtcaatcatgttgctgctgcagaagctcaaggtgctccagatgtgattttgggtacgtttcttgttaactcagttcctgcaacagtgcttttcgattctggtgctacacattcattcttatctatgagttttgcgggaaatcatgggatggaagtagaagatcttagatgtcctttgatggttagtaccccaagtaatcaagcactctctttgcaacgtagcccctctgtcagaatagaaattcaaggagtaccatttctggccaatcttatcttgttagagtccaaagaccttgatgttatcctagggatggactggttagccaggcataagggtgtgatagactgtgctaacagaaaagtaactctcaccagcaatgatggtcgagttgtaactgttcatgcattgtcttctgagtctttaaggtcaatactgaaccaaataactttggaagagattcctatagtccgggagtatcccgatgtgttctcagatgatttacctggtatgccgcctaaaagggatatagagttcagaatagatttggtaccaggaacaactccgatccataagagaccttatcgaatggcagccaacgagttggcagaagtcaagaggcaagtggacgatttgcttcagaaaggaattgatgatttgtttgatcagcttaaaggtgccactgttttctccaagatagatcttcgatcagggtatcatcagttgagaatcaaagaggaagatatacctaagacagcttttaccactaggtatgggttgttcgaatgtactgttatgtcttttggacttaccaatgcccctgctttcttcatgaacttgatgaataaggtgtttatggaatacctagacaagttcgtggtagtctttattgatgatattcttatctactcccgaaccaaagaagagcatgaagaacaccttcgccttgcattggagaagctacgagagcatcaactgtatgctaagtttagcaagtgtgaattttggttgtctgaagtgaagttccttggtcacgtcatctcagcaggaggagttgccgtcgatcctagtaatgtagaatccgtaaccaactggaaacaaccaaagaccgtttcagagattcgcagtttcctaggcctcgcaggatattatcggaggtttatagagaatttttccaagattgctaagcccatgacacggctgcttcagaaagatgtgaagtacaagtggtcagaagaatgtgagcagagttttcaagagttgaagaatcgcttaatatcagctcctattttgatcttacctgatccaaagaagggattccaagtgtattgcgatgcatccaaacttgggttaggttgtgttctgatgcaagatgggaaggtggttgcctatgcatctcgtcagttacgtccgcatgagaagaactaccctactcatgatcttgaattagctgcagtagttcgtgcgttgaagatttggcgtcattatcttttcggtactcgtacagaggtgtataccgatcacaagagtttaaagtatatctttactcagccggatctgaacatgagacaaaggagatggttggaattaattaaggattatgacatgggaattcattaccacccaggaaaggttaatgttgtagcagacgctcttaggaggaaaggctattgcaatgctacggaaggacgacagttgccattggaattatgcaaggaatttgaaagattaaatttgggaattgtcagtagaggtttcgttgcagccttagaagcgaagcccactctaattgatcaaattagagaagcccaaattaatgatcctgatattcaagaaatcaaaaagaatatgagaagaggaagagctatcggtttcttggaggatgagcaaggaacagtatggttgggcgagagaatctgtgttcctgacaacaaagatttaaaagatgcaattctgaaagaagctcatgatactttatattccattcaccctggtagtaccaaaatgtaccaggatctcaaggaaagattttggtgggcaagtatgaagcgtgaaatcgcagagtacgtagcagtatgtgatgtttgtcagcgagtcaaggcagaacatcagaaacctgccggtttgttgcagcctttgaagattcctgaatggaaatgggaggaaatcggtatggatttcatcactggtctacccagaacgtcatcaggccatgactctatttgggtgatagtcgacagacttaccaaagtggctcatttcatcccagtaaagacaacctattccggaagtcggttggcggaattgtatatggcaaggattgtgtgtttgcatggcgtccctaagaaaatagtgtctaatcgaggcagtcagtttacctcaaatttttggaagaagcttcaggaagagatgggttctaagctgaactttagtactgcttatcatccgcagacagacggacaaaccgaaagggtgaatcagattttggaagacatgttgagagcttgtgctttagacttcggtggaagttgggataagaatctaccttatgcggaattctcgtacaacaacagttatcaagctagtcttcagatggctccgtacgaagcactgtatggtcgaaagtgccgcactccacttttgtgggatcaaacgggagaacgtcaggttttcgggacggatatcctgagggaagcagaagaaaaggtgaaaatcattcaagaaagattgcgtgtggcccagtctcgtcataagagttatgccgacaatcgccgcagagatttgagtttcgacgaaagagattatgtgtatcttcgtgtcacgcctcttcgaggagttcatcgttttcacaccaaaggaaaattggcaccgcgttttgtgggaccttataagattgtcagtagaagaggagaggttgcttattag

SEQ ID NO: 15206 - DNA, 1702 bp, Oryza sativa
  Clone ID: TFbOSC900321j.C1.o1.gm
gtcgctcacccagggatctcgctctgtcacggagtatctgcatgagttcaattgtctggctcgttatgctccagaagatgtgcgcaatgatgaagagtgccaggagaagttcttggaaggacttaatgatgagctttcttatccactcatggctggagattatcctgatttccagaagttagtggataaggctattcgtcaggaggacaaatacaatcgcatggaacagaagaaacgccggattgctcaattcaagacacaaccgggaaataatcaaaggccgcgtcttactttaggaccccagtccatgccacatggaggttcttcgtctgttgttcgtccgcggcgtcagttcttcaacaacaatgctggcaacaacatccgcaatctagctccacgccctgttgcagtttcgacacagcaacagcctgccaagagggagcaaggcagcaagcccgtagtgtgcttcaactgtggagacccaggacattatgctgacaagtgtccgaagccccgacgcgtgaaggttgtccctgcccagagcaactctaccgcaccagcatcaaaggcccgtatcaatcatgttgctgctgcagaagctcaagacgctccagatgtgattttggtccgggagtatcccgatgtgttcccagatgatttacctgaaaggatacatcagaccgagttcatcaccatggggagctccggatattaccggaggtttatagagaatttttccaagattgctaagcccatgacacgactgcttcagaaagatgtgaagtacaagtggtcggaagaatccttagaaacgaagcccactctaattgatcaagttagagaagctcaaattaatgatcctgatattcaagagatcaagaagaatatgagaagaggaaaagctatcggtttcttggaagatgagcaaggaactgctccccggtgtctcctctacccgccgccaccctcgccttcgcctctcgtcgcccgtagagctctagcgccgtgtgccctagcgccgccgtcgccgccgtcgctccagcagtgcgccgccgccgttccagacgtcgccgtcactcgggaaggtcgtcgtcgtggtcgccaagtcgtcgccgtccttgtccgccgcttcgtcaccgtcggaaaccgccggagcatcgtcgccgtcgtcaagccgcagtccgccgccgttccttcgtcgtcgccgtcgccgtctgttgtgccgccgttcgccggcgagcttgcgccgtccgagctgtcgagccgccgagccgccgccgccggtggtgacgtcatcgctgacgtcatcgtccccgtttcccacgacgacgccggccggaacggacggcggacaacagcggcgagcggcggagcgaaccacggcgatacaggcaaaagcgagcacaccgggtggttgcacgagaagaggggagacgagccaatggctccgattcgccggagggagcttgacggcggcgaatcgcggcggcggcaaccggcggcgggagaagggggaaacgacgacgaggtcacgaggggccgattcccggcggcaagagcatctacacggctacgggaatccgatgctagcgtcggattgggcggagctacgccgagcgaggccggcgacgagcgggtgctacggagcacgggcggtgagcacatggcgagcggcggcaacggtcggggcggtgccggctag

SEQ ID NO: 15207 - DNA, 1254 bp, Oryza sativa
  Clone ID: TFbOSC900373j.C1.o13.fg
atgtcatggcagagggttggtgccctgctgctaggggctcagtctcgcctgcctgtcccgggggttccggccgtaggcgggattgggtcggtactcttgtctatggctaggatgggttggaaactatgtcacgtcttccgtctgtataccgtggtgatgtttaacagagaaaaaggaaagaatgtcagcaggcatgcctccagtaactcaagttttcaactccatccaccactagcctcaagagagttaacaagggtacacccttggtccattccaagcatgctgcttggttcacagctaccattggttggaagtcaagaccaaaatcagtatgtgtttgatcgagcatttgccacccaggtcaatgagcttccaatgccagaagaggatgtccccttttgtcaggattgtagagagcaaggacactatgccctgaattgtccatgggtatataccaaagaagctccttcctttggtttagcagggcaggcatcgctaaaccagcctcctcgcaccaagtcaagcttgcagcctagtgtgcaaagcagagagcccaatgaagagaatccattgaatcccgggaattgctttcctcctagcctttcgtaccacgtggggtcacgtactaagcacgccaaaggcaagaagagtaagaatcagaagagaaaagcgccgatgcgaactgaagaagaagtacgtaagatgactattaccagcaccgaatggcctccagcagggataactattcctagacgtcaaagaggaaataccttccgaggtgcacggcagttgacccagcacctcctaagccatggtggcagagtatctgatagtgaagggtcagatcaagtctcctcggattatgaatatgagtccccccgacgtctcggcgaggaagagatggaattaaaagcatgcacccgttgcggagaaattggacacattgctagcatgtgtctcacactctgccctcattgtgaagaagaccatccaccaggggagtgtcccacccgcaaggtcacatgttttctatgcgaaggtacaaaccatgtgcccaaggattgccaactcagtgtgttgttgaccaagaccgcagaaatccaacgaacaaccctacgattgtctcatcagctagtcagctccaacagcaacctcgacgatatcatccacagcaccaatgctcctcctgctgcacctgactctgcaataaatcatagcaataataccttcagcaccaaccattctctgcactga

SEQ ID NO: 15208 - DNA, 6117 bp, Oryza sativa
  Clone ID: TFbOSC900373j.C1.o2.fg
atgggattaccgaccctagcccttacccaagcatcggcatcgctccgtggtttcggcggtgagtcagtccaagttctaggccaagcgcaattgctggtagctttcggcacaggcaaaaacagacgcgaagagaaaataatgtttgacgttgtcgacatcccgtacaactacaatgccatcttcggctgtgcgaccttcaataagttcgaagccatttcccaccacaattatctcaagctcaagatgcctggcccggtaggagtgatcgtggtcaaggggctccagccttcggccgcttcaaagggcgatttggccataatcaacagagctgtgcataatgttgaggccgaaccacatgatccggcgaagcacgcgccaaagcccgcccctcacggcaaggtaatcaagatacagattgatgataccgatcccacaaagcttgtatcgctggggggcgacatgggcgaagaagaggttgagaacatcctagaggtgctcaagaaaaacattgataacttcgcctggggccctgatgaggtgggaagtgtttcgacagatctcatcatgcatcacctggcagtcatgccggatgccaagccaaggaaacagaagctacgcaagatgtccgttgatctccaagaagcagcaaaagccgaagtccaaaaattgctcaaggctagggtcattcaagagatcgaccaccccgagtggctggcgaatccggtgctggtgcggaaatcaaacgacaaatatcgcatgtgcgtcgatttcacaaacctaaacaaggcatggccgaaggatgatttccccttgccacggatcgaccaactcgtggattcgacagctggctacgaactcatgagcttcttggatgcgtactccggttaccaccagatccacatgaacccggccgacatccccaagacatccttcatcacaccattcggcaccttttgccacctcaggatgcctttcggcctgaggaatgccggggcaaccttcgccaggcaggtgtacaagccgtgcttcgccgtcgttccagtcgtcgccgtcgctcggggagaccgccatcgtggtcgtcatcgcgtcgccgtcctcgtccgccccttcgccgtcgctgtagaccgccggagcatcgccgtcgtcgtcaagccgaaggaccccgccgccttttcctcgacgccgccgccgtctgttcatcttccgccgtcgttttggtcatcgattccgacgtttccggagagtccgttttcgcaggagaagaatttgaagagttccaaggccactcctggtttggaatggtatattcctggtttggagatagaactgtacagccgggatggttgttcagaatggttgggcctatacaacaggatgccgtgctacaagcctgagtacttgtttggtgttgagggatttgtccaggagttgcgtacgatgtcctttgccataggatttgggactacccctttttatgcccagattcctcatgatcgtcacgaagagaagtgccgagtcaaagtcaccttgaacagtaatagtgaagatatcccctcagtgatgttcgaagctggaggaagaaactacatccatgcatgtcaggagggaagtgaccgtggcagctaccttgagactgaaggaattgagaatgatgctaccacaaagcatttggttgagatgctgtgggctatggatgaaacccgtgcagagactgtgttagcagctcaagatcgtgaagaccggaatcatgagaaggaactagccgcattgaagggagaagcaccaccgcagaaggccaggattcgtcttaccgcaaggaagagagctctatttgtccctcgctaccaattggcgccaaaggtccgtgtggtggagaaagaagttaccccagccctagcgaatcctccggtcgtcaacatggtgctcactcgcagcaacgggaatggccccaacaacaacaataacaacaacaatggagagaatcccacacttgcccaagtcctggctcaacaggtacagcttatgaacataatgatgcagcaacttcagaaccagcagaaccagggaaataatcatgcacctcctcagaacaagttagcagaatttcttcatgtgaggccgcctactttctctagtaccactaatcctgttgaagctggcgattggctgcatgccatagaaaagaagttggatttgcttcagtgcaccgatcaggagaaggtctcatttgcatcacatcagttgcatggccttgcctctgaatggtgggatcacttccgcctgaacaggactactactgaacctatcacttggcttgaattcaccgctgctttccggaagacgcatataccatcgggagtggtgtctctcaagaagaaggaattcaggtcgctcactcaggggtctcgctctgttactgagtatctgcacgaattcaatcgtctggctcgttatgctccggaagatgtgcgcactgatgaagagcgacatgagaggttcttggaaggacttaatgatgagctttcttacccactcatgactggggattatcatgatttccagaagttagtggataaggctattcgccaggagggcaagtacaaccgcatggagcagaagaaacgccggattgctcaattcaaggcacaacaagggaatagtcagaggccgcgtcttactttaggaccccagtccatgcgacagggaggttcttcgtctgttgttcgtccgcagcgtcagttcttcaacaacaatgcgggcaacaacatccgcaatcaagctccacgccctgttgcagcttcgacacagcaacagcctgccaagaaggagcaaggcagcaagcccgtggtgtgcttcaactgtggagacccaggacattacgctgacaagtgtccgaagccccgacgcgtgaaggttgtccctgcccagagcaactctactgtaccagcatcaaaggcccgtgtcaatcatgttgctgctgcagaagcccaaggtgctccggatgtgattttgggtacgttccttgttaacttagttcctgcaacagtgcttttcgattctggtgctacacattcattcttatctatgagttttgcgggaaatcatgggatggaagtagaagatcttagacgtcctttgatggttagtaccccaagtaatcaagcactctctttgcaacgtagcccctctgtcagaatagaaattcaaggagtaccatttctggccaatcttatcctgttagaatccaaagaccttgatgtcatcttagggatggactggttagccagatataaaggtgtgatagactgtgccaacagaaaagtaactatcaccagtaatgatggtcgagttgtaactgttcatgcattgtcttctgagcctttaaggtcaagactgaaccaaataactttggaagagattcctatagtccgggagtatcccgatgtgttcccagacgatttacctggtatgccgcctaaaagggatatagagttcagaatagatttggtaccaggaacgactccgatccataagagaccttatagaatggcagccaatgagttggcagaagtcaagaggcaagtagacgatttgcttcagaaaggatacatcagaccgagttcatctccatggggagctccggttatttttgtggaaaagaaagatcatacccagaggatgtgtgtagactatcgtgcactaaatgatgtgactatcaagaataagtatccgctgcccagaattgatgatttgtttgatcagcttaaaggtgccatcgttttctccaagatagatcttcgatcagggtatcaccagttgaggatcaaagaggaagatatacctaagacagcttttaccactaggtatggattgttcgaatgtactgttatgtcttttggacttaccaatgcccccgctttcttcataaacttgatgaataaggtgtttatggaatacctagacaagttcgtggtggtctttattgatgacattcttatctactcccgaaccaaagaagagcatgaagaacatcttcgccttgcactagagaagctacgagaacatcaactgtatgctaagtttagcaagtgtgaattttggttgtctgaagtgaagttccttggtcacgtcatctcagcaggaggagttgccgtcgatcctagtaatgtggaatccataaccaattggaaacaaccaaagacagtttcagagattcgcagtttcctaggccttgcaggatattatcggaggtttatagagaatttttccaagattgctaagcccatgacacgattgcttcaaaaggatgtgaagtacaagtggtcagaagaatgtaagcagagttttcaagagttgaagaatcgcttaatatcagctcctattttgattttacctgatccaaagaagggtttccaagtgtattgtgatgcatcccaacttgggttaggttgtgttctgatgcaagatgggaaggtggttgcatatgcatctcgtcagttacgtccgcatgagaagaactaccctactcatgatcttgagttagctgcagtaattcatgcgttgaagatttggcgccattatcttttcggtacttgtatagaggtgtataccgatcacaagagtttaaagtatatttttactcagccggatctgaacatgagacaacggagatggttggaattaattaaggattatgacatgggaattcagtatcacccgggaaaggctaatgttgtagcagatgctcttagcaggaaaggctattgcaatgctacggaaggacgacagttgccattggaattatgcaaggaatttgaaagattaaatttgggaattgtcagaagaggtttcgttgcagccttagaagcaaagcccactctaattgatcaagttagagaagcccaaattaatgatcctgatattcaagaaatcaagaagaatatgagaagagggaaagctatcggtttcttggaggatgagcaaggaactgtatggttgggtgagagaatctgcgtccccgacaacaaagatttaaaagatgcaattctgaaagaagctcatgatactttatactccattcaccctggtagtaccaaaatgtaccaggatctcgaggaaagattttggtgggcaagtatgaagcgtgaaatcgcagaatacgtagcagtatgtgatgtttgtcagcgagtcaaggcagaacatcagaaacccgccggtttgctgcagcctttgaagattcctgaatggaaatgggaggaaatcggtatggatttcatcactggtctacccagaacgtcatcaggccatgactctatttgggtgacagacggacaaaccgaaagggtgaatcagattttggaagatatgttgagagcttgtgctttagacttcggtggaagttgggataggaatctaccttatgcagaattttcgtacaacaacagttatcaagctagtcttcagatggctccttacgaagcactgtatggtcggaagtgccgcactccgcttttgtgggatcaaacaggagaacgtcaggttttcgggacggacatcctaagggaagcagaagagaaggtgaaaatcattcaagaaaggttgcgtgtggcccagtctcgtcataagagttatgccgacaatcgtcgtagagatctaagttttgacgaaggagattatgtgtatcttcgtgtcacgcctcttcgaggagttcatcgttttcacaccaaaggaaaattggtaccgcattttgtgggaccttataagattgtcaatagaagaggagaggttgcttatcagttggagttacctcaatctttggcaggagttcataatgtgttccatgtgtcgcaattgaaaaagtgtttaagggtacctaccgaagaagctaatcttgaacagatagaagtccaagaggatctgacctatgttcagaaaccaatccgtatcttggaaatagaagagagaagaaccagaaatcgagttatccgtttttacaaagtccaatggagtaatcactcggaagaagaatcaacttgggaacgagaagatgaattgaagtcagctcatccgcatctgttcgccagttcttccgaatctcgaggacgagattctgtttaa

SEQ ID NO: 15209 - DNA, 5064 bp, Oryza sativa
  Clone ID: TFbOSC900382j.C1.o28.gm
atggtgaatactcgtagcaatgggaatggtcccaacaaccccaataacaacaacaatggagagaatcccactctggcccaagttcttgctcaacagactcagcttatgaacatgatgatgcagcaatttcagaatcagcaaaaccaagggaataatcatgcacctccacagaacaagttagcagaatttcttcgtgtgaggccgcctgttttctctagtaccactaatcctgttgaagctagtgattggctgcatgccatagagaagaagttggatttacttcagtgtactgatcaggagaaggtctcatttgcatcacatcagttgcatggccctgcctctgaatggtgggatcacttccgccttaacaggactactgatgaacctatcacttggcttgaattcaccgctgctttccgaaagacgcatataccatcgggagtagtgtctctcaagaagaaggagttcaggtcgcttactcagggatctcgctctgttacggagtatctgcacgagttcaatcgtcttgctcgttatgctccggaagatgtgtgcaatgatgaagagcgccaggagaagtttttgggaggacttaatgatgagctttcttacccactcatggttggagattatcctgatttccagaaattagtggataaggctattcgtcaggaggacaagtataatcgcatggagcagaagaaacgtcggattgctcaattcaagacacaacagggaaataatcagaagccgcgtcttactttaggaccccagcccatgtcacagggaggttcttcgtctgttgttcgtccgcagcgtcagttcttcaacaacaatgctggcaacaacatccgtaatcaagctccacgtcctgttgcagctccagcacagcaacaacctgccaagagggagcaaggcagcaagcccgtggtgtgtttcaactgtggagatccaggacattatgctgacaagtgtccgaagccccgacgtgtgaaggttgtccctacccagaataactctgctgtaccagcatcaaaggcccgtgtcaatcatgttgctgctgcagaagctcaagatgctccagatgtgattttggtccgggagtatcctgatgtgttcccagatgatttacctgccaatgagttggcagaagttaagaggcaagtagatgatttgctacagaaaggatacatcagaccaagttcatcaccatggggagctccgcttaaaggtgccactgttttctccaagatagatcttcgatcagggtatcaccagttgagaatcaaagaggaagatatacctaagacagcttttaccactagtttcctaggcctcgcaggatattaccggaggtttatagagaatttttccaagattgctaagcccatgacacgactgcttcagaaagatgtaaagtacaagtggtcggaagaatccttagaagcgaagcccactctaattgatcaagttagagaagcccaaattaatgatcctgatattcaagagatcaagaagaatatgagaagaggaaaagctattggtttcttggaggatgagcacggaactccgtgcgccgccgtcgttccagccgtcgccgtcgctcgggaagaccgccgtcgtcatcgccaagtcgccgccgtcctcgtccgccccttcgcagccgtcggaacccgccggagcttcgtcgccgtcgacaacccgaaggtagccgccgcttccttctcgtcgccgtcgtcgtccgttccttctccgccgccgttttggtcaccggtgtgttcgccgcgttgtcctctacgtgctggtgccctccgttggtgccgtggtgccgccgttcgccggcgagtgtccgccgcccgagccgtcttcttcgccgagccgccgccgtcgtcggtgatgaccaacgtgccatctccaggagctagcacgctggctccggctagggacgagtgcctagagactctcatcctgacaggacggggcgaggccgtgctgccgccttcccgcatcgtgagcgagagacaggccgggctgccgcgccgcttcatgccggaatctgccactgaccgggagatagtctcgctgggcgagggatgcccggcgccacgctacccggggcggtccgtcttcttcctcccttttgctatggcagggctggttccgccattttcttctttcttcatggatgttctggagttttacgatctccagatggcgcacctcacccccaacgcggtaatgacattggccatcttcgcgcacctgtgcgagatgttcatcggggtgcgcccatcccttcggctgttccggtggttcttcaccgtacagccggtgtcgccgccgtcggtggttggtggttgctacttccagccgcgagggccggtgctgaaccgctacattccctgcgtcctccgcaagaagtgggatgactggaagagcgactggttctacacccccctcgccgacgaagcgcgcctccgacttccgagccagcctccaacgcaggcctccaactggcgggcgccggtagatctgggagatggctacgacgccgtcctcgaccgcctggcgggcctgcgatcccaggggctcacaggggccatggtgttcggcgactatcttcgtcgccggatcgcgccactccagcggcgcgcccggggcgcctgggagtacaccgggtccgaggactgtatgaggacccaccagggggtcagatgggaccgggctcctgaggacttcaagatagtggtccaacgggtgctgaatctcagctccgtggaggcatccctcattcctcaaggagtcctccccctctgcagcgatccagaccgcgcctccatcctgaccatcatgcaggcggtcggggcgtcggaggagcgggctcctcgaggccacgatggcgcgggcgggagccgcaggggggaacaatctaccccgggagggggtcgtgcttctgggccccgcgacgggggcccggggagcggccgccctgccgacgcccgggggaagaggaagcaggaaggaacccctcccccatctcctccccgagggggcggggcggcgcgtgccagcagcaggcgcccggagggggccacgccgacgtcgcagcccgagggggagcggaagaagaaacggctccgcaagatgggggggacagaaccatcccggggaaaccttatttcccctccaagcgagatcccgtcgcgtccctcccgccattccaagtccggccagtctgaggccgaggacccggcgaccacagaggctcggaggcgggaatctgaccggcgagaagccgcggatcgcctacgggaagccggggaggccgcccaggtggccgtccgagctcgccaagctgaagaagccgctcgggaggaggccagacttcgccaggccgaggcggcgacgacttccgaggcagctcgcgacgaggccgcgggcgtatcgcttgggcccactccctcgggcgacgctcaggacaagccaggtccgggggacatccctgagtccggcatgtccatcggcgggccgagccgcgcggcatcctcaccgaggcggctcttccccacgccttccgttgctccactgagcgcagaaccccttctgcaggccttggccgtcgcaaacaccacggtgttggacgggttaagtgcccaagtggaggccctgcaagcagagcgggcggagcttgacgccgcatgggcgcgtgtcgaagaggggcgacgctcggtggaggccatggtggaggtgggccgcaaggcacaccgccggcacgtctcagagctcgaagcccgtcggaaggtgctgggggagatcgccaaggaggtggaggaggagcggggggctgccctcatcgccaccaccgtgatgaacgaggcgcaggacaccctccgccttcaatacgggagctgggaggcggagctagggaaaaagctcgacgccgcccggggggtccttgacgctgccgctgcccgagaacggcgggcggcggagaccgaggtggcatcccggcggcgcgaagaagcccttgaggcccgtgccatggcgctggaagagcgtgcctgcgccgtggagagggacctggcggatcgcgaggccgccgttgctattcgggaggtcacactggcggtgcacgaagccgcctgtgccgaagaagagtccgcgctccgcctccgcgaggacgcgctcaccgagcgggagcgagctctcaaggaggccgaggccgcggcgcaacggctggcggacagcctgtccctccgcgaggctgcgcaagaggaacaagcgcgtcgcaatctggaaagtgcccgcgccgagagggccgcactgaaccagcgggccgctgaactcgaggcgcaggcaagggagctggatgcaagggcgcgtagcggcggggcggccacgggcgacagcgacttagccgcccgcctcgcagctgccgaacacaccatcgcggatctgcagggcgcgctggattcgtccaccggggaggtcgaggcccttcgcctggcaggcgagatagggcccagcatgcttcgcgatgccgtgtcccgtttagaccgcgccgggcggcaggcgggtctctggggcgggcggactgtgaagtacgccgccaaccaggggggcctcgcccagcgcctctcggagatggccgggactctccagcggctccccgaggagctcgaggggacgattaactcatcctcgagggacctcgcccgaggagcggtggagctcgtactggcgagttaccaggccagggaccccgacttctccccatggacggcgctggacgagttccctcccgggaccgaggacggcgcgcgcgtgcaggtccgggatgccgccgaccatatcgtccacagcttcgagggttcggcccctcggctcgcgttcgccctcaactccgacgaggagggcgatgacggcggtgtgggcgacagtggcgacgaggctggcgacccgggttctagtcctcaaatggctcgggtcggggctagtgcctggggagatccacatgtcgagactggccaggccgggagcgtggtgaccgagggttatgggtga

SEQ ID NO: 15210 - DNA, 4968 bp, Oryza sativa
  unsure (1)..(4968): unsure at all n locations
  Clone ID: TFbOSC900382j.C1.o32.gm
atggtgaatactcggagcaattggaatggtcccaaccccccagataacaacaacaggggatccttggtatcngaccgcacgcagcaagaatttcttcgtgtgaggccgcctgttttctctagtaccactaatcctgttgaagctagtgattggctgcatgccatagagaagaagttggatttacttcagtgtactgatcaggagaaggtctcatttgcatcacatcagttgcatggccctgcctctgaatggtgggatcacttccgccttaacaggactactgatgaacctatcacttggcttgaattcaccgctgctttccgaaagacgcatataccatcgggagtagtgtctctcaagaagaaggagttcaggtcgcttactcagggatctcgctctgttacggagtatctgcacgagttcaatcgtcttgctcgttatgctccggaagatgtgtgcaatgatgaagagcgccaggagaagtttttgggaggacttaatgatgagctttcttacccactcatggttggagattatcctgatttccagaaattagtggataaggctattcgtcaggaggacaagtataatcgcatggagcagaagaaacgtcggattgctcaattcaagacacaacagggaaataatcagaagccgcgtcttactttaggaccccagcccatgtcacagggaggttcttcgtctgttgttcgtccgcagcgtcagttcttcaacaacaatgctggcaacaacatccgtaatcaagctccacgtcctgttgcagctccagcacagcaacaacctgccaagagggagcaaggcagcaagcccgtggtgtgtttcaactgtggagatccaggacattatgctgacaagtgtccgaagccccgacgtgtgaaggttgtccctacccagaataactctgctgtaccagcatcaaaggcccgtgtcaatcatgttgctgctgcagaagctcaagatgctccagatgtgattttggtccgggagtatcctgatgtgttcccagatgatttacctgccaatgagttggcagaagttaagaggcaagtagatgatttgctacagaaaggatacatcagaccaagttcatcaccatggggagctccgcttaaaggtgccactgttttctccaagatagatcttcgatcagggtatcaccagttgagaatcaaagaggaagatatacctaagacagcttttaccactagtttcctaggcctcgcaggatattaccggaggtttatagagaatttttccaagattgctaagcccatgacacgactgcttcagaaagatgtaaagtacaagtggtcggaagaatccttagaagcgaagcccactctaattgatcaagttagagaagcccaaattaatgatcctgatattcaagagatcaagaagaatatgagaagaggaaaagctattggtttcttggaggatgagcacggaactccgtgcgccgccgtcgttccagccgtcgccgtcgctcgggaagaccgccgtcgtcatcgccaagtcgccgccgtcctcgtccgccccttcgcagccgtcggaacccgccggagcttcgtcgccgtcgacaacccgaaggtagccgccgcttccttctcgtcgccgtcgtcgtccgttccttctccgccgccgttttggtcaccggtgtgttcgccgcgttgtcctctacgtgctggtgccctccgttggtgccgtggtgccgccgttcgccggcgagtgtccgccgcccgagccgtcttcttcgccgagccgccgccgtcgtcggtgatgaccaacgtgccatctccaggagctagcacgctggctccggctagggacgagtgcctagagactctcatcctgacaggacggggcgaggccgtgctgccgccttcccgcatcgtgagcgagagacaggccgggctgccgcgccgcttcatgccggaatctgccactgaccgggagatagtctcgctgggcgagggatgcccggcgccacgctacccggggcggtccgtcttcttcctcccttttgctatggcagggctggttccgccattttcttctttcttcatggatgttctggagttttacgatctccagatggcgcacctcacccccaacgcggtaatgacattggccatcttcgcgcacctgtgcgagatgttcatcggggtgcgcccatcccttcggctgttccggtggttcttcaccgtacagccggtgtcgccgccgtcggtggttggtggttgctacttccagccgcgagggccggtgctgaaccgctacattccctgcgtcctccgcaagaagtgggatgactggaagagcgactggttctacacccccctcgccgacgaagcgcgcctccgacttccgagccagcctccaacgcaggcctccaactggcgggcgccggtagatctgggagatggctacgacgccgtcctcgaccgcctggcgggcctgcgatcccaggggctcacaggggccatggtgttcggcgactatcttcgtcgccggatcgcgccactccagcggcgcgcccggggcgcctgggagtacaccgggtccgaggactgtatgaggacccaccagggggtcagatgggaccgggctcctgaggacttcaagatagtggtccaacgggtgctgaatctcagctccgtggaggcatccctcattcctcaaggagtcctccccctctgcagcgatccagaccgcgcctccatcctgaccatcatgcaggcggtcggggcgtcggaggagcgggctcctcgaggccacgatggcgcgggcgggagccgcaggggggaacaatctaccccgggagggggtcgtgcttctgggccccgcgacgggggcccggggagcggccgccctgccgacgcccgggggaagaggaagcaggaaggaacccctcccccatctcctccccgagggggcggggcggcgcgtgccagcagcaggcgcccggagggggccacgccgacgtcgcagcccgagggggagcggaagaagaaacggctccgcaagatgggggggacagaaccatcccggggaaaccttatttcccctccaagcgagatcccgtcgcgtccctcccgccattccaagtccggccagtctgaggccgaggacccggcgaccacagaggctcggaggcgggaatctgaccggcgagaagccgcggatcgcctacgggaagccggggaggccgcccaggtggccgtccgagctcgccaagctgaagaagccgctcgggaggaggccagacttcgccaggccgaggcggcgacgacttccgaggcagctcgcgacgaggccgcgggcgtatcgcttgggcccactccctcgggcgacgctcaggacaagccaggtccgggggacatccctgagtccggcatgtccatcggcgggccgagccgcgcggcatcctcaccgaggcggctcttccccacgccttccgttgctccactgagcgcagaaccccttctgcaggccttggccgtcgcaaacaccacggtgttggacgggttaagtgcccaagtggaggccctgcaagcagagcgggcggagcttgacgccgcatgggcgcgtgtcgaagaggggcgacgctcggtggaggccatggtggaggtgggccgcaaggcacaccgccggcacgtctcagagctcgaagcccgtcggaaggtgctgggggagatcgccaaggaggtggaggaggagcggggggctgccctcatcgccaccaccgtgatgaacgaggcgcaggacaccctccgccttcaatacgggagctgggaggcggagctagggaaaaagctcgacgccgcccggggggtccttgacgctgccgctgcccgagaacggcgggcggcggagaccgaggtggcatcccggcggcgcgaagaagcccttgaggcccgtgccatggcgctggaagagcgtgcctgcgccgtggagagggacctggcggatcgcgaggccgccgttgctattcgggaggtcacactggcggtgcacgaagccgcctgtgccgaagaagagtccgcgctccgcctccgcgaggacgcgctcaccgagcgggagcgagctctcaaggaggccgaggccgcggcgcaacggctggcggacagcctgtccctccgcgaggctgcgcaagaggaacaagcgcgtcgcaatctggaaagtgcccgcgccgagagggccgcactgaaccagcgggccgctgaactcgaggcgcaggcaagggagctggatgcaagggcgcgtagcggcggggcggccacgggcgacagcgacttagccgcccgcctcgcagctgccgaacacaccatcgcggatctgcagggcgcgctggattcgtccaccggggaggtcgaggcccttcgcctggcaggcgagatagggcccagcatgcttcgcgatgccgtgtcccgtttagaccgcgccgggcggcaggcgggtctctggggcgggcggactgtgaagtacgccgccaaccaggggggcctcgcccagcgcctctcggagatggccgggactctccagcggctccccgaggagctcgaggggacgattaactcatcctcgagggacctcgcccgaggagcggtggagctcgtactggcgagttaccaggccagggaccccgacttctccccatggacggcgctggacgagttccctcccgggaccgaggacggcgcgcgcgtgcaggtccgggatgccgccgaccatatcgtccacagcttcgagggttcggcccctcggctcgcgttcgccctcaactccgacgaggagggcgatgacggcggtgtgggcgacagtggcgacgaggctggcgacccgggttctagtcctcaaatggctcgggtcggggctagtgcctggggagatccacatgtcgagactggccaggccgggagcgtggtgaccgagggttatgggtga

SEQ ID NO: 15211 - DNA, 5229 bp, Oryza sativa
  Clone ID: TFbOSC900394j.C1.o6.fg
atgtcaccgctgacgtcatcggggtcgtccgccattccgtcgtttccggagagtccgttttcgcagaagaagagtttgaagagttccaaggccagcaaggcaactcctggtttggaatggtatattcctggtttggagatagaactgtgcagccggggtggttgttcagaatggttgggcctatacaacaggatgccgcgttacaagcctgagtacctgtttggtgttgagggttttgtccaggagttgcgtacgatgtcctttgtcattggatttgggactgcccctttttatgcccagattcctcatgatcgtcatgaagagaagtgccgagtcaaagtcaccttgaacagtaatagtgaagatatcccctcagtgatgtttgaagctggaggaagaaactacatccatgcatgtcaggaggtggcaaggatcgccataggagagctccgtgatcgctacagtgatcaattggccgacactgagtatcgctaccatcctcgccaaccccagggaagtgaccgtggcagttaccttgagactgaaggaattgagaatgatgctaccacgaagcatttggttgagatgttgtgggctatggatgaaagtcgtgcggagactgtgttagccgctcaagatcgtgaagaccggaatcgtggtaagatttgcaagttagaagacaaggtggatcgtttggagaaggaattagccgcattgaagggagaagcaccgccgcagaaggccaggattcgtcttaccgcaaggaagagagctctatttgtccctcgctatcaactggcgccaaagatggtgaacactcgcagcaatgggaatggtcccaacaaccccaataacaacaacaatggagagaatcccactcttgctcaagttcttgctcaacagacacagcttatgaacatgatgatgcagcaatttcagaatcagcaaaaccaaggaaataatcatgcacctccacagaacaagttagcagaatttcttcgtgtgaggccgcctgttttctctagtaccactaatcctgttgaagctagtgattggctgcatgccatagagaagaagttggatttacttcagtgtactgatcaggagaaggtctcatttgcatcacatcagttgcatggccctgcctctgaatggtgggatcacttccgccttaacaggactactgctgaacctatcacttggcttgaattcaccgctgctttccggaagacgcatataccatcaggagtagtgtctctcaagaagaaggagttcaggtcgcttacccagggatctcgctctgttacggagtatctgcacgagttcaatcgtcttgctcgttatgctccggaagatgtgcgcaatgatgaagagcgccaggagaagtttttgggaggacttaatgatgagctttcttacccactcatggttggagattatcctgatttccagaaattagtggataaggctattcgtcaggaggacaagtacaatcgcatggagcagaagaaacgtcggattgctcaattcaagacacaacaggggaataatcagaagccgcgtcttactttaggaccccagcccatgccacagggaggttcttcgtctgttgttcgtccgcagcgtcatttcttcaacaacaatgctggcaacaacatccgtaatcaagctccacgtcctgttgcagctccagcacagcaacaacctgccaagagggagcaaggcagcaagcccgtggtgtgtttcaactgtggagatccaggacattatgctgacaagtgtccgaagccccgacgcgtgaaggttgtccctgcccagaataactctgctgtaccagcatccaaggctcgtgtaaatcatgtcgctgctgcagaagctcaagatgctccagatgtgattttgggtacgttccttgttaactcagttcctgcaacagtacttttcgattctggtgctacacattcattcttatctatgagttttgcgggaaatcatgggatggaagtagaagatcttagacgtcctttgatggttagtaccccaagtaatcaagcactctctttgcaacgtagcccctctgtcagaatagaaattcaaggagtaccatttctggccaatcttatcttgttagaatccaaagaccttgatgtcatcctagggatggactggttagccagacataaaggtgtgatagactgtgccaacaaaaaagtaactctcaccagctatgatggtcgagttgtaactgttcatgcattgtcatctgagtctttaaggtcaagactgaaccaaataactttggaagagattcctatagtccgggagtatcccgatgtgttcccagatgatttacctggtatgccgcctaaaagggatatagagttcacaatagatttggtacctggaacaactccgatccataagagaccttatcgaatggcagccaatgagttggcagaagttaagaggcaagtagatgatttgctacagaaaggatacatcagaccgagttcatcaccatggggagctccggttatttttgtggaaaagaaagaccatactcagagaatgtgtgtggactatcgtgcactaaacgatgtgactatcaagaataagtatccactacccaggattgatgatttgtttgatcagcttaaaggtgccactgttttctccatgatagatcttcgatcagggtatcatcagttgagaatcaaagaggaagatatacctaagacagcttttaccactaggtatgggttgttcgaatgtactgttatgtcttttggacttaccaatgcccctgctttcttcatgaacttgatgaataaggtgtttatggaatacctagacaagttcgtggtggtctttattgatgatattcttatctactctcggaccaaagaagagcatgaggaacatcttcgccttgcattggagaagctacgagaacatcaactgtatgctaagtttagcaagtgtgaattttggttgtctgaagtgaaattccttggtcacgtcatctcagccggaggagttgccgtcgatcctagtaacgtggaatccgtaaccaattggaagcaaccaaagacagtttcagagattcgcagtttcctaggcctcgcaggatattatcggaggtttatagagaatttttctaagattgctaagcccatgacacgactgcttcagaaagatgtgaagtacaagtggtcggaagaatgtgagcagagttttcaagagttgaaaagtcgcttaatatcagctcctattttgattttgcctgatccaaagaagggttttcaagtgtattgcgatgcatccaaacttgggttaggttgtgttctgatgcaagatgggaaggtggttgcctatgcctctcgacagttacgtccgcatgagaagaactaccctactcatgatattgagttagctgcagtcgttcatgcattgaagatttggcgtcattatcttttcggtactcgtacagaagtgtacaccgatcacaagagtttaaagtatatctttactcagccggatctgaacatgagacaacggagatggttggaattaattaaggattatgacatgggaattcattatcatccgggaaaggctaatgttgtagcagacgctcttagcagaaaaggctattgcaatgctacagaaggacgacagttgccattggaattatgcaaggaatttgaaagattaaatttgggaattgtcggtagaggtttcgttgcagccttagaagcgaagcccactctaattgatcaagttagagaagcccaaattaatgatcctgatattcaagagatcaagaagaatatgagaagaggaaaagctattggtttcttggaggatgagcaaggaactgtatggttgggtgagagaatttgtgtccccgacaacaaagatctaaaagatgcagttctgaaagaagctcatgatactttatactccattcaccctggtagtactaagatgtaccaggatctcaaggaaagattttggtgggcaagtatgaagcgtgaaatcgcggaatatgtagcagtatgtgatgtttgtcagcgagtcaaggcagaacatcagaaacccgccggtttgttgcagccattgaagattcctgaatggaaatgggaagaaataggtatggattttattactggtttacccagaacgtcatcaggccatgactctatttgggtgatagtcgacagacttaccaaagtggctcattttattccggtaaagacaacctattccggaagtcgcttggcggaattgtacatggcaaggattgtgtgtttgcatggcgtccctaagaagatagtgtctgatcgaggcagtcagtttacttcaaatttttggaagaaacttcaggaagagatgggttctaagctgaactttagtactgcttatcatccacagacagacggacaaaccgaaagggtgaatcagattttggaagacatgttgagagcttgtgctttagatttcggtggaagttgggataagaatctaccttatgcagaattttcatacaacaacagttatcaagctagtttacagatggctccttacgaagcactgtatggtcggaagtgccgcactccgcttttgtgggatcaaacgggagaacgtcaggttttcgggacggatatcctaagggaagcagaagaaaaggtaaaggtcattcaagaaagattgcgagtggctcagtctcgacataagagttatgccgacaatcgccgtagagatttgagttttgaagaaggagattatgtgtatcttcgtgtcacgcctcttcgaggagttcatcgttttcacaccaaaggaaaattggcaccgcgttatgtgggaccttataagattgtcagtagaagaggagaggttgcttatcagttagaattacctcaatctttggcaggagtccataatgtgttccatgtgtcgcaattgaagaagtgtttaagagtacctaccgaagaagctaatcttgaacagatagaagtccaagaggatttgacttatgttgagaaaccaatccgtatcttggaaacaaatgagagaagaaccaggaatcgagttatccgtttttgcaaactccaatggagtaatcactcggaagaagaatcaacttgggaacgagaagatgaattgaagtcagctcatccgcacctatttgccagttcttccgaatctcgaggacgagattctgtttaa

SEQ ID NO: 15212 - DNA, 4803 bp, Oryza sativa
  Clone ID: TFbOSC900403j.C1.o10.fg
atgtctttcgtgattagtctcacacttctcaccatagtaaatgatgctataattggtaataatttgattagctcctggtttggaatgatgccacgctacaagcctgagtacttgtttggtgtggagggttttgtccaggagttgcgtacgatgtcctttgtcataggatttgagactgcccctttttatgcccagattcctcatgatcgtcatgaagagaagtgccgagtcaaagtcaccttgaacagtaatagtgaagatatcccctcagtgatgttcgaagctggaggaagaaactacaaccatgcatgtcaggaggtggcaaggatcgccataggagagcttcgcgatcgctacagtgatcagttggccgacactgagtatcgctatcatcctcgccaaccccagggaagtgaccgtggcagctaccttgagactgagggaattgagaatgatgctaccacaaggcatttggttgagatgctgtgggctatggatgaaacccgtgcagagactgtgttagcggctcaagatcgtgaagatcggaattgtggtaagatttgcaagctagaagacaaggtggatcgtttggagaaggaattagccgcattaaagggagaagcaccgccgcagaaggccaggattcgtctcaccgcaaggaagagagctctatttgtccctcgctaccaattggcgccaaaggtccgtgtggtggagaaagaagttaccccagccctagcggatcctccggtcgtcaatatggtgaatactcgcagcaacgggaatggccccaacaacaacaataacaacaacaatggagagaatcccacacttgcccaagttctggctcaacagactcagttaatgaacatgatgatgcagcaacttcagaaccagcagaaccaaggaaataaccatgcacctcctcagaataagttagcagaatttcttcgtgtaaggccgcctactttctctagcaccactaatcctgttgaagctggtgattggctgcatgccatagagaagaagttggatttgcttcaatgcactgatcaggagaaggtctcatttgcatcccatcagttgcatggccctgcctctgaatggtgggatcacttccgtctgaacaggactactgctgaacctatcacttggcttgagttcaccgctgctttccggaagacgcatataccatcgggagtggtgtctctcaagaagaaggaattcaggtcgctcactcaagggtctcgctctgttacgaagtatctgcacgagttcaatcgtctggctcgttatgctccggaagatgtgcgcaatgatgaagagcgtcaggagaagttcttggaaggacttaatgatgagctttcttacccactcatgactggggattatcctgatttccagaagttagtggataaggctattcgtcaggaagacaaatacaatcgcatgaagcagaagaaacgtcggatcgctcaattcaagacacaacaggggaataatcaaaggccgcgtcttactttaggaccccagtccatgccacagggaggttcttcgtctgttgttcgtccgcagcgtcagttcttcaacaacaatgctggcaacaacatccgcaatcaagctccacgtcctgttgcagcttcgacacagcaacagcctgccaagagggagcaaggcagcaagcccgtggtgtgtttcaactgtggagacccaggacattatgctgacaagtgtccgaagctccgacgcgtgaaggttgtccctacccagagaaactctaccgtaccagcatcaaaggcccgtgtcaatcatgttgctgctgcagaagctcaagatgctccagatgtgattttgggtacgttccttgttaacttagttcctgcaacagtgcttttcgattctggtgctacacattcattcttatctatgagttttgcgggaaatcatgggatggaagtaaaagatcttagacgtcctttgatggttagtaccccaagtaatcaagcactctctttgcaatgtagcccctctgtcagaatagaaattcaaggagtaccatttctggccaatcttatcctgttagaatccaaagaccttgatgtcatcctagggatggactggttagccagacataaaggtgtgatagactgtgctaacagaaaagtaactctcaccagcaatgatggtcgagttgtaactgttcatgcattgtctcctgagtctttaaggtcaagactgaaccaaataactttggaagagattccggtagtccgggagtattccgaggtgttcccagatgatttacctggtatgccgcctaaaagggatatagagttcagaatagatttggtaccaggaacaactccgatccataagagaccttatagaatggcggccaatgagttggcagaagtcaaaaggcaagtagatgatttgcttcagagaggatacatcagaccgagttcatcaccatggggagctccagttattttcgtggaaaagaaagatcatacccagaggatgtgtgtggactatcgtgcactaaatgatgtgactatcaagaataagtatccgctgctcaggattgatgatttgtttgatcagcttaaaggtgccactgttttctccaagatagatcttcgatcagggtatcaccagttgagaatcaaagaggaagatatacctaagatagcttttaccactaggtatgggttgttcgaatgtactgttatgtcttttggacttaccaatgcccccgctttcttcatgaatttgatgaataaggtgtttatggaatacctagacaagttcgtggtggtctttattgatgatattcttatctattcccgaaccaaagaagagcatgaagaacatcttcgccttgcattggagaagctacgagaacatcagttgtatgctaagtttagcaagtgtgaattttggttgtctgaagtgaagtttcttggtcacgtcatctcagccggaggagttgccgtcgattctagtaatgtggaatccgtaaccaactggaaacaaccaaagacagtttcagagattcgcagtttcttaggcctcgcaggatattatcggaggtttatagagaatttttccaagattgctaagcccatgacacgattgcttcagaaagatgtgaagtacaagtggtcagaagaatgtgagcagagttttcaagagttgaagaatcgcttgatatcagctcctattttgattttgcctgatccaaagaagggtttccaagtatattgcgatgcatccaaacttgggttaggttgtgttctgatgcaagatgggaaggtggttgcctatgcatctcgtcagttacgtccgcataagaagaactaccctactcatgatcttgagttagctgcagtagttcatgcgttgaaaatttggcgtcattatctttttggtactcgtacagaggtatataccgatcacaagagtttaaagtatatctttactcagccggatctgaacatgagacaaaggagatggttggaattaattaaggattatgacatgggaattcattatcacccgggaaaggctaatgttgtagcagacgctcttagcaggaaaggctattgcaatgctacggaaggacgacagttgccattggaattatgcaaggaatttgaaagattaaatttgggaattgtcagtagaggtttcgtggcagccttagaagtgaagcccactctaattgatcaagttagagaagcccaaattaatgatcctgatattcaagaaatcaagaagaatatgagaagaggaaaagctattggtttcttggaagatgagcaaggaactgtatggttgggtgagagaatctgcgtccccgacaacaaagatttaaaagatgcaattctgaaagaggctcatgatactttatactccattcaccctggtagtaccaaaatgtaccaggatctcaaggaaagattttggtgggcaagtatgaagcgtgaaatcgcagaatacgtagcaacagacggacaaaccgaaagggtaaatcagattttggaagacatgttgagagcttgtgctttagatttcggtggaagttgggataagaatctaccttatgcagaattttcgtataacaacagttatcaagctagtcttcagatggctccttacgaagcactgtatggtcggaagtgccgcactccgcttttgtgggatcaaacgggagaacgtcaggttttcgggacgaatatcctaagggaagcagaagaaaaggtgaaaatcattcaagaaagattgcgagtggctcagtctcgacataagagttatgccgacaatcgccacagagatttgagttttgaagaaggagattatgtgtattttcgtgtcacgccttttcgaggggttcatcgttttcataccaaaggaaaattggcaccacgttttgtgggaccttataagattgtcagtagaagaggagaggttgcttatcagttggaattacctcaatatttggcaggagtccataatgtgttccatgtgtcgcaactgaaaaagtgtttaagggtacctaccgaagaagctaatcttgaacagatagaagtccaagaggatctgacctatgttgagaaaccaatccgtattttggaaatagatgagagaagaaccagaaatcgagttatccgtttttgcaaagtccaatggagtaatcactcggaagaagaatcaacttgggaacgagaagatgaattgaagtcagctcatccgcatctgttcgccagttcttccgaatctcgaggacgagattctgtttaa

SEQ ID NO: 15213 - DNA, 4905 bp, Oryza sativa
  Clone ID: TFbOSC900406j.C1.o9.fg
atgccgcgctacaagcttgagtacctgtttggtgttgagggttttgtccaggagttgcgtacgatgtcctttgccattggatttgggactgcccctttttatgcccagattcctcatgatcgtcatgaagagaagtgccgagtcaaagtcaccttgaacagcaatagtgaagagatcccctcagtgatgttcgaagctggaggaagaaactacatccatgcatgtcaggaagtggcaaggattgccataggagagctccgtgatcgctatagtgatcagttggccgacactgagtatcgctaccatcctcgtcaaccccagggaagtgaccgtggcagctaccttgagactgaaggaattgagaatgatgctaccacaaggcatttggttgagatgctgtgggctatggatgaaggtcgtgcggagactgtgttagcggctcaagatcgtgaagaccggaatcgtggtaagatttgcaagttagaagacaaggtggatcgtttggaaaaggaattagccgcgttaaagggagaagcaccgccgcagaaggccaggattcgtcttaccgcaaggaagagagctttatttgtccctcgctatcaattggcgccaaagatggtgaacactcgcagcaatgggaatggccccaacaaccccaataacaataacaatggagagaacccaactctggcccaagttcttgctcaacagacacaactcatgaacatgatgatgcagcaatttcagaatcagcagaaccaaggaaataactatgcacctcctcagaataagttagcagaatttcttcgtgtgaggccgcctattttctctagtaccactaatcctgttgaagctggtgattggctgcatgccatagagaagaagttggatttacttcagtgcactgatcaggagaaggtatcttttgcatcacatcagttgcatggctctgcctctgaatggtgggatcacttccgcctgaataggactactgctgaacctatcacttggcttgaattcactgctgctttccggaagacgcatataccatcaggagtagtgtctctcaagaagaaggagttcaggtcgcttactcagggatctcgctctgttacggagtatctgcacgagttcaatcgtcttgctcgttatgctccggaagatgtgcgtaatgatgaagagcgtcaggagaagtttttgggaggacttaatgatgagctttcttacccactcatggaggacaagtacaattgcatggagcagaggaaacgtcggattgctcacttcaaggcacaacaggggagtaatcagaagccgcgccttactttaggaccccagtctatgccacagggaggttcttcatctgttgttcgtccgcagcgtcagttcttcaacaacaatgctggcaacaacatccgcaatcaagctccacgtcctgttgcagctccaacacagcaacaacctgccaagagggagcaaggcagcaagcccgtggtatgtttcaactgtggagacccaggacattatgctgacaagtgtccgaagccccgtcgcgtgaaggttgtccctgctcagaataactctgctgtaccagcatcaaaggcccgtgtcaatcatgtcgctgctgcagaagctcaagatgctcccgatgtgattttgggtacgttccctgttaactcagttcctgcaacagtacttttcgattctggcgctacacattcattcttatctatgagttttgcgggaaataatgggatggaagtagaagatcttagacgtcctttgatggttagtaccccaagtgatcaagcactctctttgcaacgtagcccctcggtcagaatagaaattaagggagtaccatttctggccaatcttatcttgttagaatccaaagaccttgatgtcatcctagggatggactggttagccagacataaaggtgtgatagactgtgctaacagaaaagtaactctcaccagcaatgatggtcgagttgtaactgttcatgcattgtcatctgagtctttaaggtcaagactgaaccaaataactttggaagagattcctatagttcgggagtattccgatgtgttcccagatgatttacctggaatgccgcccaaaagggatatagagttcagaatagatctggtaccaggaacaactccaatccataagagaccttatcgaatggcagccaatgagttggcagaagtcaagaggcaagtggacgatttgcaacagaaaggatacatcagaccgagttcatcaccatggggagctccggttatttttgtggaaaagaaagaccatacccagagaatgtgtgtggattatcgtgcactaaatgatgtgactatcaagaataagtatccgctgcccagaattgatgatttgtttgatcagcttaaaggtgccactgttttctccaagatagatcttcgatcaggatatcaccagttgagaatcaaagaggaagatatacctaagacagcttttaccactaggtatgggttgttcgaatgtactgttatgtcttttggacttaccaatgcccctgctttcttcatgaacttgatgaataaggtgtttatggaatacctagacaagttcgtagtggtctttatagatgacattcttatctactctcgaaccaaagaagagcatgaagaacatctttgccttgcattggagaagctacgagagcatcaactgtatgctaagtttagcaagtgtgaattttggttgtctgaagtgaagttccttggtcacgtcatctcagccggaggagttgccgttgatcctagtaatgtggaatccgtaaccaactggaaacaaccaaagacagtttcagagattcgcagtttcctaggcctcgcaggatattaccggaggtttatagagaatttttccaagattgctaagcccatgacacgactgcttcagaaagatgtgaagtacaagtggtcggaagaatgtgagcagagttttcaagagttgaaaagtcgcttaatatcagctcctattttgattttacctgatccaaagaagggtttccaagtgtattgcgatgcatccaaacttgggttaggttgtgttttgatgcaagatggcaaggtggttgcctatgcatctcgtcagttacgtccgcatgagaagaactaccctactcatgatattgagttagccgcagtagttcatgcgttgaagatttggcgtcattatcttttcggtactcgtacggagatgtacaccgatcacaagagtttaaagtatatttttactcagccggatctgaacatgagacaacggagatggttggaattaattaaggattatgacatgggaattcattatcacccaggaaaggctaatgttgtagcagatgctcttagcaggaaaggttattgcaatgctacagaaggacgacagttgccattggagttatgcaaggaatttgaaagattaaatttgggaattgtcaatagaggtttcgttgcagccttagaagcgaagcccactctaattgatcaagttagagaagcccaaattaatgatcctgatattcaagaaatcaagaagaatatgagaagaggaaaagctatcggtttcttggaggatgagcaaggaactgtatggttgggtgaaagaatctgtgtccccgataacaaagatttgaaagatgcaattctgaaagaagctcatgatactttatactccatgcaccctggtagtactaagatgtaccaggatctcaaggaaagattttggtgggcaagtatgaagcgtgaaatcgcagagtacgtaccagtatgtgatgtttgtcagcgagtcaaggcggaacatcagaaacccgccggtttgttgcagcctttgaagattcctgaatggaaatgggaagaaattggtatggattttattactggtttacctagaacgtcatcaggccatgactctatttgggtaatagtcgacagacttaccaaagtggctcatttcattccggtaaagacaacctattctggaagtcgattggcggaattgtatatggcaaggattgtgtgtttgcatggcgtccctaagaagatagtgtctgatcgaggcagtcagtttacttcaaatttttggaagaaacttcaggaagagatgggttctaagctgaattttagtactgcttatcatccgcagacagacggacaaaccgaaagggtaaatcagattttggaagacatgttgagagcttgtgctttagacttcggtggaagttgggataagaatctaccctatgcagaattttcgtacaacaacagttatcaagctagtctacagatggctccttacgaagcactgtatggtcggaagtgtcgcactccgcttttgtgggatcaaacgggagaacgtcaggttttcgggacggatatcctaagggaagcagaagaaaaggtgaaaatcattcaggaaagattgcgagtggctcaatctcgtcataagagttatgccgacaatcgccgtagggatttgagttttgaagaaggagattatgtgtatcttcgtgtcacgccttttcgaggagttcatcgttttcgtaccaaaggaaaattggcaccgcgttttgtgggaccctataagattgtcagtagaagaggagaagtcgcttatcagttggagttacctcaatctttggcaggagtccataatgtgttccatgtttcgcaattgaagaagtgtttaagggtacctaccgaagaagctaatcttgaacagataggagtccaagaggatctgacctatgttgagaaaccaatccgtatcttggaaacaagtgagagaagaaccaggaatcgagttatccgtttttataaagtccaatggagtaatcactcggaagaagaatcaacttga

SEQ ID NO: 15214 - DNA, 1908 bp, Oryza sativa
  Clone ID: TFbOSC900410j.C1.o5.gm
atgccgcgttacaagcctgagtacctgtttggtgttgagggttttgtccaggagttgcgtacgatgtcctttgtcattggatttggaactgcccctttttatgcccagattgctcatgatcgtcatgaagagaagtgccgagtcaaagtcaccttgaacagtaatagtgaagatatcccctcagtgatgtttgaagctggaggaagaaactacatccatgcatgtcaggaggtggcaaggatcgccataggagagctccgtgatcgctacagtgatcaattggccgacactgagtatcgctaccatcctcgccaaccacagggaagtgaccgtggcagttaccttgagactgaaggaattgagaatgatgttaccacaaagcatttggttgagatgttgtgggctatggatgaaagtcgtgcggagactgtgttagcagcccaagatcgtgaagattggaatcgtggtaagatttgcaagttagaagacaaggtggatcgtttggagaaggaattagccgcattaaagggagaagcaccgccgcagaaggccaggattcgtcttaccgcaaggaagagagctctatttgttcctcgctatcaattggcgccaaaggttcgtgtggtggagaaagaagttgccccagctcaagcggatcctccggtcatcatcataagtagtgatgaagaagaagaatccaagcgcaacaattccaagattgagtgggtagcaacccaagttgataaagacgagccttcaatcgacctccgatgcttggaagaactagagactactgctgaacctatcacttggcttgaattcaccgctgctttccggaagacgcatataccatcaggagtagtgtctctcaagaagaaggagttcaggtcgcttacccagggatctcgctctgttacggagtatctgcacgagttcaatcgtcttgctcgttatgctccggaagatgtgcgcaatgatgaagagcgccaggagaagtttttgggaggacttaatgatgagctttcttacccactcatggttggagattatcctgatttccagaaattagtggataaggctatacgtcaggaggacaagtacaatcacatggagcagaagaaacgtcggattgctcacttcaaggcacaacagggaaataatcagaagccgcgtcttactttaggaccccagtccatgccacagggaggttcttcgtctgttgttcgtccgcagcgtcagttcttcaacaacaatgctggcaacaacatccgtaatcaagctccacgtcctgttgcagctccagcacagcaacaacctgccaagagagagcaaggcagcaagcccgtggtgtgtttcaactgtggagacccaggacattatgctgacaagtgtccgaagccccgacgcgtgaaggttgtccctgcccagaataactctgctgtaccagcatccaaggctcgtgtaaatcatgtcgctgctgcagaagctcaagatgctccagatgtgattttccttgttaactcagttcctgcaacagtacttttcgattctgccaatgagttggcagaagttaagaggcaagtagatgatttgcttcagaagggatacatcagacctagttcatctccatggggagctccgccgtcgccgtcgctcgggaagaccaccgtcgtgctcgccaagtcgtcgccgtcctcgttcgccccttcgccgtcgccggagatcaccggagcagcttcgccgtcgtcgacccgaaggttcccgccgcttcctccttgtcgccgtcgccgtccgttggtcttccgccgcccgttaggtcaccggtggtacacctctgatcagagtaaaactattcgaatagccgtgcccgcggttatgggcgggtctaacaatgtctttcgtgattag

SEQ ID NO: 15215 - DNA, 2862 bp, Oryza sativa
  Clone ID: TFbOSC9341j.C1.o1.fg
catttgcatcacatcagttgcatggccctgcctctgaatggtgggatcacttccgccttaacaggactactgctgaacctatcacttggcttgaattcaccgctgctttccgaaagacgcatataccatcgggagtagtgtctctcaagaagaaggagttcaggtcgctttcccagggatctcgctctgttacggagtatctgcacgagttcaatcgtcttgctcgttatgctccggaagatgtgcgcaatgatgaagagcgccaggagaagtttttgggaggacttaatgatgagctttcttacccactcatggttggagattatcctgatttccagaaattagtggataaggctattcgtcaggaggacaagtacaatcgcatggagcagaagaaacgtcggattgctcaattcaagacacaacagggaaataatcagaagccgcgtcttactttaggaccccagcccatgccacagggaggttcttcgtctgttgttcgtccgcaacgtcagttcttcaacaacaatgctggcaacaacatccgtaatctagctccacgtcctgttgcagttccagcacagcaacaacctgccaagagggagcaaggcaacaagcccgtggtgtgtttcaactgtggagatccaggacattatgctgacaaatgtccgaagccccgacgcgtgaaggttgtccctgcccagaataactctgctgtaccaacatccaaggctcgtgtaaatcatgtcgctgctgcagaagctcaagatgctccagatgtgattttgggtatgttccttgttaactcagttcctgcaacagtgcttttcgattctggtgctacacattcattcttatctatgagttttgcgggaaatcatgggatggaagtagaagaccttagatgtcctttgatggttagtaccccaagtaatcaagcactctctttgcaacgtagcccctctgtcagaatagaaattcaaggagtaccatttctggccaatcttatcttgttagaatccaaagaccttgatgtcatcctagggatggactggttagccagacataaaggtgtgatagactgtgccaacagaaaagtaactctcaacagctatgatggtcgagttgtaactgttcatgcattgtcatctgagtctttaaggtcaagactgaaccagataactttggaagagattcctatagtccgggagtatcctgatgtgttcccagatgatttacctggtatgccgcctaaaagggatatagagttcagaatagatttggtacctggaacaactccgatccataagagaccttatcgaatggcagccaatgagttggcagaagttaagaggcaagtagatgatttgctacagaaaggatacatcagaccgagttcatcaccatggggagctccggttatttttgtggaaaagaaagaccatactcagagaatgtgtgtggactatcgtgcactaaacgatgtgactattaagaataagtatccactacccaggattgatgatttgtttgatcaacttaaaggtgccactgttttctccaagatagatcttcgatcagggtatcatcagttgagaatcaaagaggaagatatacctaagacagcttttaccactaggtatgggttgttcgaatgtactgttatgtcttttggacttaccaatgcccctgctttcttcatgaacttgatgaataaggtgtttatggaatacttagacaagttcgtggtggtctttatagatgatattcttatctactctcgaaccaaagaagagcatgaagaacatcttcgccttgcattggagaagctacgagaacatcaactgtatgctaagtttagcaagtgtgaattttggttgtccgaagtgaaattccttggtcacatcatctcagccggaggagttgccgtcgatcctagtaacgtggaatccgtaaccaattggaagcaaccaaagacagtttcagagattcgcagtttcctaggccttgcaggatattatcggaggtttatagagaatttttccaagattgctaagcccatgacacgactgcttcagaaagatgtgaagtacaagtggtcggaagaatgtgagcagagttttcaagagttgaaaagtcgcttaatatcagctcctattttgattttgcctgatccaaagaagggttttcaagtgtattgtgatgcatccaaacttgggttaggttgtgttctgatgcaagatgggaaggtggttgcctatgcctctcgacagttacgtccgcatgagaagaactaccctactcatgatattgagttagctgcagtcgttcatgcattgaagatttggcgtcattatcttttcggtactcgtacagaagtgtacaccgatcacaagagtttaaagtatatctttactcagtcggatctgaacatgagacaacggagatggttggaattaattaaggattatgacatgggaattcattatcatccgggaaaggctaatgttgtagcagacgctcttagcagaaaaggctattgcaatgctacagaaggacgacagttgccattggaattatgcaaggaatttgaaagattaaatttgggaattgtcggtagaggtttcgttgcagccttagaagcgaagcccactctaattgatcaagttagagaagcccaaattaatgatcctgatattcaagagatcaagaagaatatgagaagaggaaaagctattggtttcttggaggatgagcacggaactgtatggttgggtgagagaatctgtgtccccgacaacaaagatttaaaggatgcaattctgaaagaagctcatgatactttatactccattcaccctg

SEQ ID NO: 15216 - DNA, 3186 bp, Oryza sativa
  Clone ID: TFbOSC26384j.C1.o3.fg
atggggaaaaatcagggacttgaacaagtgatgggtaaattggtggacatgcttgcaaagaaacttagtgaggccccaactacaagtaatgcagtggttcctcatactgaaacaatgcaaaaaattgagttgatgcaaaatgacattaagttggagggtgttaaaaattatttgagttggtcaaaaagagctttattgatcttgaaaacaaagggattagaagaatatgttacaagggagataaaggagcctgagagcacttcaaatgttgagtggaagacttggagtactaccaactcttcagtagtagcgtggttgttgacttcacttattcctgctattgctacaactgttgagaccatatctagtgcaagtgagatgtggaaaactctcaccaatctctactcaggagaaggaaatgtaatgctaatggtggaggcacaagagaagataagtgctatgagacagggggagcgttctgttgcagaatatgttgcagaactgaagcatctatggtctgatttggatcattatgatcctcttggaagggtcattgagttcttgaagggcctaaattcagagtttgaagggagaagggatgcaatgtttcatcaaaccactcttcctaccttggatgaggctattgcagctatggcacaggaggagcttaagaagaaagtattgcctagtgtcacaccatcttcaccaagtgccacatatgtagttgcacaaagtaaagagactagggagtgcttcaattgtggtgaaatggggcaccttatgcgtgattgccgtgctcctcgcaagcctagttatgggagaggaagatttggtgacaggggtggagcaagaggtggaagaagttatgcaggtagaggtaacagaggtaggggttatgagtatagaggtgatcacagagctaatgtggtcactcttgaagagggttcttctggacctacaaatgttgatgttgccaaccttgttcattctacctcagctctcattcaaattggatacttgactcgggtgcatctagacatgtcacggatctcccttgatcgtgagaattgtttaattcaggagaggcaaatagggaagaaacttgggattggcgtcaggcgtgatggactttggtatttggatcaaaaggagacaagtgaagatgtatgtcttgcattgatggcttctacaagtgaagaagaggctaagtttattagaactgataatggaggggagtatatgaacaatgaatttagtagctttctttcatcagaaggaatattgcatcaaacttcttgtcctgatactcctccacaaaatggagtagctgagaggaaaaaccgtcatcttttggagacagctcgatcattgatgtatactatgaatgtacctaaattcttgtggagtgaggcagtaatgacagcaacttatcttatcaaccgcacaccatcaaggatactcggaatgaagacaccatgtgagatgatatttggaaagaataaatttggtgttccaccaaaagtgtttggttgcacttgttttgttagagatcatagaccttccattggaaaacttgatcctcgggctgtcaaatgcatctttgtaggctattcatcttgccagaaggggtataagtgttggagtccattagaacgacgaacctttgtaagtatggatgttacttttagagaatatgtcccattctatggtgagaagacagatttaagttctttattcattgatcttgatgattcaactagtggttatgatggtcaacaaatggaaggtgaaatattgggtccaaagggagatgaacaatcaaagaaggaaaagcttgtgattggttcaattccatgtcctataggtggtcctgttgcacaggagcaagaatggaggaagccacatgaagaggaaaatcttcaagtatacacaaggagagcaaggtgtccagtaatacaacaagttgaagaggataatcaggtagaggaagatgtaagtcatgagcaagggtctttggagtcagggggagaagatgaagaagttagagaaaaaggatctgacatgccaattgctgtcagaaaaggtgtaaggagcaatgcagggaagaaagttgtcaattgtaagtgggtatacacaataaagcaaaaccctgatggaaaggtggaaagatacaaagcaaggcttgtggttaagggatatagtcaaacatatggaattgattatgatgaaacttttgcaccagtagcaaagatgagcacgctagatgtcaagaatgcctttttacatggagaccttcaggaagagggatgtcacactactattcttgctgtgtatgtggatgatatgattatcacatgggatgattctatagagatagcaagattgaaagaaaatctaagtaaggaatttgaagtcaaggatttgggtatgcttagttgtcgaccggcctctacaccaattgagcaaaatcttaagctttgtgctgagtcgggagatccagtgaataaggagagatatcaaagacttgtagggcggctgatatatttatgtcacacaaggccggatataacttatgcagtaagtgtggtaagtcgatacatgcatgaccctagaagtggtcacatggatgccgtgtataggatcttgagatatttgaaaggtagtcctggcaaaggcttgtggtttaagagaagtggtcatcttagtttggaaggctattgtgatgcagattgggctagcagtcttgatgatagaaggtcaacctctgggtattgtgtatttgttggtggcaatttggtgtcttggaggagtaaaaaacaacctgtggtttctcgctcaacagctgaagcagaatatagggcaatgtcggtgggtctgagtgagatgttatggttgaggaatcttctatgtgagttgaagttgttgaagaatacttgcatgaagctatggtgtgacaataagtcagctatcaatattgccaacaatcctgttcaacatgatcgaacaaaacatatagagatagatcgtttctttataaaggaaaaactagatgagggaatgttgaagctagactttgtaatatctggagaacaaatagcggattgtctaacaaaggctttaggtgttgcagagtgtttgtctatgtgtaacaagatgggcatgatagatatctatcgcccatcttga

SEQ ID NO: 15217 - DNA, 4692 bp, Oryza sativa
  Clone ID: TFbOSC400682j.C1.o3.fg
atggagaagggcataattgtctcaatattagctctagctagaggcccatctactcatgtatatgtaaataacgatagcaatactgaaggggtgaagcttccagagaaaaattcacaaactacatggcatcagagccatgctcctggcggccggcggcgacgaaccctagctgagggagcaagcgctgaggttggagttcttggtggtggtgtaggacgacaaggagagtttgctttgttacagcagttagttgagtgctgcttgattaaaatgggggaaaatcagggacttgaacaagtgatgggtaaattggtggacatgcttgcaaagaaatttagtgaggtcccaactacaagtaatgcagtgattcctcatactgaaacaatgcaaaaaattgagttgatgcaaaatgatattaagttggagggtgtcaaaaattatttaagttggtcaaggagagcattgttgattttgaagactaagggattagaaggatatgtcaccggagaagtgaaggagcctgagagtgctagtgcagaatggaggacttggagcactaccaactctttagtagtagcatggttgttgacttcacttatccctgctattgctacaactgttgagaccatctcaagtgcaagtgagatgtggaaaactctcactaatctctactcaggagaaggaaatgtgatgctaatggtggaggcacaggagaagataagtgttttgagacagggggagcgttctattgcagaatatgttgcagaattgaagcatctatggtctgatttggatcattatgatcctcttgggttagagcaccccgattgtatagcaaaaatgaggaaatggattgagcgcagaagggttattgaattcttgaaaggcctaaatccagagtttgaagggagaaaagatgctatgttccatcagactactcttcctaccttggatgaggctatagcagctatggctcaagatgagcttaagaggaaagtattgcctaaggctacaccaccttcatcaagtcccacctatgcaatgctacaaggtaaagagactagagagtgttttaattgtggtgaaatggggcatctcatgcgtgattgtcgtgctcctcgcaagcctagttatggaagaggaagaagtggtgatagaggtggagcaagaggtggaagaggttatgcaggtagagctaacagaggtagaggctatgagtatagaggtgatcacagagctaatgtggtcactcttgaagagggttgttctggacctacaaatgttgatgttgccaaccttgttcattctatctcaggtaactcaaaccaagcatttatgtcaatcaatagttctcattcaaattggatacttgactcgggtgcatccagacatgtcacgggtatgtgtggagaatttgcatcatataaaccatacccatttacacgaaaagaaacaattgaaactgcagatggaacatcatgcccagttaagggagagggaacagtacaatgtactccttcaatcactttatcatcagtgttatatgtcccttcttttccagtgaatttgatttcaataagttctcttgttgatcatatggattgtcgggtatcccttgatcgtgagaattgtttaattcaggagaggcaaacagggaagaaacttgggactggcgtcaggcgtgatggactttggtatttggatagaaaggagacaagtgaagatgtatgtcttgcattgatggcttctacaagtaaagaagaggctaaggtattacttttgcattgtcgattggggcatatatcttttgaaactatgagtaagatgtttccagcagaactaagtagagtgaataaacataagttagtatgtgatgcatgtgagtatggaaaacatacaagaacatcatatgtgagtagaggactccgaagtatgttaccatttatgctaattcactcagatgtttggacttcacctatggtctctatgagtggaatgaagtattttgttacctttattgattgctactctcgcatgacatggttatatcttatgaggcataaggatgaggtgtttaaatgcttccagaatttctatgcatacattaaaaatcattttaatgctcgagttcagtttattagaactgataatggcggggagtatataaacaatgaatttagtagctttctttcatcagaaggaatattgcatcaaacttcttgtcctgatactcctccacaaaatggggtggctgagagaaaaaaccgtcatcttttggagacagctcgctcattgatgtatgctatgaatgtacctaaattcttgtggagtgaagcagtaatgacagcaacttatcttatcaaccgcacgccatcaaggatacttggaatgcagacaccatgtgagatgatatttggaaagaatgaatttgttgttccaccaaaagtgtttggttgcacttgttttgttagagatcatagaccttccgttggaaaacttgatccttgggctgtcaaatgcatctttataggctatccatctggccagaaggggtataagtgttggagtccatcagaacgacgaacctttgttagtatggatgttacttttagagaatctgtcccattctacggtgagaagacagatttaagttctttattcgttgatcttgataattcaactagtggtcatgatggtcaacagatggaaggtgaaatattgggtccaaagggagatgaacaatcaaagaaggaaaagtttgtggttggttcaattccatgtcctatgggtggtcctgttgcacaggagcaagaatggaggaagccacatgaagaggaaaatcttcaagtatacacaaggagaacaaggtgtccagtaatccaacaagttgaagaggataatcaggtagagaaagatgtaagtcatgagcaagggtctttggagtcaaggggagaagaagaggaagttagagaagaatctgacttaccaattgctgtcagaaagagtgtgagaagcaatgcaggtaaacctccactaaggtatggttttgaagatcaagatgagggtgatgaagaaaataatatatccaactttgtttcctatgactccttgtcatccacatataaagcctttgtagcatcactagattcaatggaaatcccaaaggattggagagaagcaaagcaagatccaaggtggcatcaagctatgttagatgaactagaggctcttgaaaagaacaaaacatgggatcttgtaccatttcctgaaggaaagaaagttgtcaactgtaagtgggtttatacagtaaagcaaaatcctaatggaaaggtggaaagatacaaagcaaggctggtggctaagggatatagtcaaacatatggaattgattatgatgaaacttttgcaccagtagcaaagatgagcacggtaagaactctcatatcttgtgcagctaattttgattggccattgcatcagctagatgtcaagaatgcatttttacatggagatcttcaagaagaggtgtatatggatatcccaccgggatttgctacttcacaaactgaaggaaaggtgctgagattgaagaaatctttgtatggtcttaaacaatcaccaagagcatggtttgatcggtttaggcgtgcaatgtgtgctatggactataagcaatgtaatggagatcatacagttttttatcatcatagtggagatcatataaccatccttgctgtctatgttgatgatatgattatcactgggaatgattgcttggagataactaggttgaaacagaatctaagcaaagaatttgaagttaaggacctaggccagttgaaatattttctgggtattgaaattgcaagatctcctagagggatagttctgtcacaacggaaatatgcattggatttgctcagtgacacaggtatgcttggatgtcgcccagcctctacaccaattgatcaaaatcataaattatgtgcacagtctggaaatccagtgaataaggaaagataccaaagattggtgggaagactgatatatttgtgtcatacacgacctgacataacttatgctgtcagtatggtgagtcgatatatgcatgatccaaggagtggtcatatggatgcggtctataggatcttgagatatttgaagggaagcccaggtaaaggcctatggtttaagaaaaatggacacttggaggttgaaggctattgtgatgcagattgggcaagttgtcctgatgatagaagatcaacttcaggctattgtgtgtttgttggtggcaatttagtatcttggaggagcaagaagcaaccggtggtgtctcgctcaactgctgaggcagaatatcgggcaatgtcagtgagtttgagtgagttgttatggctaaggaatcttctttctgagttaaagttgtcggtggatactcccatgaaattgtggtgtgacaacaagtcagcaatcaacattgctaacaacccagttcagcatgatcgaacaaagcatgtggagttggatcgtttctttatcaaggaaaaactggatgagggagttttggaattagaatttgtaacgtctagtggacaagttgctgattgtttaacaaagggtttaggtgttaaagagtgtaatcgttcgtgtgacaagatgggtatgatagatatctatcacccatcttga

SEQ ID NO: 15218 - DNA, 1239 bp, Oryza sativa
  Clone ID: TFbOSC400773j.C1.o32.fg
atggcacatggggagcttaagaagaaagtattgcctagtgtcacaccatcttcaccaaatcccacatatgtagttgcacaaagtaaaaagatcagggagtgcttcaattgtggtgagatgggacaccttatgcgtgattgtcgtgctccacacaagcctagttatgggagaggaagatatggtgataagggcggggcaagaggtggaagaggtcatgcgggtagaggtaacagaggtagaggctatgagtatagaggtgatcacaaagctaatgtagtcactcttgaagagggttcttctagacctacaaatgttgatgttgccaaccttgttcattccacttcacataactcaaaccaagcatttatgtccatcaatagatctctttcaaattggatactagactcgggtgtatccagacatgtcacggctgcacttgctttgttagagatcatagaccttctgttggaaaacttgatcctcgagctgtcaaatgcttctttatatgctattcatctggccagaaggggtataagtgttggagtccatcagaacgacgaaccttttggtcatgatagtcaacaaatggaaggtgaaatcttgggtccaaagggacataaactatcaaagaaagaaaagtttgtggttggttcaattccatgtcctatgagtagtcctattgcacaagagcaagaatggagtaagccatatgaagaggaaaatcttcaagtttacacaagtataacaaggtctccaataatccaacaagttgaagaggataatcaggtagtggaagatgtaagtcatgatgactccattctaaggtcatacaacttttcggtgctttctgtcttgccaatctattcgaagctcatcaaagcaggactcagaatttggctctacagtggagatgccgacggtagggtcccagtgatcgggtcaaggtactgcgtggaagcgcttgggctgcatatcaagagggactggcaaccttggtacctgaacagacaggttgcaggaagatttgtggagtacgatggcatgaccatggtgacgattagaggtgctggacatttggtaccccttaataaacctgaagaagggctcactctgattgacacatttcttcttggcctgaagctcttggtaacttttgttggtaaagcatctcaagtctcaagcaattacattgataagattgtgctaaacattcaaagaattaacaagggcaagttctag

SEQ ID NO: 15219 - DNA, 3186 bp, Oryza sativa
  Clone ID: TFbOSC403824j.C1.o5.fg
atggggaaaaatcagggacttgaacaagtgatgggtaaattggtggacatgcttgcaaagaaacttagtgaggccccaactacaagtaatgcagtggttcctcatactgaaacaatgcaaaaaattgagttgatgcaaaatgacattaagttggagggtgttaaaaattatttgagttggtcaaaaagagctttattgatcttgaaaacaaagggattagaagaatatgttacaagggagataaaggagcctgagagcacttcaaatgttgagtggaagacttggagtactaccaactcttcagtagtagcgtggttgttgacttcacttattcctgctattgctacaactgttgagaccatatctagtgcaagtgagatgtggaaaactctcaccaatctctactcaggagaaggaaatgtaatgctaatggtggaggcacaagagaagataagtgctatgagacagggggagcgttctgttgcagaatatgttgcagaactgaagcatctatggtctgatttggatcattatgatcctcttggaagggtcattgagttcttgaagggcctaaattcagagtttgaagggagaagggatgcaatgtttcatcaaaccactcttcctaccttggatgaggctattgcagctatggcacaggaggagcttaagaagaaagtattgcctagtgtcacaccatcttcaccaagtgccacatatgtagttgcacaaagtaaagagactagggagtgcttcaattgtggtgaaatggggcaccttatgcgtgattgccgtgctcctcgcaagcctagttatgggagaggaagatttggtgacaggggtggagcaagaggtggaagaggttatgcaggtagaggtaacagaggtaggggttatgagtatagaggtgatcacagagctaatgtggtcactcttgaagagggttcttctggacctacaaatgttgatgttgccaaccttgttcattctacctcagctctcattcaaattggatacttgactcgggtgcatctagacatgtcacggatctcccttgatcgtgagaattgtttaattcaggagaggcaaatagggaagaaacttgggattggcgtcaggcgtgatggactttggtatttggatcaaaaggagacaagtgaagatgtatgtcttgcattgatggcttctacaagtgaagaagaggctaagtttattagaactgataatggaggggagtatatgaacaatgaatttagtagctttctttcatcagaaggaatattgcatcaaacttcttgtcctgatactcctccacaaaatggagtagctgagaggaaaaaccgtcatcttttggagacagctcgatcattgatgtatactatgaatgtacctaaattcttgtggagtgaggcagtaatgacagcaacttatcttatcaaccgcacaccatcaaggatactcggaatgaagacaccatgtgagatgatatttggaaagaataaatttggtgttccaccaaaagtgtttggttgcacttgttttgttagagatcatagaccttccattggaaaacttgatcctcgggctgtcaaatgcatctttgtaggctattcatcttgccagaaggggtataagtgttggagtccattagaacgacgaacctttgtaagtatggatgttacttttagagaatatgtcccattctatggtgagaagacagatttaagttctttattcattgatcttgatgattcaactagtggttatgatggtcaacaaatggaaggtgaaatattgggtccaaagggagatgaacaatcaaagaaggaaaagcttgtgattggttcaattccatgtcctataggtggtcctgttgcacaggagcaagaatggaggaagccacatgaagaggaaaatcttcaagtatacacaaggagagcaaggtgtccagtaatacaacaagttgaagaggataatcaggtagaggaagatgtaagtcatgagcaagggtctttggagtcagggggagaagatgaagaagttagagaaaaaggatctgacatgccaattgctgtcagaaaaggtgtaaggagcaatgcagggaagaaagttgtcaattgtaagtgggtatacacaataaagcaaaaccctgatggaaaggtggaaagatacaaagcaaggcttgtggttaagggatatagtcaaacatatggaattgattatgatgaaacttttgcaccagtagcaaagatgagcacgctagatgtcaagaatgcctttttacatggagaccttcaggaagagggatgtcacactactattcttgctgtgtatgtggatgatatgattatcacatgggatgattctatagagatagcaagattgaaagaaaatctaagtaaggaatttgaagtcaaggatttgggtatgcttagttgtcgaccggcctctacaccaattgagcaaaatcttaagctttgtgctgagtcgggagatccagtgaataaggagagatatcaaagacttgtagggcggctgatatatttatgtcacacaaggccggatataacttatgcagtaagtgtggtaagtcgatacatgcatgaccctagaagtggtcacatggatgccgtgtataggatcttgagatatttgaaaggtagtcctggcaaaggcttgtggtttaagagaagtggtcatcttagtttggaaggctattgtgatgcagattgggctagcagtcttgatgatagaaggtcaacctctgggtattgtgtatttgttggtggcaatttggtgtcttggaggagtaaaaaacaacctgtggtttctcgctcaacagctgaagcagaatatagggcaatgtcggtgggtctgagtgagatgttatggttgaggaatcttctatgtgagttgaagttgttgaagaatacttgcatgaagctatggtgtgacaataagtcagctatcaatattgccaacaatcctgttcaacatgatcgaacaaaacatatagagatagatcgtttctttataaaggaaaaactagatgagggaatgttgaagctagactttgtaatatctggagaacaaatagcggattgtctaacaaaggctttaggtgttgcagagtgtttgtctatgtgtaacaagatgggcatgatagatatctatcgcccatcttga

SEQ ID NO: 15220 - DNA, 4362 bp, Oryza sativa
  Clone ID: TFbOSC422802j.C1.o10.fg
atgggggaaaatcagggacttgaacaagtgatgggtaaattggtggacatgcttgcaaagaaatttagtgaggccccaactacaagtaatgcagtgattcctcatactgaaacaatgcaaaaaattgacttgatgcaaaatgatattaagttggagggtgtcaaaaattatttaagttggtcaaggagagcattgttgattttgaagactaagggattagaaggatatgtcaccggagaagtgaaggagcctgagagtgctagtgcagaatggaggacttggagcactaccaactctttagtagtagcatggttgttgacttcacttatccctgctattgctacaactgttgagaccatctcaagtgcaagtgagatgtggaaaactctcactaatctctactcaggagaaggaaatgtgatgctaatggtggaggcacgggagaagataagtgctttgagacagggggagcgttctattgcagaatatgttgcagaattgaagcatctatggtctgatttggatcattatgatcctcttgggttagagcaccccgattgtatagcaaaaatgaggaaatggattgagcgcagaagggttattgaattcttgaaaggcctaaatccagagtttgaagggagaaaagatgctatgttccatcagactactcttcctaccttggatgaggctatagcagctatggctcaagatgagcttaagaggaaagtattgcctaaggctacaccaccttcatcaagtcccacctatgcaatgctacaaggtaaagagactagagagtgttttaattgtggtgaaatggggcatctcatgcgtgattgtcgtgctcctcgcaagcctagttatggaagaggaagaagtggtgatagaggtggagcaagaggtggaagaggttatgcaggtagagctaacagaggtagaggctatgagtatagaggtgatcacagagctaatgtggtcactcttgaagagggttgttctggacctacaaatgttgatgttgccaaccttgttcattctatctcaggtaactcaaaccaagcatttatgtcaatcaatagttctcattcaaattggatacttgactcgggtgcatccagacatgtcacgggtatgtgtggagaatttgcatcatataaaccatacccatttacacgaaaagaaacaattgaaactgctgatggaacatcatgcccagttaagggagagggaacagtacaatgtactccttcaatcactttatcatcagtgttatatatcccttcttttccagtgaatttgatttcaataagttctcttgttgatcatatggattgtcgggtatcccttgatcgtgagaattgtttaattcaggagaggcaaacagggaagaaacttgggactggcatcaggcgtgatggactttggtatttggatcgaaaggagacaagtgaagatgtatgtcttgcattgatggcttctacaagtaaagaagaggctaaggtattacttttgcattgtcgattggggcatatatcttttgaaactatgagcaagatgtttccagcagaactaagtagagtggataaacataagttagtatgtgatgcatgtgagtatggaaaacatacaagaacatcatatgtgagtagaggactccgaagtatgttaccatttatgctaattcactcagatgtttggacttcacctatggtctctatgagtggaatgaagtattttgttacctttattgattgctactctcgcatgacatggttatatcttatgaggcataaggatgaggtgtttaaatgcttccagaatttctatgcatacattaaaaatcattttaatgctcgagttcagtttattaaaactgataatggcggggagtatataaacaatgaatttagtagctttctttcatcagaaggaatattgcatcaaacttcttatcctgatactcctccacaaaatggggtggctgagagaaaaaaccgtcatcttttggagacagctcgctcattgatgtatgctatgaatgtacctaaattcttgtggagtgaggcagtaatgacagcaacttatcttatcaaccgcacgccatcaaggatacttggaatgcagacaccatgtgagatgatatttggaaagaatgaatttgttgttccaccaaaagtgtttggttgcacttgttttgttagagatcatagaccttccgttggaaaacttgatcctcgggctgtcaaatgcatctttataggctatccatctggccagaaggggtataagtgttggagtccatcagaacgacgaacttttgttagtatggatgttacttttagagaatctgtcccattctacggtgagaagacagatttaagttctttattcgttgatcttgataattcaactagtggtcatgatggtcaacagatggaaggtgaaatattgggtccaaagggagatgaacaatcaaagaaggaaaagtttgtggttggttcaattccatatcctatgggtggtcctgttgcacaggagcaagaatggaggaagccacatgaagaggaaaatcttcaagtatacacaaggagaacaaggtgtccagtaatccaacaagttgaagaggataatcaggtagagaaagatgtaagtcatgagcaagggtctttggagtcagggggagaagaagaggaagttagagaagaatctgacttaccaattgctgtcagaaagagtgtgagaagcaatgcaggtaaacctccactaaggtatggttttgaagatcaagatgagggtgatgaagaaaataatatatccaactttgtttcctatgactccttgtcatccacatataaagcctttgtagcatcactagattcaatggaaatcccaaaggattggagagaagcaaagcaagatccaaggtggcatcaagctatgttagatgaactagaggctcttgaaaagaacaaaacatgggatcttgtaccatttcctgaaggaaagaaagttgtcaactgtaagtgggtttatacagtaaagcaaaatcctaatggaaaggtggaaagatacaaagcaaggctggtggctaagggatatagtcaaacatatggaattgattatgatgaaacttttgcaccagtagcaaagatgagcacggtaagaactctcatatcttgtgcagctaattttgattggccattgcatcagctagatgtcaagaatgcatttttacatggagatcttcaagaagaggtgtatatggatatcccaccgggatttgctacttcacaaactgaaggaaaggtgctgagattgaagaaatctttgtatggtcttaaacaatcaccaagagcatggtttgatcggtttaggcgtgcaatgtgtgctatggactataagcaatgtaatggagatcatacagttttttatcatcatagtggagatcatataaccatccttgctgtctatgttgatgatatgattatcactgggaatgattgcttggagatcactaggttgaaacagaatctaagcaaagaatttgaagttaaggacctaggccagttgaaatattttctgggtattgaaattgcaagatctcctagagggatagttctgtcacaacggaaatatgcattggatttgctcagtgacacagagtctggaaatccagtgaataaggaaagataccaaagattggtgggaagactgatatatttgtgtcatacacgacctgacataacttatgctgtcagtatggtgagtcgatatatgcatgatccaaggagtggtcatatggatgcggtctataggatcttgagatatttgaagggaagcccaggtaaaggcctatggtttaagaaaaatggacacttggaggttgaaggctattgtgatgcagattgggcaagttgtcctgatgatagaagatcaacttcaggctattgtgtgtttgttggtggcaatttagtatcttggaggagcaagaagcaaccggtggtgtctcgctcaactgctgaggcagaatatcgggcaatgtcagtgagtttgagtgagttgttatggctaaggaatcttctttctgagttaaagttgtcggtggatactcccatgaaattgtggtgtgacaacaagtcagcaatcaacattgctaacaacccagttcagcatgatcgaacaaagcatgtggagttggatcgtttctttatcaaggaaaaactggatgagggagttttggaattagaatttgtaacgtctagtggacaagttgctgattgtttaacaaagggtttaggtgttaaagagtgtaatcgttcgtgtgacaagatgggtatgatagatatctatcacccatcttga

SEQ ID NO: 15221 - DNA, 2241 bp, Oryza sativa
  Clone ID: TFbOSC401006j.C1.o31.fg
atgggtcctcaaatagagcgagttgtagatgtgagcgtttctcctcctaatgataaagagctatcatctgaagaggaagagaaatgcatacatctcaatgctcaagctactaatgttttatttagtgttttgagtgaagatgtatttaaaaccatcatgccgcttaaagatgctcatctcatttggaccacactcaaggagagatatgacaagtccaaatgtgatgatgtactctttttggaagaaccatttgaggaatgttcaacttcatcaccaaattgcgaagaacctcaagtgactaccttcgatgatccagataatcatcccacgtccaccttatcaacacatgactacattgaaggcaatgaattggtgagtaaggttgacgatcgtccaattctcccattggattccaacaacactgataatgaaattgtcatattgcattgtgttgttgactcatgcatctcacctagccccaagtatatgtgtgaggatgatatggataaatgctctacttcctatagtacttgtggaactaaccttttgaagggagaagtaaatgagccccaatggacaagtgaagaatccacctcaccaagatgctcatcttctatttccaaagatcatgctttctttatgggaaaagatggtgacttcgagtttgatcacttgagcaagaaggacataacaattgtgataaagctcatggagatcattaagaagcaacaagcatgcctcattaagaagaatgaagaaatcatgagtctaaccaaagaacacaagaaacttaaggattttcgttcttcattgattatgaggtataaaaaattggaaagtgaatttgcttgtgccactaattctattgtgtgtgtagcatctttggagaagcaaaatcaagagcttaaatctcaacttgaggagatcactatcaagtatgtggatttacaagaaagacatgatgaacttttgtgttctcatgataatcttgtagattctcatgccatgctagaggtagctcatgaggcgataattacaacggtgaaatcctatgagcctcatgttcaagttgatcttattacttgtactaacacttgttgctccaaagaaaatctttccccgagcactacatgtgacttggattgtgtaggcaaaggggagaagcaaatgtattatggacttgtgtgcattgctcaaccttctcaagataaccgtgagggcatggtgaataagcttgagaagggatcaaccgtggtgtgcaccaagatccatcaaagggatatcaagtccatcaatgctcataccaagggacgaaatcaaaagatgatcaagagttccattacttgcttcaagtacaagaaagtgggacatcatgttagagattgcccttggaagaaaggaaataagttgagcaagaaggacattcctcgcatcaagtgcttcaagtgcaccgaagcgggacactttgcctcaaggtctccttgcacattggatgaacaatgcaaaacatcaagtgagaggcaaaccggcaacaagcaaaccgaaaagcaatatagaagcaaaagtcgactttgctataattgctgggcaaagggacatattggtaaaaattgtcccaagggtaacattcctaagccaagtctctcatttgattataatttgcttaggaatgccaaaaatgacatttgtgctactagggtgatttgttcaccacacactagcccacaggccatttgggtgcctaagtctcttgtgactaacctttatggacccaatgttgttggggaccaaaatgtgctaaaattttattgtggaaccaaaggcttcggtaagaccgctcgatttgcaatcaagctcatctatcaccatgccatcgagcccggaggctctaggtggataccccgaagactccaggaagattccttggtcacccgaaggatcaaggccgaaggctccaagctcacaagaacatgcatacttaaaggttatccttctgtgcaagaatcacgggtgagaccacaagaagtccatgatgaccaaggtggactactcgatcaacctcaatcaactcaagtcaacctgccgcaattgactatgaagaacatgaagaacatgcttccgaaggaagatggtgtaaatgctaaaccagatcgggtcatggccttacaagaagagcacaagcactatcaggacgtagactgtgatcaaggagttaaacatgttcatgatgagaaagcttaa

SEQ ID NO: 15222 - DNA, 1134 bp, Oryza sativa
  Clone ID: TFbOSC27738j.C1.o1.fg
atggctgacaatgagaaaggcaataaggtcagaagtcaggatattggtacctcaagctcccgagtgaatgaagcaccagacaccagtcgtgtgacactggtccaacacctgattaaccagaaccgattgcttatagagatactacagcagcatcagacgccaatgctgaacctgaatcaaatacaacctcaagtgcagttggaggcagtccaagcactcaccccacaagtcagcatgccgccagcatcccgaaggacccatgatgacgtgccacctgttgacccaaaagaagcaagtaacatttgctttacgtgtgatgagcaagtgcactatgcaagggagcgtcctcagcagaaaagaaaaacaccaatgcgaaccgaagatgaagtccgtaagatgatcattaccagcacagaatggcctccaccaggaatgacaagacgtcagagaagaaataccttccgaggtgcaccacagttgacagagcatcttttagctaatggaggtagagtatctgatagtgaagattcagatcaagtctcctcagatgatgaagatgaaatggaacgtaaggcatgctctcgttgtggagaaatcggtcatgtcgccagctcgtgtgccactatatgcgttcattgcgaggaagaccatccacccgacaggtgtccaacgagcaggatcacttgtttcttttgtgaaggaactgatcatgtaccaaaagattgtcaattcagttttctgctgacgaagaagatggctaaccaacccgccagttccaacggagagaagcatcaaggcaacaccaatcctcgccaagattacagtttcagcctaactccagtgccaggacagaggaatcgaaatgagaaaagaaaatgccgagtccgggaagacatctgttgcttcaattgtcaaggaatgggtcatttcgccgacaagtgcccaaaaccgagaaacatagctgccggcacgtcagtccacgcaactccctgcaatcagaagcttgctcctcaacgaattgtcatccatgcatccccgaagcagtcctatagcccgcgttgcaacagctccaattccaatgaatgcactaccacaaggtgtcaatgctcaatttcagccccagccaccagctga

SEQ ID NO: 15223 - DNA, 1128 bp, Oryza sativa
  Clone ID: TFbOSC15261j.C1.o1.fg
atggctgacaatgagaaaggcaataaggtcagaagtcaggacattggtacctcaagctcccgagtgaatgaagcaccagacaccagttgtgtgacactggtccaacacctgattaaccagaaccgattgcttatagagatactacagcagcatcagacgccaattctgaacctgagtcaaatacaacctcaagtgcagttggaggcagtccaagcactcacaccacaagtcagcatgccgccagcatcccgaaggactcatggtgacgtgccacatgttgacccaaaagaagcaagtaacatttgctttatgtgtgatgagcaagggcactatgcaagggagcgtcctcagcagaaaagaaaaacaccaatgcgaaccgaagatgaagtccgtaagatgatcattaccagcacagaatggcctccaccaggaatgacaagacgtcagagaagaaataccttccgaggtgcaccacagttgacagagcatcttttagctagtggaggtagagtgtctgatagtgaagattcagatcaagtctcctcagatgatgaagatgaaatggaacgtaaggcatgctctcgttgtggagaagtcggtcatgttgccagctcgtgtgccactacatgcgttcattgtgaggaagaccatccacccgacaggtgtccaacgagcaggatcacttgtttcttttgtgaaggaactgatcatgtaccaaaagattgtcaattcagttttctgctgacgaagaagatggccaaccaacccgccagttccaacggagagaagcatcaaggcaacacaaatccccgccaagattaccgtttcagcctaactccagtgccaggacagaggaatcgaaatgagaaaagaaaatgccgagtccgggaagacatctgttgcttcaattgtcaaggaatgggtcatttcgccgacaagtgcccaaaaccgagaaacatagctgccggcacgtcagtccacgcaactccctgcaatcagaagcttgctcctcagcaaattgtcatccatgcatcccgaagcagtcctatagcccgcgttgcaacagctctaactccagcgagtgcattactgtcgcgaccgggaaaattgccttttcccgaacgctag

SEQ ID NO: 15224 - DNA, 1618 bp, Oryza sativa
  Clone ID: TFbOSC900373j.C1.o11.np
atggctgacaatgagaaaggcaataaggtcagaagtcaggacattggtacctcaagctcccgagtgaatgaagcaccagacaccagttgtgtgacactggtccaacacctgattaaccagaaccgattgcttatagagatactacagcagcatcagacgccaattctgaacctgagtcaaatacaacctcaagtgcagttggaggcagtccaagcactcacaccacaagtcagcatgccgccagcatcccgaaggactcatggtgacgtgccacatgttgacccaaaagaagcaagtaacatttgctttatgtgtgatgagcaagggcactatgcaagggagcgtcctcagcagaaaagaaaaacaccaatgcgaaccgaagatgaagtccgtaagatgatcattaccagcacagaatggcctccaccaggaatgacaagacgtcagagaagaaataccttccgaggtgcaccacagttgacagagcatcttttagctagtggaggtagagtgtctgatagtgaagattcagatcaagtctcctcagatgatgaagatgaaatggaacgtaaggcatgctctcgttgtggagaagtcggtcatgttgccagctcgtgtgccactacatgcgttcattgtgaggaagaccatccacccgacaggtgtccaacgagcaggatcacttgtttcttttgtgaaggaactgatcatgtaccaaaagattgtcaattcagttttctgctgacgaagaagatggccaaccaacccgccagttccaacggagagaagcatcaaggcaacacaaatccccgccaagattaccgtttcagcctaactccagtgccaggacagaggaatcgaaatgagaaaagaaaatgccgagtccgggaagacatctgttgcttcaattgtcaaggaatgggtcatttcgccgacaagtgcccaaaaccgagaaacatagctgccggcacgtcagtccacgcaactccctgcaatcagaagcttgctcctcagcaaattgtcatccatgcatcccgaagcagtcctatagcccgcgttgcaacagctctaactccagcgagtgcattaccacaaggtgtcaatgctcactttcagccccagccatcagttgacaagacagaggccagtatcggcattgtacctttggatgttccagcacagcagccaagaaatcaagtaccagatggagaacccgagcataagaaagttattgtctgttacaactgtggtacctgttaaggaagcggacatgcccatcgccaagtggtcactggagcaaatgcagtaccaaagagtgaaatcttcaactcggtatcagatgctacacggagtgaaaagtacaagcaccggttaccaggttgactccgaagatatgaatcatgagaagttcgggaacggaagcatcattgaactaccgcaacctagtctgagtcagccaaaaggtgcaccctggtccaagtcaggtgaagagaagattccatccgcaacaggaggtcaagccaagcagttccgagtggtgaagttttgctggaagtttgtcaagacgcaacggaagaagtcagacaagaagagaagaccgcccaacctatcttcttgc

SEQ ID NO: 15225 - DNA, 1185 bp, Oryza sativa
  Clone ID: TFbOSC6672j.C1.o1.fg
atgctgaacctgaatcaaatacaacctcaagtgcagttggaggcagtccaagcactcaccccacaagtcagcatgccgccagcatcccgaaggacccatgatgacgtgccacctgttgacccaaaagaagcaagtaacatttgctttacgtgtgatgagcaagtgcactatgcaagggagcgtcctcagcagaaaagaaaaacaccaatgggaaccgaagatgaagtccgtaagatgatcattaccagcacagaatggcctccaccaggaatgacaagacgtcagagaagaaataccttccgaggtgcaccacagttgacagagcatcttttagctaatggaggtagagtatctgatagtgcagattcagatcaagtctcgtcagatgatgaagatgaaatggaacgtaaggcatgctctcgttgtggagaaatcggtcatgtcgccagctcgtgtgccactatatgcgttcattgcgaggaaggccatccacccgacagattgtcaattcagttttctgccgacgaagaagatggccaaccaacccgccagttccaacggagagaagcatcaaggcaacaccaatcctcgccaagattacagtttcagcctaactccagtgtcaggacagaggaatcaaatgagaaaagaaaatgccgagtccgggaagatatctgttgcttcaattgtcaaggaatgggtcatttcgccgacaagtgcccaaaaccgagaaacatagctgccggcatgtcagtccacgcaaccccctgcaatcagaagcttgctcctcaacgaattgtcatccatgcatccagaagcagtcctatagcccgcgttgcaacagctccaattccaatgaatgcactaccacaaggtgtcaatgctcaatttcagccccagccaccagctgacaagacagaggtcagtatctgtgttgtacctttggaagttccaatacagcagctgagaaatcaagtacaagatgaagaacccgagtgtaagaaagttattgtttgttacaactgcagtgaagaagggcattactccaaaaactgtccccaaccaaggcaaaatcggcctccacattttcgccaatttacaggaagcaaccatgccaatcaccaagtagtcagtggagcaaatgcagtacctgttaagcctagtgctagtcagaagcaaccataa

SEQ ID NO: 15226 - DNA, 3051 bp, Oryza sativa
  Clone ID: TFbOSC415629j.C1.o16.fg
atggagccgcagctgacgccgggggcggtgcaggcgatagcggagcacccggacgggacggggacgatccagccggtgctgcaggtggtggacgtgcggcccgtcaccaccaagaacgcgccgcccacgcccaagcccgccgagcgcttccggatgatgctctccgacggcgtcaacacgcagcagtccatgctcgccaccgccctcaaccccctcgtcaaggacgccacgctccgccccggcaccgtcgtccagctcaccgacttcatgtgcaacaccatccagggtaaaagatctaattcgcacagtagtctttatgtcaacatgggggacagtgagaaggttctaaggaagatgcgcttttatctttgtcatgtttcatccaacgagattttatcactttggggttctattgttagcagttgtccaatgtcgacaaatattcaacctgcaaatatgtttcaacttgcaactaatttgctggctaggattattattgttgtgaaacttgatgttctgcaaaatgactgcattgtaattgggaaccctaaacactatgaaccaaagagtctaactaaggagcaagaccctaacttacaggccagtgtggctcaaaccaataatggaacctattctggtggcgcaagcatgctgggcccctccgttgcgccaagggcagagcaggctgctagcaacagttcatatggtggaccttataatagtgctcaaggaatgttgggttcttctattggcaggacagttgaacctggtcctgcaaatgtttctgctgttggctcttacggtgcaatatcagcacagaacacaacgaatgccaacatgatgcagcctacatctcagctgaacataatgaatgccaacacgatgcagcctacatctcagctgaacacaatgaatgccaacacgatgcagcctacatctcagctgtcctcgttgaaccctaatcaaaaccaaaggtttgcagctcctgcttcgggtggagtctttggccctcctggcaatgcttatgggcagccttcacgtccttcatatcagcagccacctccagtgtatatgaatagagggcctgcctctaggaatgactctgcaactcgtatcatcccaattaccgcgttgaatccataccagcctaagtggacaatcaaggcaagggtgacagcaaagtctgatatcaggcattggagcaatgccaggagttcaggaacagttttctcgtttgatcttcttgatgcacaaggtggagaaattcgtgcacaatgctggaaagaatcggctgataagttttttggccaaattgaggttggtagggtgtatttgatatctagaggatcactgaagcccgcccagaagaagtataacactttgaaccatgattatgaaataactctggatatcgggttatcaactgtcgaggtttgctctgatgatgataacagcatccccaggctgcagtacaatttccggcagatcagcgaactagagaatatggctaacgagaccattgttgatttacttggtgttgttacatcagttagcccttctgcaacaataatgaggaagatcggcactgaaacccggaaaaggtctattcaactgaaggacttgtctggccggagcattgaagtaacattatggggaaacttctgtgatgctgagggtcagcagttgcagttgcagtgtgattctggttcgaaccctataattgcttttaaaggtgcccgtgtgggtgattttaatggcaaatcagtgagcacaattggttcaacccagttaattataaatccagactttcctgaggtggaaaggctgaggcagtggtacatgacagaaggaaaaactgctccttgcatttctttatctcgagaaatgcttaatatgggccggactgatgcccgcaaaacaattgcacagatcaaggatgaaaatttgggacgattagagaagccagactggatcactgttaaggctgcaatctcccatgtgactactgagagtttttgttatccagcttgcccaaagctcttgcccgtcgggaggcagtgtaataaaaaggcaataaataatggtgatgggatgtggcattgtgaccgatgtgatgagagttttcaaaatcctgaatataggtacatgcttaggttccagatccaagaccacactggtagtacctatgctagtgcgttcgatgaggcaggtgagcagatttttggtcgcaaggcaggagaacttttctcgataagaaatgtcgaccaagatgatgcacaatttgcagagatcatagaaggggtccggtggcatctatatctattcaaactgaaggtcaaggaagaaacctacaatgatgagcaaagcttgaaatgcaccgctgtcaaggttgaaaaactggacccatcaaaagagagcaacgtcctacttggagcgattgacaaccttttactggacccaaaggggcaaagtgatcttgcccctaatgctggtttcaccgatccggtaggcggtcacggtgcgcctacatctagcaatgcctatgccatgaatactggtggcgtgaatcagtttgggcagcaagcgagtataagcgccgggatgtctactccactagcagcaacacgaaacttgcagacatgcagcatttgtggagcaaatgggcacagcgcccagatctgccatgtgggtgcagatatggatatgcaggaaacatcagccggtggaagctccatgggtaactacaactccatcgctggcaacggcagctcggagtgttacaaatgtaaacagcccgggcactatgctagagactgtccagggcagtccactggtggcttggagtgtttcaaatgtaaacagcctgggcacttttctagagactgtccagtgcagtctactggtggctcggagtgtttcaaatgtaaacagcctgggcacttcgctagagattgtccagggcagtctactggcgcccagcaccagacatatgggaataatgttgcagcatcaaggggttacaataggcaatcctttgttggtggctactga

SEQ ID NO: 15227 - DNA, 5271 bp, Oryza sativa
  Clone ID: TFbOSC900135j.C1.o1.fg
atgtcggacttagggggaaagaacggggaaaatggaaatgaagatggagcgagcagcaagggaactccatcacccaagggagctactataccttttgattacagcaaacttaccattcccccacacaacttcgtctctgtgccttccgggcgtgctcctcaatttgatgggacacattacgccgcttggaagcacaagatgaagttgcatctaatctctttgcatccaagtatttggaaagttgtttgtacaagtgttgatgtaccccatgatgacatggagctcacttcggagcaagaacaactcatccaccgcaatgctcaagcttctaatgcaattctctctgccttgagtccagaggagttcaacaaggttgatggacttgaggaggccaaggagatatgggatactttgcaattggctcatgagggatcacccgccgttcgtgaggccaagattgaattattggaaggaaggcttggaagatttgtgatggatgacaaggagacaccacaagagatgtatgataggatgatgatccttgtcaacaagattaaaggacttgggagtgaggacatgacaaatcactttgtggtcaagagacttctctgtgcatttggtccaagaaatcccactcttgtatcaatgatacgggaaaggaaagacttcaagagactcaccccaagtgacattcttggaagaattgtgtctcatgagatgcaagaagaggaagctcgtgaagtgaggcaaatggtgaagaatgccgccatgatcaaaaatcaagaagttgctttgaaggcaaaacaagaagaagagtcaagttgtgaagaaagtgaagatgaagagatggcttttattgtcaagagattcaagcactttcttcgcaagagtggctatggcaaagggaggaaggatgatgataagggaaagaggcaatcaaagagagcttgcttcaattgtggcgaatatggccacttcattgccaattgtcccaagtcaaatgaagctaaggctaagggaggcaagaagaagccggagcgtgctcatgtggcggaggcacacatggcggaggtgtggtactccggagatgaagaagatcctgaggtcaagcccaagcccgagccaaaagacaaggttgaaggagaaggtggtgttgctaccgtcgccttcaagtcatcctcttcaagcaaggagcgtctcttcaacaacttgagtgatgacgacgacgactcctaccactactcatgcttcatggcccaaggccgcaaggtgatgactcaaaagccctctcacacttctcttgatgttgattctagtgatgaggaaagtgataatgaattagatgatgtgcttaagagctttagcaaacccgctatgcaacatttggctaagttaatgagagctttggatagtaaagaacaatcactcgaaaggcaagaagaattgcttattcttgagaagaaaagaaaccttaccttagaggagagcctagctaaagaatgtgctaaaaatgaacaattagctaatgagcttaatttggcaaatggttctctagctagccttacggatgtcaatgaaactcttcaagataaatttgctaatttagacaaaagtcataaatatcttgaagttcaatttgacattctttggaatagcacttataaaccaaatgtggtttctaattcttccaacccatctactagcaatggttgtgctaggtgttacaatgttgatttgaactcttatgctactaatgttgatgctatgcaagctcttaagaaagagaatgagaggttgggcacattggtgaaatatggatgcatgaagacataccattcaaaagatgccctttacaagaccatcaccgctcatcctaacaaggatggacacgggctcgggctttctggtggaagtcctgtgtctaagcgtgtgatggtaaatgggaaagaatgcttgatgtttgtgagagaaggtaaagctccacaagcaagtgaggtgacttgccccttcactagtcagacacctgaaagttccaggaaaaatgaccggaagttcctgccctgtaagacaggaagttccagacattttgtcaggaagttccgggcttctgataagccgaaggggctgaccggaagttccgggtataatgccaggaagttccagccagagggtctttactatgattcatatgtaatttctaaaaattcagaaggcaaagtggttgcttattttaatgggaattacaatgatgagtaccgcacttgtgtgtgggtgccaaaggctttggcatactcctccggtggctcaagatgggttgtggacagtggttgcaccaatcatatgacgggagagaggagtatgtttacaagtcttgatgaggagggtggaagtcgtgcaaatattgtctttggagatgatggtaaaggaaaggtaatgggtctcggggaatacattcttggtctatctaatgtttcttttgagaaagatcgtgtgtgtagtgcttgccaagccgggaagcaagttgggagtccacatcctataaaaaacatcatgactacaacaagaccactcgagcttcttcatatggatttatttgggcccgtggcctacgtaagcattggaggtaataagtatggttttgttattgttgatgatttttcacgcttcacttgggtgtactttctccatgacaaaagcaaagctcaagatgtcttcaagcgcttcgtaaagaaggcccaaaacctctatgttctcactatcaagagggtgcgaaccgacaatggaggagaattcaagaacactcaagtggaggaatttcttgatgaagaaggaatcaagcacgagttctccgccccctatgatcctccccaaaacggcattgttgagaggaagaaccgaacccttattgaagccgcaagggcaatgcttgatgagtacaagatttcggatgtcttttgggtggaggccgtgagtaccgcatgtcatgccatcaaccgcttgtacctccacaaaatcctaaagaaaacttcatatgagctcttgagtggtaagaagcctaatgtttcatattttcatgtctttgggagcaaatgttttattttaagtaagaggcctcgctcatctaagttctcacctaaggtggatgagggattcttacttggctatgaatcaaatgcacatgcctatcgtgtcttcaacaaaacctccggtattgttgaagtcactagggatgtgacatttgatgaatctaatggctcccaaggagagcaagttgttgtacatgttgtaggtgatgtggatccaagtcaagctataggtactaaggctattggagacatacgaccagtcgagacgcaggatgaccaagaagatagggatcaacctccgtcattgacatccaatagccttacaagtgctgtgtctgctgagccggaagttctgggtcctattgaccagaacctccggacatctccaggcccagaagttccgggttctacaatccggaacctccggaccagtggcagtgaagacgtgccaacggcacaagtggatgggatcaatgctgcgggcactttagagcatactgatcaggctcaggtccccccaatgcaccatccaaggatacatgacagtgtccaaagagatcatcccgtcgacaacatacttggtgacataagaaaagaggtaactactcgctctcgtgtcgcaagtttttgtcaacacttctcgtttgtctcttctttggaaccaaccagggtggaagatgcgcttggtgatccggattgggtgatggccatacaagaggagttaaataacttcactcgcaaccaagtatggactttggtggagagacccaagcaaaatgtcatcggtaccaactggatctttcgcaacaagcaagataaacatggtgtggttgtaaggaacaaagcccggttagtttcgcaagggttcacccaagtcgagggtctcgattttggtgaaactttcgcacttgtcgctcgccttgagtcaattagaattcttttagcctatgccgctcaccatgatttcaggttattccaaatggatgtcaagagtgcctttctcaatggacctatcttggagttggtctatgtggagcaaccactggggttcgaggatccaaagttgccaaaccatgtgtacaagctccacaaggcgctctacgggctcaagcaagcccctagagtttggtatgaatgtctccgagattttcttttgaagaatggttttgaaattggaaaggcggatactactctcttcactaaaaaatttaagagtgatttattcatatgccaaatttatgtcgatgacataatatttggttctactaatgcctctttttgtgaagaatttagtagtatcatgactaaaaggtttgagatgtctatgatgggcgagttgaccttcttcctcgggctacaagtgaagcaagcacaagagggcaccttcatctctcaaaccaagtacgtgaaagacatactcaagaagtttgggatggaggatgccaaacctatcaagacgcccatgcctactaatggccacctagacctcgacgataatggtaaatgtgtggaccaaaaggtatatcgctccatggtaggatctttactttatttatgtgcatctcgtcccgacatcatgcttagtgtttgtatgtgtgcccgttttcaagcggagcctaaagagtgccatttgattgccgtcaagagaattctaaaatatttagttcaaactcctaatcttggcttgtggtatcctaagggttgtgagcttttgggctattctgattcggattatgccgggtgtaaggttgatagaaaaagcacagccgggacttgtcaatttcttgggcggtcccttgtttcttggtcctccaagaagcaaaattccattgctttatccaccgccgaagccaaatatgtcgccgccggttcttgttgtgcccaactcctttggatgaaacaaaccctaaaagactttggctacaacttcaccaagatcccactcctatgtgacaatgagagtgccatcaaaatagccaacaatcccatccaacactcaagaaccaagcacatagatattcgccatcactttttgagagatcatgagactaaaggagacacatgccttacccatgtgagaaccaaaacccaattagccaacattttcaccaagcctttagatgagaaaagattttgtgagctttggagtgagctcaatatcttagactctcgtaacattaggtga

SEQ ID NO: 15228 - DNA, 3963 bp, Oryza sativa
  Clone ID: TFbOSC400798j.C1.o18.fg
atggctggttttgccgatgcactgaggccggataaattcaccggtgtgcattttaagagatggcagatcagggtcactctgtggctgacagctatgaaatgcttctgggtgagtactggcaaacctgaaggagttcttactgctgaacagcagaagcaattcgaggaagccactactctctttgtgggatgcattcttagcgttcttggcgatcgtctggtcgaggtgtatatgcatatgaccgacgctaaggagttgtgggatgcactgaatactaaattcggtgctactgatgctagcaatgatctgtatatcatggagcagtttcatgactacaagatggctgacaaccgttctgtagtcgaacaggctcatgagatacaaaccatggctaaggaactcgaactccttaagtgtgtcttacccgacaaatttgtggctgggtgcattattgcgaaactacctccatcttggagaagtttcggtactgcactcaaacacaagagacaggaatactccgttgaggggttgatagcgtctcttgatgttgaggagaaagctcgggaaaaagatgccgcgtctaagggcgatggtgggcagtccagcgccaatgttgtgcacaaggcccagaacaagagcaaggggaaatacaaagctcagcagaccaccaacttcaagaagcagaagaagaacaacaacaatcctaatcaggatgagaggacttgctttgtgtgtggccaaattggtcatctggctaggaagtgtccacagcgcaaggggatgaaggcacctgcagggcagacttctaagtctgctaatgtgaccattggcaacactggagatggaagcgggtatggtaatttacctactgttttttcagttaatcaatctactaattggtgggttgatactggggccaatgtacatgtttgtgctgacatctcattgttttcttcttatcaggtcgcacggggttccaccgtcctaatgggaaatgggtcacatgcttctgttcatggtgttggcacggtagatctgaagtttacttcgggaaagatcgtgcagctgaagaacgtgcagcatgtcccttctatcgacaggaatcttgttagtggctcccgtctgactagagacggatttaagttggtttttgagtctaataaagtagtcgtgtctaaacatggatattttattggtaaaggttatgagtgcggaggcctgttccgcttttccctttctgatttctgcaataagtctgtgaaccatatttgtggcagtgtggatgatgaggctaatgtttggcattcacgtttatgtcatattaattttggcttgatgtctcggctttccagcatgtgtttaattcctaagttttccattgtcaaaggttctaagtgccatagttgtgtgcaatcgaagcaacctcgcaagcctcacaaggctgccgaggagagaaacttggcaccactagaactcctacattcagatctttgtgaaatgaatggggtgttgacgaagggtggaaaacgatatttcatgacattcattgatgatgctactagattttgctatgtgtacttgttgaaaacgaaagacgaggctctagactattttaaaatttataaggcagaagttgaaaatcaacttgacagaaagataaaaaggcttaggtctgatcgtggtggagagtttttctcgaacgagtttgacttattctgtgaggaacatggcatcatacatgagaggacgcctccctattctcccgagtctaatgggattgctgaaaggaagaaccgcacactgactgacttggtgaatgccatgttggacaccgcgggactgcctaaggcatggtggggggaggcattgttgacctcaaatcatgtgttaaacagagttcctaacagaaataaggacaaaacaccatatgagatatggattggtagaaaaccatcactttcttatttgcgcatatgggggtgcttggcgaaagtcaatgtaccaataacgaagaaacgcaaacttggacctaagactgtggactgtgtctttctgggatatgctcatcatagcattgcctatagatttttaatagttaaatccgaggtactggacatgcatgttggtacaattatagagtctcgtgatgctaccttctttgagagctttttcccaatgaaggatacacatagtggttcgaaccaaccctctgaaataattcccagttcaatcacaccaccagaacaaactgaacatacacatgaacttgtctctgaggaggatgtcagtgaagctcctcgaaggagtaagagacaaaggacggctaagtcttttggtgatgatttcactgtgtacctcgtggatgacactcctaagtcaatttcagaagcatatgcatctcctgatgcagactactggaaggaggctgtccgtagtgaaatggattccattatcgctaacgggacttgggaggtgacagagcgaccctatgggtgtaaacctgtggggtgcaagtgggtgttcaagaagaagcttaggcctgacggtactattgaaaagtacaaggctcggcttgttgctaagggctatactcagaaagaaggcgaagatttctttgacacttactcacctgttgctagattgaccacaattcgtgtgctactttccctagcagcctcacatggtcttctcgttcatcaaatggacgttaagacagcttttcttaatggagagctggatgaggagatctatatggatcaacctgatgggtttgtagttgaaggtcaagaaggcaaagtgtgcaaattgttgaagtctttgtatggtctgaaacaagctcctaagcaatggcatgagaaatttgacaaaacattgatatctgcaggctttgcagttaatgaggcagataaatgtgtgtactatcgccatggtgggggtgagggagttattttgtgcttgtatgttgacgacatactgatatttggaacaaaccttgaggtgataaatgaggttaaatcattcttgtctaaaaattttgatatgaaggatttgggagtagctgatgttatcttaaacattaagctaattagaggtgagaatgagattacactcttgcagtcccattatgtggaaaagatcttgaatcgctttggctacattgatagtaagccttctccaacaccttatgatcctagcttgttgcttcgcaagaacaagagaattgctaggaatcaactggaatactcccaaatcattggctcgttgatgtacctggctagtgcaactaggcctgatatctcctttgctgtgagcaagttgagccgatttacctctaatccgggagatgatcactggcgtgcgcttgagcgagtaatgcgctatctgaaaggtactgtggaattggggcttcactatactgggtatcctgcggtactggagggttatagtgattctaactggatctctgatgtggatgagatcaaagccactagtggatatgttttcacactgggtggtggtgctgtttcatggaggtcttgcaaacagaccattttgacgaggtcaaccatggaagcagagctaacggcactggatactgctacagttgaggcagaatggctgcgtgatctattaatggatctgcctgttgttgaaaaaccggtgccggctatccttatgaactgtgacaatcaaacgacatgtgaaaagacgattgaagtctgtcaggaaattaagaaactccggagttataacgttggattacatccaaacagcgagaaacctggcagatcccttcacgaagggactatcacgaaatgtgatagacaatgcatcgaaggagatgggtttgagacccatagcattcttgaaagaactcacctttgtgagcttgactgttggtcgcagtctatgaagattttgggtgaatcttctaggaagcttactaaagacctaggagtatga

SEQ ID NO: 15229 - DNA, 890 bp, Oryza sativa
  Clone ID: TFbOSC27732j.C1.o1.np
gtcgtgtgtttccttgcttgtataacagcaaaagacttagatctgttaaggtcctatccttagtttctaatctgtctctcccctttgttttccctctctccctctccaaacctttgcaaagatggctgacaatgagaaaggcaataaggtcagaagtcaggacattggtacctcaagctcccgagtgaatgaagcaccagacaccagttgtgcggcagtggtccaacacctgattaaccagaacaaattgcttatagagatactacagcagcatcggatgccgattttgaacccgagtcagatgcaaccctcaagtgcagttggaggcagtccaagcattcacaccacaagtcagcgcaccgccaacatcccagaaggcccctcatgccataccacatgttgacccaaaagaagcaagtatcatctgttttatgtgtgatgagcaagggcactatgcaaggaactgtcctcagcagaaaagaaaagcaccaatgcgaaccgaagatgaagtccgtaagatgatcattaccagcacagaatggcctacaccaggaatgacaagacgtcagagaagaaataccttccgaggtgcaccacagttgacagagcatcttttagctaatggaggtagagtgtctgatagtgaagattcagatcaagtctcctcagatgatgaaggtgcgaagtctccccaaggttttaaccagaataaaatagaacttaaggcatgctctcgttgtggagaaatcggtcatgttgccagctcgtgtgcctctgcatgcgttcatggtgaggaaggccatccacccgacaggtgtccaacgagcaggatcacttgtttcttttgtgaaggaactgatcacgtaccaaaagattgtcaattcagtttt

SEQ ID NO: 15230 - DNA, 1336 bp, Oryza sativa
  Clone ID: TFbOSC474j.C1.o1.fg
tgtgcatggcgacaaggctcccgttgacggcaaaggagaggcagcgactctggcgaaacgcgccgacgtatcaggtggccaagaatgcggcgtggtccgcgtggaggatgtacagcgggtggagacgccagctgcagagatcacgaatgccatgaaggacacgaagatcgtgaagaataaggaccaggagagaggaggcagcgagagggaagaagaggagaccgtcgccatggccggcacggggagcagggaggaagcattgctgaatcccaggaaccaagcgcttcgtccccaatcccaagggcgcccggggtttgaggcggagcggggaggaggaggtcctccgaagatcaagtgcttcaagtgtggccgcgaaggccatcaccaggcaacatgccctaaccctcctctctgttactcttgtcacaacactgggcacatctctgctcattgtcctatgaatctgatgaagagaggtgttaaactctgtggatttggaatcccagggcatggtttctatagccttcaagttgagatatctgatgcagaggttgctagagctcctgtgagaggtattctaacagtaatccttggtgagggttcagtggtaaaaatagttactgaattgaaacatttgtttgtgggactaaactgggaatggaaagtgaagcaactaaatgacaaagagtttttaatcaatttcccttttgatgaggttagaagcaaaatctcaacatgcaagtgttttgactttgagacctctttgattaaggcaagtgtggtagagactggaatgactgaggaagccgtggatgaattggttgctgtgtgggtgaaaatatttgggattccaaaaattgctaaaacagtcaattggttgcttcactcaattgctgccattgttgaactggtgggggagtttgaaactatggatggagctagcttaaggagagatggtcctgtgagagtcagggtggcgtgcaaggatcctagggagttacatttctcagttcatgtttacatcaacaaggtgggttacatgactaagtgggaaccagagggctacccaccatatgaaaacagacagatgccccctgatgatgatggtggtgatgataaagatgataaaaatgatgaagagttgcaagaagacatgaaccttgatgatgaatttaagaatcaaaatagccctagagggagacaactcagagatgctgacagtaatcaggggaataggtttggggcctattctgcccccctgcatacaaagggaaatcacatgggacacaggggtgtagtatcaagaagctggtatctaagaaaagttccctactga

SEQ ID NO: 15231 - DNA, 1869 bp, Oryza sativa
  Clone ID: TFbOSC411214j.C1.o1.fg
atgtcatggcagagggttggtgccctgctgctaggggctcagtcctgcctgcctgtcccggaggttccggccgtaggtgggattgggtcggtactcttgtttatggctaggatgggttgggaactatgtcacgtcttccgtccgtataccgtggtgaataagcctaacatacatcataacagcaaaagacttagatctgttaaggtcctatccttagtttctaatctgtctctcccctttgctttccctctctccctctccaaacctttgcaacagatggctgacaatgagaaagacaataaggtcagaagtcaggacattggtacctcaagcccccgagtgaatgaagcaccagacaccagttgtgtgacactggttcaacacctgattaaccagaatcgattgcttatagagatactacagcagcatcagacgccaattctgaacctgagtcaaatacaacctcaagtgcagttggaggcagtccaagcactcacaccacaagtcagcatgccgccagcatcccgaaggacccatggtgacgtgccacatgttgactcaaaagaagcaagtatcatttgttttaggtgtgatgagcaagggcactatgcaagggagtgtcctcagcagaaaagaaaaacacccatgcgaaccgaagatgaagtccgtaagatgatcattaccagcacagaatggcctccactaggaatgacaaaacgtcaaagaagaaataccttccgaggtgcaccacagttgacagagcatcttttagctaatggaggtagagtgtctgatagtgaagattcagatcaagtctcctcagatgatgaagatgaaatggaacgtaaggcatgctctcgttgtggagaaatcggtcatgttgccagctcgtgtgccactacatgcgttcattgtgaggaagaccatccacccgacaggtgtccaacgagcaggatcacttgtttcttttgtgaaggaactgatcatgtaccaaaagattgtcaattcagttttctgctgacgaagaagatggccaaccaacccgccagttccaatggagagaagcatcaaggcaacacaaatcctcgccaagattacagtttcagcctaactccagtgccaggacagaggaatcaaaatgagaaaagaaaatgccgagtccgggaagatatctgttgcttcaattgtcaaggaatgggtcatttcgccgacaagtgcccaaaaccgagaaacatagctgccggcacgtcagtccacgcaactccctgcaatcagaagcttgctcctcagcgaattgtcatccatgtatcccgaagcagtcctatagcccgcgttgcaacagctccaactccagcgagtgcattaccacaaggtgtcaatgctcaatttcagccccagccatcagttgacaagacagaggccagtatcggcattgtacctttggatgctccagcacagcagccaaggaatcaagtacaagatgaagaacctgagcgtgagaaagttattgtctgttacaacgcactaacccttctctgcaccgacggcctcagcaaagaattgtcgtcgatggaagaagttgtgtctctccccgacctactccaggccaagcgaagggcaatcaacctccggagggcgataccaagcagaagaccgttattcgcctcaaacagcactcagaaggaagcttctccggtgaataatagcaatatgcagtcctatcacatcatcacagaaccaatcaaggatgatgcagtcactagaacaatgcccgctatatctctccagaatcaaaatgagcagccacgcttgtggttttcagttcgctacctatcattgtgcagtcgaaagtttgcagcaatcatgtaa

SEQ ID NO: 15232 - DNA, 2583 bp, Oryza sativa
  Clone ID: TFbOSC400055j.C1.o6.gm
atggctgacaatgagaaaggcaataaggtcagaagtcaggacattggtacctcaagctcccgagtgaatgaagcaccagacaccagttgtgtgacactggtccaacacctgattaaccagaaccgattgcttatagagatactacagcagcatcagacgccaattctgaacctgagtcagatacaacctcaagtgcagttggaggcagtccaagcactcacaccacaagtcagcatgccgccagcatcccgaaggacccatggtgacgtgccacatgttgactcaaaagaagcaagtatcatttgttttatgtgtgatgagcaagggcactatgcaagggagtgtcctcagcagaaaagaaaaacaccaatgcgaaccgaagatgaagtccgtaagatgatcattaccagcacagaatggcctccaccaggaatgacaaaacgtcagagaagaaataccttccgaggtgcaccacagttgacagagcatcttttagctaatggaggtagagtgtctgatagtgaagattcagatcaagtctcctcagatgatgaagatgagaagtctccccaaggtttcaaccagaataaaatggaacataaggcatgctctcgttgtggagaaatcggaactgatcatgtaccaaaagattgtcaattcagttttctgctgacgaagaagatggccaaccaacccgccagttccaacggagagaagcatcaaggcaacacaaatcctcgccaagattacagtttcagcctaactccagtgccaggacagaggaatcaaaatgagaaaagaaaatgccgagtccgggaagatatctgttgcttcaattgtcaaggaatgggtcatttcgccgacaagtgcccaaaaccgagaaacatagctgccagcacgtcagtccacgcaactccctgcaatcagaagcttgctcctcagcgaattgtcatccatgcatcccgaagcagtcctatagcccgcgttgcaatagctcaaactccagcgagtgcattaccacaaggtgtcaatgctcaatttcagccccagccaccagttgacaagatagaggccaatatcggcattgtacctttggatgttccagcacagcagccaagaaatcaaaattggaaccacccagcaggggcaaccaacgttcaagtacctacagtccagcaacagtgcaagttatcagaatttctcaaaactgagcctccaacctttgccattgccgtcgatcctatggaagccagtgattggttgcgcatagtcgagaagaagctggggttgattcagtgcacagaccaggagcgggttgtcttcgcaactcatcagttggttgcactggcttcagaatggtgggatagctacgaagcatcacggccagaaggacataccatcacctgggacgagttttcatctgtattcaagagatcacatgttcccgcaggaatgatcacactgagaaaacgagagttccgctacctgaagcaagaagatttgaccgtcacagagtacctgcacgagttccatcgtttggctcactatgcaccagaagatgtggaaaatgatgaagaccaacaagagaagtttctccaggggttaaaagatgagatcgcagtgcaactactcctagaggaatatgaagattttgagaaacttgtggacaaagccatacaactcgaaagtgagcataatcggatgaagaactgtaagagaaggattgtcagcatcccagtatttccatgtggtaaccaaagacagcgcactgagccacttcagatcaccggatcttctattgcgcatcaagagtttccgccccaagaagatggacccaatgcagacaacaacattagcaatactaatgatgatgatgataccaccaacaaccatgcttcttgccccattagtgaccactcgaatcgagcgtgcaatgtcaacatcattcaccaagatgtcgacgatagtatcaatgatggcacccaaaatgacaaccctagcagttgtgactctgagaaagactccgatggtgatagcaactatggtaccactgatgccaatgttagcaaggatttccagccaccaattccaactccaagtcagaatgatcgtccccagacggatagctcagcaaagaagacgttgatttgctacaattgcaaagaactagggcattactcgagggactgcctgcaaccaaggcaaagtcgacctccacattaccgccaatttacacgaagcagacatcccaatcgtattgtggtcactggagcaaacgccgtacccgtgaggcctcgtgcaacaaccgtcagtctagcttttgatgaaccacttgaaggttctctgaaaggcagcaggctcaagtaccacattgtcaccagaagcatccacaactcttggagtgaagagtacttggttgacaaagttcaaaaggtgattgatagaagataccagcaaagcgaccatcggggcgcgggcgcgccgcctcccatcggctgtgccggcgtggccgccttcgggcgcgccctgcggctgccatgtggggcccggccgtcagccgcccgcgccctcgggtgcggctga

SEQ ID NO: 15233 - DNA, 4806 bp, Oryza sativa
  Clone ID: TFbOSC100891j.C1.o11.fg
atgtccgacgctcggtctcggcgttcggtcgcctcgagcactcggcgtcagcaggacgccgagctcgccgcagcagaagagcgcaggcgagcaacggctcagaccgctgcagcagcagcgagggcggccagactggcggcagcggagttggcagcagccagggcggaggcggaggcggaggcggcggaagatgcggcacgtgcggcggaggtagaggttgagaccttgcgcagcagcatcaacggctccatcgccggcgacatcaccgctgacagggagcttgaggagctggcaagaggaagggcacgggagcgagcagagcggtgggcagcagcccacctccacggcggcggcggcggcccaagggatcgtgcgcccgccgacgggaacccagacgggcgcgggcgtgccggcggcagcccggagcccgcacgcggccctcgcaggcggcacggctccctctcccctgaccggcgccatggtcaccacggcgtccagacggtggtcagggattttggtcccggcggtgggtggcctaccctcaccaaaaccaactacatcgagtgggccgcggtgatgagggtgaggctccaggtgcggcacatgtgggaggcagtccggtacggtgacgtcgactacgacgaggatcggcgggcactggatgccctcatcgctgcagttccgcccgagatgcagttctcgctttcccagaagcggactgccaaggaggcctgggacgccatcgctgcggcacgcatcggcagcgaccgcgcccgcaagtccacactgcaggcactccgcaaggagtgggagaacctggccttcaagccaggtgaggatgttgatgactttgctctccgtctcaacactctcttgcagaaaatggtgcagtacggcgacgacacctacgacgaggagagagctgtcgagaagctcttccgctgcgtccctgagaagtacaggcagatcgctcgctcgattgaatctctgctggacctctccacgatgtcgatcgaggaggcgttaggtcgcctcaaggtcgtcgatggtgatgagccacggcctctctcggggcccatcaccatcggcgggaagctccatctcactcgggagcagtgggaggcctctcagggtgacaggaggaagggggagtcatcttccccgacaggcggccataagccgcgcaaggcgcggggaggtgtccagctacggtgggcgcgaagacgtgccgagggtggcgcccgcagaggcgcccagggcgttgccaccggcaaccacaagccggcacgagacgacacctgccgcaactgtggcaagcttggccattgggccaaagactgtcgacagccacgacgcggccaggcccacgtcgcacgggtggaggaggaagagccggctctgctcctagctcacgcaagcatcgagctacctccagcggcaccggccgcagcggctttcctccaccttgatgagccgaaggtactcgtctccctctgtgacggctccagcaacgacaaggctgatgggtggtacctcgacaccggcgccacccatcacatgaccggccgacgggagttcttcaccgagttcgactccagcgtccgaggcaccgtcaagttcggggacgcctccggcgtggagatcaagggtgttggctccgtcaccttcaccgccaagtccggtgagcacaggctgctcaccggagtctactacatccccgcgttgaggaattctatcatcagcgtgggacagctggatgagaacggctcacgcgtgttggtcgaggacggactcatgaggatttgggatcgccgtcgtcgccttcttgccaaggtaaccagaggcactaatcgactctacatcctcagcgcgcaggtcgcacatccagtttgcctcgccgctcgtcgggacgacgaggcgtggcagtggcacgagcgcttcgggcacctccacttcgaggccctgaagcagctcagtgccaaggagatggtgcgaggcatgccgtgccttgaccacgtggagcagctctgcgacgtctgcgtggtgacaaagcagcggcggctcccctttccccagcagacgagcttccgagccaaggagcggctcgggctcgtgcacggggacttgtgtggcccagtgacaccggccacaccaggaggacgacgttatttcctgctgctcgtcgacgacctctcccgctacatgtgggtgatggtcctcggcagcaagggagaggctgcggacgccatcaggcatgcgcaggctgctgcagaggcggagtgcggccgcaagctgcgcgtgctgcgcaccgacaacggcggcgaattcacggcagctgaattcgcgtcgtactgcgctgatgagggcattcagcgccactacaccgcgccgtacagcccacagcagaacggcgtcgtcgagcggcgcaaccagacggttgtggggatggctcgggccctcctcaagcagagggggatgccggccatcttctggggggaggcggtggtgacggccgcctacatcctcaaccgctcgcctaccaaggccctcgatggcaggacaccgtacgaggcttggcatgggcgcaagccggcggtctcccacctgcgggtcttcggctgcctcgcgttcgccaaggagcttggccacatcggcaagctcgacgacaggagcaccccaggggtgttcatcggctacgcggagggctcgaaggcctaccgcatcctcgacccggagacacagcgtgtgcgcattacgcgcgatgttgtgttcgacgaagggcgagggtgggtatgggacaaggcggtggatgatggttcgactccgacgtacgacgacttcaccatcgagtacgtccacttcgagggagctgggggagtaggcagctcttcttcaccgagcgtgtctaccccagtccccgagcctccaccgactccaacaccaacacaccctcgggccacgacttcgactacgacgagctcttcgtcgacaccaccccagccggtgtccccacacgctccagcaccaacagccactcctccgggcacgtctactccgacgccagctcgtgttgagcgcagcccggtggagttcgttactccgctctcccacgacggggagcgcatcgacgcgtaccatgacggcgagcagctacggtaccgtacgatggaggatcttctcggcgaccagccggtgccgggactggtgcctcgcaacctggaggcgcagttgcaccttgcgtgcgacgacggtgagcctcggtcttttgcagaggccgagaaacacgcggcatggcgtgccgcgatgcagtcggagatggacgcggttcaggagaaccgcacctgggagcttgctgacctccctcgtggtcaccgcgcgatcacccttaagtgggtgttcaagctgaagagggatgaagccggagccatcgtcaagcacaaggctcgcttggtggcacgcggtttcgtgcagcaggaggggatcgactacgacgatgccttcgctcccgtggcacggatggagtccgtgcgactccttcttgcgctggctgctcaggaaggctggggcgtccatcacatggacgtcaagtcggcgtttctaaacggcgacttgaaggaggaggtctacgtgcaccagccgccgggatttgtgatccccggcaaggagggcaaggtgctacgcctgcacaaggccctctacggcttgcggcaggcaccgagggcgtggaatgccaagttggattccacgctcaaggggatgggcttcgagcaaagcccgcacgaggcggccatctaccggcggggcaatggaggaaatgccttgctggtgggtgtctacgtcgacgacttagtgatcaccggcaccaaggatgcagaggtcgcggcgttcaaggaggagatgaaggccaccttccagatgagtgatctggggcctctctccttctacctggggatcgaagtgcaccaggacaactccgggatcacgcttcgacagaccgcctacgccaagcgcgtcgttgagctggctgggctcaccgattgcaacccagctctcactccgatggaggagagactgaagctgagccgcgacagcacagcggaggaggtggatgctacacagtaccgacgtcttgtggggagccttcgctacctcacccacacacggccggacttggccttctccgtcggctacgtcagtcggttcatgcagcgaccgacgacggagcaccagcaggctgtgaagaggatcatccgctacgttgcggggactctcgaccacggtctctactacccgaggtgtcctggcaaggcacacttcgtcgggtacagcgacagcgaccacgccggcgacatcgacaccagcaagagcacgagcgggattctctttttcctcgacgagtgcctcgttagctggcagtcaatcaagcagcaggtggtggccctgtccagctgcgaggccgagtacatggcagcatccgccgcttcgacccaggcgctctggcttgctcgactgcttagtgatctcctcggcagagatactggagcggtggagctcagggtggatagcaagtccgctctggccctggcaaaaaaccccgtttttcacgaacggagcaagcacatccgagtgaggtaccatttcatccgaagctacttggaggaagggagcatcaaggcgagctacatcaacaccaaggaccagcttgcggatttgctcaccaaaccccttgggaggatcaagttccttgagctttgctcccggatcgggatggctcaactctcccacaagacggcgcacaagacttag

SEQ ID NO: 15234 - DNA, 681 bp, Oryza sativa
  Clone ID: TFbOSC100891j.C1.o14.gm
atggcgccggtcaggggagagggagccgtgccgcctgcgagggccgcgtgcgggctccgggctgccgccggcacgcccgcgcccgtctgggttcccgtcggcgggcgcacgatcccttgggccgccgccgccgccgtggaggtgggctgctgcccaccgctctgctcgctcccgtgcccttcctcttgccagctcctcaagctccctgtcagcggtgatgtcgccggcgatggagccgttgatgctgctgcgcaaggtctcaacctctacctccgccgcacgtgccgcatcttccgccgcctccgcctccgcctccgccctggctgctgccaactccgctgccgccagtctggccgccctcgctgctgctgcagcggtctgagccgttgctcgcctgcgctcttctgctgcggcgagctcggcgtcctgctgacgccgagtgctcgaggcgaccgaacgccgagaccgagcgtcggacatggcgcacctccggggggctgctgtgtggagagggggaagggaaaggggaaggaggggcaaccggtgctgctgctgctgctgctggctgagagctcaaccgagcttgggaaggggtggaacaagagatgcatgaaggacgactttttgtcgaaagtgcagattccaaagaatggggttactacagcactaaggaagaggtga

SEQ ID NO: 15235 - DNA, 676 bp, Oryza sativa
  Clone ID: TFbOSC1462j.C1.o1.fg
ttccccgacaggcggccgtaagccgcgcaaggcgcggggaggtgtccagctacggtgggcgcgaagacgtgccgagggtggcgcccgcagaggcgcccagggcgttgccaccggcaaccacaagccggcacgagacgacacctgccgcaactgtggcaagcttggccattgggccaaagactgtcgacagccacgacgcggccaggcccacgtcgcacgggtggaggaggaagagccggctctgctcctagctcacgcaagcatcgagctacctccagcggcaccggccgcagcggctttcctccaccttgatgagccgaaggtactcgtctccctctgcgacggctccagcaacgacaaggctgatgggtggtacctcgacaccggcgccacccatcacatgaccggccgacgggagttcttcaccgagttcgactccagcgtccgaggcaccgtcaagttcggggacgcctccggcgtggagatcaagggtgttggctccgtcaccttcaccgccaagtccggtgagcacaggctgctcaccggagtctactacatccccgcgttgaggaattctatcatcagcgtgggacagctggatgagaacggctcacgcgtgttggtcgaggacggactcatgacgattcgggatcgccgtcgtcgccttcttgccaag

SEQ ID NO: 15236 - DNA, 713 bp, Oryza sativa
  Clone ID: TFbOSC1462j.C1.o1.gp
cgctgaggatgtagagtcgattagtgcctctggttaccttggcaagaaggcgacgacggcgatcccgaatcgtcatgagtccgtcctcgaccaacacgcgtgagccgttctcatccagctgtcccacgctgatgatagaattcctcaacgcggggatgtagtagactccggtgagcagcctgtgctcaccggacttggcggtgaaggtgacggagccaacacccttgatctccacgccggaggcgtccccgaacttgacggtgcctcggacgctggagtcgaactcggtgaagaactcccgtcggccggtcatgtgatgggtggcgccggtgtcgaggtaccacccatcagccttgtcgttgctggagccgtcgcagagggagacgagtaccttcggctcatcaaggtggaggaaagccgctgcggccggtgccgctggaggtagctcgatgcttgcgtgagctaggagcagagccggctcttcctcctccacccgtgcgacgtgggcctggccgcgtcgtggctgtcgacagtctttggcccaatggccaagcttgccacagttgcggcaggtgtcgtctcgtgccggcttgtggttgccggtggcaacgccctgggcgcctctgcgggcgccaccctcggcacgtcttcgcgcccaccgtagctggacacctccccgcgccttgcgcggcttacggccgcctgtcggggaa

SEQ ID NO: 15237 - DNA, 4761 bp, Oryza sativa
  Clone ID: TFbOSC19433j.C1.o2.fg
atgtccgacgctcggtctcagcgttcggtcgcctcgagcactcggcgtcagcaggacgccaagctcgccgcagcagaagagcgcaggcgagcaacggctcagaccgctgcagcagcagcgaaggcggccagactggcggcagcggagttggcagcagccagggcggaggcggaggcggaggcggcggaagatgcggcacgtgcggcggaggtagaggttgagaccttgcgcagcagcatcaacggctccatcgccggcgacatcaccgctgacagggagcttgaggagctggcaagaggaagggcacgggagcgagcagagcggtgggcagcagcccacctccacggcggcggcggcggcccaagggaccgcgcgcccgccgacgggaacccagacgggcgcgggcgtgccggcggcagcccggagcccgcacgcggccctcgcaggcggcacggctccctctcccctgaccggcgccatggtcaccacggcgtccagacggtggtcagggattttggtcccggcggtgggtggcctaccctcaccaaaaccaactacatcgagtgggccgcggtgatgagggtgaggctccaggtgcggcacatgtgggaggcagtccggtacggtgacgtcgactacgacgaggatcggcgggcactggatgccctcatcgctgcagttccgcccgagatgcagttctcgctttcccagaagcggactgccaaggaggcctgggacgccatcgctgcggcacgcatcggcagcgaccgcgcccgcaagtccacactgcaggcactccgcaaggagtgggagaacctggccttcaagccaggtgaggatgttgatgactttgctctccgtctcaacactctcttgcaaaaaatggtgcagtacggcgacgacacctacgacgaggagagagctgtcgagaagctcttccgctgcgtccctgagaagtacaggcagatcgctcgctcgattgaatctctgctggacctctccacgatgtcgatcgaggaggcgttaggtcgcctcaaggtcgtcgatggtgatgagccacggcctctctcggggcccatcaccatcggcgggaagctccatctcactcgggagcagtgggaggcctctcagggtgacgggaggaagggggagtcatcttccccgacaggcggccgtaagccgcgcaaggcgcggggaggtgtccagctacggtgggcgcgaagacgtgccgagggtggcgcccgcagaggcgcccagggcgttgccaccggcaaccacaagccggcacgagacgacacctgccgcaactgtggcaagcttggccattgggccaaagactgtcgacagccacgacgcggccaggcccacgtcgcacgggtggaggaggaagagccggctctgctcctagctcacgcaagcatcgagctacctccagcggcaccggccgcagcggctttcctccaccttgatgagccgaaggtactcgtctccctctgcgacggctccagcaacgacaaggctgatgggtggtacctcgacaccggcgccacccatcacatgaccggccgacgggagttcttcaccgagttcgactccagcgtccgaggcaccgtcaagttcggggacgcctccggcgtggagatcaagggtgttggctccgtcaccttcaccgccaagtccggtgagcacaggctgctcaccggagtctactacatccccgcgttgaggaattctatcatcagtgtgggacagctggatgagaacggctcacgcgtgttggtcgaggacggactcatgaggatttgggatcgccgtcgtcgccttcttgccaaggtaaccagaggcactaatcgactctacatcctcagcgcgcaagtcgcacatccagtttgcctcgccgctcgtcgggacgacgaggcgtggcagtggcacgagcgcttcgggcacctccactttgaggccctgaagcagctcagtgccaaggagatggtgcgaggcatgccgtgccttgaccacgtggagcagctctgcgacgtctgcgtggtgacaaagcagcggcggctcccctttccccagcagacgagcttccgagccaaggagcggctcgggctcgtgcacggggacttgtgtggcccagtgacaccggccacaccaggaggacgacgttatttcctgctgctcgtcgacgacctctcccgctacatgtgggtgatggtcctcggcagcaagggagaggctgcggacgccatcaggcatgcgcaggctgcagcagaggcggagtgcggccgcaagctgcgcgtgctgcgcaccgacaacggcggcgaattcacggcggctgaattcgcgtcgtactgcgctgatgagggcattcagcgccactacaccgcgccgtacagcccacagcagaacggcgtcgtcgagcggcgcaaccagacggttgtggggatggctcgggccctcctcaagcagagggggatgccggccatcttctggggggaggcggtggtgacggccgcctacatcctcaaccgctcgcctaccaaggccctcgatggcaggacaccgtacgaggcttggcatgggcgcaagccggcggtctcccacctgcgggtcttcggctgcctcgcgttcgccaaggagcttggccacatcggcaagctcgacgacaggagcaccccaggggtgttcatcggctacgcggagggctcgaaggcctaccgcatcctcgacccggagacacagcgtgtgcgcattacgcgcgatgttgtgttcgacgaagggcgagggtgggtatgggacaaggcggtggatgatggttcgactccgacgtacgacgacttcaccatcgagtacgtccacttcgagggagctgggggagtaggcagctcttcttcaccgagcgtgtctaccccagtccccgagcctccaccgactccaacaccaacacaccctcgggccacgacttcgactacgacgagctcttcgtcgacaccaccccagccggtgtccccacacgctccagcaccaacagccactcctccgggcacgtctactccgacgccagctcgtgttgagcgcagcccggtggagttcgttactccgctctcccacgacggggagcgcatcgacgcgtaccatgacggcgagcagctacggtaccgtacgatggaggatcttctcggcgaccagccggtgccgggactggtgcctcgcaacctggaggcgcagttgcaccttgcgtgcgacgacggtgagcctcggtcttttgcagaggccgagaaacacgcggcatggcgtgccgcgatgcagtcggagatggacgcggttcaggagaaccgcacctgggagcttgctgacctccctcgtggtcaccgcgcgatcacccttaagtgggtgttcaagctgaagagggatgaagccggagccatcgtcaagcacaaggctcgcttggtggcacgcggtttcgtgcagcaggaggggatcgactacgacgatgccttcgctcccgtggcacggatggagtccgtgcgactccttgcgctggctgctcaggaaggctggggcgtccatcacatggacgtcaagtcggcgtttctaaacggcgacttgaaggaggaggtctacgtgcaccagccgccgggatttgtgatccccggcaaggagggcaaggtgctacgcctgcacaaggccctctacggcttgcggcaggcaccgagggcgtggaatgccaagttggattccacgctcaaggggatgggcttcgagcaaagcccgcacgaggcggccatctaccggcggggcaatggaggaaatgccttgctggtgggtgtctacgtcgacgacttagtgatcaccggcaccaaggatgcagaggtcgcggcgttcaaggaggagatgaaggccaccttccagatgagtgatctggggcctctctccttctacctggggatcgaagtgcaccaggacaactccgggatcacgcttcgacagaccgcctacgccaagcgcgtcgttgagctggctgggctcaccgattgcaacccagctctcactccgatggaggagagactgaagctgagccgcgacagcacagcggaggaggtggatgctacacagtaccgacgtcttgtggggagccttcgctacctcacccacacacggccggacttggccttctccgtcggctacgctgtgaagaggatcatccgctacgttgcggggactctcgaccacggtctctactacccgaggtgtcctggcaaggcacacttcgtcgggtacagcgacagcgaccacgccggcgacatcgacaccagcaagagcacgagcgggattctcttcttcctcggcgagtgcctcgttagctggcagtcaatcaagcagcaggtggtggccctgtccagctgcgaggccgagtacatggcggcatccgccgcttcgacccaggcgctctggcttgctcgactgcttagtgatctcctcggcagagatactggagcggtggagctcagggtggatagcaagtccgctctggccctggcaaaaaaccccgtttttcacgaacggagcaagcacatccgagtgaggtatcatttcatccgaagctacttggaggaagggagcatcaaggcgagctacatcaacaccaaggaccagcttgcggatttgctcaccaaaccccttaggaggatcaagttccttgagctttgctcccggatcgggatggctcaactctcccacaagacagcgcacaagacttag

SEQ ID NO: 15238 - DNA, 792 bp, Oryza sativa
  unsure (1)..(792): unsure at all n locations
  Clone ID: TFbOSC20233j.C1.o1.fg
atgtcgatcgaggaggcgttaggtcgcctcaaggtcgtcgatggtgatgagccacggcctctctcggggcccatcaccatcggcgggaagctccatctcactcgggagcagtgggaggcctctcanggtgacgggaggaagggggagtcatcttccccgacaggcggccataagccgcgcaaggcgcggggaggtgtccagctacgaggcgcccagggcgttgccaccggcaaccacaagccggcacgagatgacacctgccgcaactgtggcaagcttggccattgggccaaagactgtcgacagccacgacgcggccaggcccacgtcgcacgggtggaggaggaagagccggctctgctcctagctcacgcaagcatcgagctacctccagcggcaccggccgcagcggctttcctccaccttgatgagccgaaggtactcgtctccctctgcgacggctccagcaacgacaaggctgatgggtggtacctcgacaccggcgccacccatcacatgaccggccgacgggagttcttcaccgagttcgactccagcgtccgaggcaccgtcaagttcggggacgcctccggcgtggagatcaagggtgttggctccgtcaccttcaccgccaagtccggtgagcacaggctgctcaccggagtctactacatccccgcgttgaggaattctatcatcagcgtgggacagctggatgagaacggctcacgcgtgttggtcgaggacggactcatgaggatttgggatcgccgtcgtcgccttcttgccaag

SEQ ID NO: 15239 - DNA, 971 bp, Oryza sativa
  unsure (1)..(971): unsure at all n locations
  Clone ID: TFbOSC20233j.C1.o1.gp
cctctggttaccttggcaagaaggcgacgacggcgatcccaaatcctcatgagtccgtcctcgaccaacacgcgtgagccgttctcatccagctgtcccacgctgatgatagaattcctcaacgcggggatgtagtagactccggtgagcagcctgtgctcaccggacttggcggtgaaggtgacggagccaacacccttgatctccacgccggaggcgtccccgaacttgacggtgcctcggacgctggagtcgaactcggtgaagaactcccgtcggccggtcatgtgatgggtggcgccggtgtcgaggtaccacccatcagccttgtcgttgctggagccgtcgcagagggagacgagtaccttcggctcatcaaggtggaggaaagccgctgcggccggtgccgctggaggtagctcgatgcttgcgtgagctaggagcagagccggctcttcctcctccacccgtgcgacgtgggcctggccgcgtcgtggctgtcgacagtctttggcccaatggccaagcttgccacagttgcggcaggtgtcatctcgtgccggcttgtggttgccggtggcaacgccctgggcgcctctgcgggcgccaccctcggcacgtcttcacgcccaccgtagctggacacctccccgcgccttgcgcggcttatggccgcctgtcggggaagatgactcccccttcctcccgtcaccntgagaggcctcccactgctcccgagtgagatggagcttcccgccgatggtgatgggccccgagagaggccgtggctcatcaccatcgacgaccttgaggcgacctaacgcctcctcgatcgacatcgtggagaggtccagcagagattcaatcgagcgagcgatctcctgtacttctcagggacgcagcggaagagcttctcgacagctctctcctcgtcgtaggtgtcgtcgccgtactgcaccattttctgcaag

SEQ ID NO: 15240 - DNA, 4806 bp, Oryza sativa
  Clone ID: TFbOSC28279j.C1.o1.fg
atgtccgacgctcggtctcagcgttcggtcgcctcgagcactcggcgtcagcaggacgccgagctcgccgcagcagaagagcgcaggcgagcaacggctcagaccgctgcagcagcagcgagggcggccagactggcggcagcggagttggcagcagccagggcggaggcggaggcggaggcggcggaagatgcggcacgtgcggcggaggtagaggttgagaccttgcgcagcagcatcaacggctccatcgccggcgacatcaccgctgacagggagcttgaggagctggcaagaggaagggcacgggagcgagcagagcggtgggcagcagcccacctccacggcggcggcggcggcccaagggaccgcgcgcccgccgacgggaacccagacgggcgcgggcgtgccggcggcagcccggagcccgcacgcggccctcgcaggcggcacggctccctctcccctgaccggcgccatggtcaccacggcgtccagacggtggtcagggattttggtcccggcggtgggtggcctaccctcaccaaaaccaactacatcgagtgggccgcggtgatgagggtgaggctccaggtgcggcacatgtgggaggcagtccggtacggtgacgtcgactacgacgaggatcggcgggcactggatgccctcatcgctgcagttccgcccgagatgcagttctcgctttcccagaagcggactgccaaggaggcctgggacgccatcgctgcggcacgcatcggcagcgaccgcgcccgcaagtccacactgcaggcactccgcaaggagtgggagaacctggccttcaagccaggtgaggatgttgatgactttgctctccgtctcaacactctcttgcaaaaaatggtgcagtacggcgacgacacctacgacgaggagagagctgtcgagaagctcttccgctgcgtccctgagaagtacaggcagatcgctcgctcgattgaatctctgctggacctctccacgatgtcgatcgaggaggcgttaggtcgcctcaaggtcgtcgatggtgatgagccacggcctctctcggggcccatcaccatcggcgggaagctccatctcactcgggagcagtgggaggcctctcagggtgacgggaggaagggggagtcatcttccccgacaggcggccgtaagccgcgcaaggcgcggggaggtgtccagctacggtgggcgcgaagacgtgccgagggtggcgcccgcagaggcgcccagggcgttgccaccggcaaccacaagccggcacgagacgacacctgccgcaactgtggcaagcttggccattgggccaaagactgtcgacagccacgacgcggccaggcccacgtcgcacgggtggaggaggaagagccggctctgctcctagctcacgcaagcatcgagctacctccagcggcaccggccgcagcggctttcctccaccttgatgagccgaaggtactcgtctccctctgcgacggctccagcaacgacaaggctgatgggtggtacctcgacaccggcgccacccatcacatgaccggccgacgggagttcttcaccgagttcgactccagcgtccgaggcaccgtcaagttcggggacgcctccggcgtggagatcaagggtgttggctccgtcaccttcaccgccaagtccggtgagcacaggctgctcaccggagtctactacatccccgcgttgaggaattctatcatcagcgtgggacagctggatgagaacggctcacgcgtgttggtcgaggacggactcatgaggatttgggatcgccgttgtcgccttcttgccaaggtaaccagaggcactaatcgactctacatcctcagcgcgcaagtcgcacatccagtttgcctcgccgctcgtcgggacgacgaggcgtggcagtggcacgagcgcttcgggcacctccacttcgaggccctgaagcagctcagtgccaaggagatggtgcgaggcatgccgtgccttgaccacgtggagcagctctgcgacgtctgcgtggtgacaaagcagcggcggctcccctttccccagcagacgagcttccgagccaaggagcggctcgggctcgtgcacggggacttgtgtggcccagtgacaccggccacaccaggaggacgacgttatttcctgctgctcgtcgacgacctctcccgctacatgtgggtgatggtcctcggcagcaagggagaggctgcggacgccatcaggcatgcgcaggctgcagcagaggcggagtgcggccgcaagctgcgcgtgctgcgcaccgacaacggcggcgaattcacggcggctgaattcgcgtcgtactgcgctgatgagggcattcagcgccactacaccgcgccgtacagcccacagcagaacggcgtcgtcgagcggcgcaaccagacggttgtggagatggctcgggccctcctcaagcagagggggatgccggccatcttctggggggaggcggtggtgacggccgcctacatcctcaaccgctcgcctaccaaggccctcgatggcaggacaccgtacgaggcttggcatgggcgcaagccggcggtctcccacctgcgggtcttcggctgcctcgcgttcaccaaggagcttggccacatcggcaagctcgacgacaggagcaccccaggggtgttcatcggctacgcggagggctcgaaggcctaccgcatcctcgacccggagacacagcgtgtgcgcattacgcgcgatgttgtgttcgacgaagggcgagggtgggtatgggacaaggcggtggatgatggttcgactccgacgtacgacgacttcaccatcgagtacgtccacttcgagggagctgggggagtaggcagctcttcttcaccgagcgtgtctaccccagtccccgagcctccaccgactccaacaccaacacaccctcgggccacgacttcgactacgacgagctcttcgtcgacaccaccccagccggtgtccccacacgctccagcaccaacagccactcctccgggcacgtctactccgacgccagctcgtgttgagcgcagcccggtggagttcgttactccgctctcccacgacggggagcgcatcgacgcgtaccatgacggcgagcagctacggtaccgtacgatggaggatcttctcggcgaccagccggtgccgggactggtgcctcgcaacctggaggcgcagttgcaccttgcgtgcgacgacggtgagcctcggtcttttgcagaggccgagaaacacgcggcatggcgtgccgcgatgcagtcggagatggacgcggttcaggagaaccgcacctgggagcttgctgacctccctcgtggtcaccgcgcgatcacccttaagtgggtgttcaagctgaagagggatgaagccggagccatcgtcaagcacaaggctcgcttggtggcacgcggtttcgtgcagcaggaggggatcgactacgacgatgccttcgctcccgtggcacggatggagtccgtgcgactccttcttgcgctggctgctcaggaaggctggggcgtccatcacatggacgtcaagtcggcgtttctaaacggcgacttgaaggaggaggtctacgtgcaccagccgccgggatttgtgatccccggcaaggagggcaaggtgctacgcctgcacaaggccctctacggcttgcggcaggcaccgaggacgtggaatgccaagttggattccacgctcaaggggatgggcttcgagcaaagcccgcacgaggcggccatctaccggcggggcaatggaggaaatgccttgctggtgggtgtctacgtcgacgacttagtgatcaccggcaccaaggatgcagaggtcgcggcgttcaaggaggagatgaaggccaccttccagatgagtgatctggggcctctctccttctacctggggatcgaagtgcaccaggacaactccgggatcacgcttcgacagaccgcctacgccaagcgcgtcgttgagctggctgggctcaccgattgcaacccagctctcactccgatggaggagagactgaagctgagccgcgacagcacagcggaggaggtggatgctacacagtaccgacgtcttgtggggagccttcgctacctcacccacacacggccggacttggccttctccgtcggctacgtcagtcggttcatgcagcgaccgacgacggagcaccagcaggctgtgaagaggatcatccgctacgttgcggggactctcgaccacggtctctactacccgaggtgtcctggcaaggcacacttcgtcgggtacagcgacagcgaccacgccggcgacatcgacaccagcaagagcacgagcgggattctcttcttcctcggcgagtgcctcgttagctggcagtcaatcaagcagcaggtggtggccctgtccagctgcgaggccgagtacatggcggcatccgccgcttcgacccaggcgctctggcttgctcgactgcttagtgatctcctcggcagagatactggagcggtggagctcagggtggatagcaagtccgctctggccctggcaaaaaaccccgtttttcacgaacggagcaagcacatccgagtgaggtaccatttcatcagaagctacttggaggaagggagcatcaaggcgagctacatcaacaccaaggaccagcttgcggatttgctcaccaaaccccttgggaggatcaagttccttgagctttgctcccggatcgggatggctcaactctcccacaagacggcgcacaagacttag

SEQ ID NO: 15241 - DNA, 4806 bp, Oryza sativa
  Clone ID: TFbOSC400946j.C1.o15.fg
atgtccgacgctcggtctcggcgttcggtcgcctcgagcactcggcgtcagcaggacgccgagctcgccgcagcagaagagcgcaggcgagcaacggctcagaccgctgcagcagcagcgagggcggccagactggcggcagcggagttggcagcagccagggcggaggcggaggcggaggcggcggaagatgcggcacgtgcggcggaggtagaggttgagaccttgcgcagcagcatcaacggctccatcgccggcgacatcaccgctgacagggagcttgaggagctggcaagaggaagggcacgggagcgagcagagcggtgggcagcagcccacctccacggcggcggcggcggcccaagggaccgtgcgcccgccgacgggaacccagacgggcgcgggcgtgccggcggcagcccggagcccgcacgcggccctcgcaggcggcacggctccctctcccctgaccggcgccatggtcaccacggcgtccagacggtggtcagggattttggtcccggcggtgggtggcctaccctcaccaaaaccaactacatcgagtgggccgcggtgatgagggtgaggctccaggtgcggcacatgtgggaggcagtccggtacggtgacgtcgactacgacgaggatcggcgggcactggatgccctcatcgctgcagttccgcccgagatgcagttctcgctttcccagaagcggactgccaaggaggcctgggacgccatcgctgcggcacgcatcggcagcgaccgcgcccgcaagtccacactgcaggcactccgcaaggagtgggagaacctggccttcaagccaggtgaggatgttgatgactttgctctccgtctcaacactctcttgcagaaaatggtgcagtacggcgacgacacctacgacgaggagagagctgtcgagaagctcttccgctgcgtccctgagaagtacaggcagatcgctcgctcgattgaatctctgctggacctctccacgatgtcgatcgaggaggcgttaggtcgcctcaaggtcgtcgatggtgatgagccacggcctctctcggggcccatcaccatcggcgggaagctccatctcactcgggagcagtgggaggcctctcagggtgacgggaggaagggggagtcatcttccccgacaggcggccataagccgcgcaaggcgcggggaggtgtccagctacggtgggcgcgaagacgtgccgagggtggcgcccgcagaggcgcccagggcgttgccaccggcaaccacaagccggcacgagacgacacctgccgcaactgtggcaagcttggccattgggccaaagactgtcgacagccacgacgcggccaggcccacgtcgcacgggtggaggaggaagagccggctctgctcctagctcacgcaagcatcgagctacctccagcggcaccggccgcagcggctttcctccaccttgatgagccgaaggtactcgtctccctctgtgacggctccagcaacgacaaggctgatgggtggtacctcgacaccggcgccacccatcacatgaccggccgacgggagttcttcaccgagttcgactccagcgtccgaggcaccgtcaagttcggggacgcctccggcgtggagatcaagggtgttggctccgtcaccttcaccgccaagtccggtgagcacaggctgctcaccggagtctactacatccccgcgttgaggaattctatcatcagcgtgggacagctggatgagaacggctcacgcgtgttggtcgaggacggactcatgaggatttgggatcgccgtcgtcgccttcttgccaaggtaaccagaggcactaatcgactctacatcctcagcgcgcaggtcgcacatccagtttgcctcgccgctcgtcgggacgacgaggcgtggcagtggcacgagcgcttcgggcacctccacttcgaggccctgaagcagctcagtgccaaggagatggtgcgaggcatgccgtgccttgaccacgtggagcagctctgcgacgtctgcgtggtgacaaagcagcggcggctcccctttccccagcagacgagcttccgagccaaggagcggctcgggctcgtgcacggggacttgtgtggcccagtgacaccggccacaccaggaggacgacgttatttcctgctgctcgtcgacgacctctcccgctacatgtgggtgatggtcctcggcagcaagggagaggctgcggacgccatcaggcatgcgcaggctgctgcagaggcggagtgcggccgcaagctgcgcgtgctgcgcaccgacaacggcggcgaattcacggcagctgaattcgcgtcgtactgcgctgatgagggcattcagcgccactacaccgcgccgtacagcccacagcagaacggcgtcgtcgagcggcgcaaccagacggttgtggggatggctcgggccctcctcaagcagagggggatgccggccatcttctggggggaggcggtggtgacggccgcctacatcctcaaccgctcgcctaccaaggccctcgatggcaggacaccgtacgaggcttggcatgggcgcaagccggcggtctcccacctgcgggtcttcggctgcctcgcgttcgccaaggagcttggccacatcggcaagctcgacgacaggagcaccccaggggtgttcatcggctacgcggagggctcgaaggcctaccgcatcctcgacccggagacacagcgtgtgcgcattacgcgcgatgttgtgttcgacgaagggcgagggtgggtatgggacaaggcggtggatgatggttcgactccgacgtacgacgacttcaccatcgagtacgtccacttcgagggagctgggggagtaggcagctcttcttcaccgagcgtgtctaccccagtccccgagcctccaccgactccaacaccaacacaccctcgggccacgacttcgactacgacgagctcttcgtcgacaccaccccagccggtgtccccacacgctccagcaccaacagccactcctccgggcacgtctactccgacgccagctcgtgttgagcgcagcccggtggagttcgttactccgctctcccacgacggggagcgcatcgacgcgtaccatgacggcgagcagctacggtaccgtacgatggaggatcttctcggcgaccagccggtgccgggactggtgcctcgcaacctggaggcgcagttgcaccttgcgtgcgacgacggtgagcctcggtcttttgcagaggccgagaaacacgcggcatggcgtgccgcgatgcagtcggagatggacgcggttcaggagaaccgcacctgggagcttgctgacctccctcgtggtcaccgcgcgatcacccttaagtgggtgttcaagctgaagagggatgaagccggagccatcgtcaagcacaaggctcgcttggtggcacgcggtttcgtgcagcaggaggggatcgactacgacgatgccttcgctcccgtggcacggatggagtccgtgcgactccttcttgcgctggctgctcaggaaggctggggcgtccatcacatggacgtcaagtcggcgtttctaaacggcgacttgaaggaggaggtctacgtgcaccagccgccgagatttgtgatccccggcaaggagggcaaggtgctacgcctgcacaaggccctctacggcttgcggcaggcaccgagggcgtggaatgccaagttggattccacgctcaaggggatgggcttcgagcaaagcccgcacgaggcggccatctaccggcggggcaatggaggaaatgccttgctggtgggtgtctacgtcgacgacttagtgatcaccggcaccaaggatgcagaggtcgcggcgttcaaggaggagatgaaggccaccttccagatgagtgatctggggcctctctccttctacctggggatcgaagtgcaccaggacaactccgggatcacgcttcgacagaccgcctacgccaagcgcgtcgttgagctggctgggctcaccgattgcaacccagctctcactccgatggaggagagactgaagctgagccgcgacagcacagcggaggaggtggatgctacacagtaccgacgtcttgtggggagccttcgctacctcacccacacacggccggacttggccttctccgtcggctacgtcagtcggttcatgcagcgaccgacgacggagcaccagcaggctgtgaagaggatcatccgctacgttgcggggactctcgaccacggtctctactacccgaggtgtcctggcaaggcacacttcgtcgggtacagcgacagcgaccacgccggcgacatcgacaccagcaagagcacgagcgggattctctttttcctcggcgagtgcctcgttagctggcagtcaatcaagcagcaggtggtggccctgtccagctgcgaggccgagtacatggcagcatccgccgcttcgacccaggcgctctggcttgctcgactgcttagtgatctcctcggcagagatactggagcggtggagctcagggtggatagcaagtccgctctggccctggcaaaaaaccccgtttttcacgaacggagcaagcacatccgagtgaggtaccatttcatccgaagctacttggaggaagggagcatcaaggcgagctacatcaacaccaaggaccagcttgcggatttgctcaccaaaccccttgggaggatcaagttccttgagctttgctcccggatcgggatggctcaactctcccacaagacggcgcacaagacttag

SEQ ID NO: 15242 - DNA, 4629 bp, Oryza sativa
  Clone ID: TFbOSC401408j.C1.o1.fg
atgtccgacgctcggtctcggcgttcggtcgcctcgagcactcggcgtcagcaggacgccgagctcgccgcagcagaagagcgcaggcgagcaacggctcagaccgctgcagcagcagcgagggcggccagactggcggcagcggagttggcagcagccagggcggaggcggaggcggaggcggcggaagatgcggcacgtgcggcggaggtagaggttgagaccttgcgcagcagcatcaacggctccatcgccggcgacatcaccgccgacagggagcttgaggagctggcaagaggaagggcacgggagcgagcagagcggtgggcagcagcccacctccacggcggcggcggcggcccaagggaccgcgcgcccgccgacgggaacccagacgggcgcgggcgtgccggcggcagcccggagcccgcacgcggccctcgcaggcggcacggctctctctcccctgaccggcgctatggtcaccacggcgtccagacggtggtcagggactttggtcccggcggtgggtggcctaccctcaccaaaaccaactacatcgagtgggccgcggtgatgagggtgaggctccaggtgcggcacatgtgggaggcagtccggtacggcgacgtcgactacgacgaggatcggcgggcactggatgccctcatcgttgcagtcccgcccgagatgcagttctcgctttcccagaagcggactgccaaggaggcctgggacgccatcgctgcggcacgcatcggcagcgaccgcgcccgcaagtccacactgcaggcactccgcaaggagtgggagaacctggccttcaagccaggtgaggatgttgatgactttgctctccgtctcaacactctcttgcagaagatggtgcagtacggcgacgacacctacgacgaggagagagctgtcgagaagctcttccgctgcgtccctgagaagtacagacggatcgctcgctcgatcgaatctctgctggacctctccacgatgtcgatcgaggaggcgttaggtcgcctcaaggtcgtcgatggtgatgagccacagcctctctcggggcccatcaccatcggcgggaagctccacctcactcgggagcagtgggaggcctctcagggtgacgggaggaagggggagtcatcttccccgacaggcggccgtaagccgcgcaaggcgcggggaggtgtccagctacggtgggcgcgaagacgtgccgagggtggcgcccgcagaggcgcccagggcgttgccaccggcaaccacaagccggcacgagacgacacctgccgcaactgtggcaagcttggccattgggccaaagactgtcgacagccacgacgcggccaggcccacgtcgcacgggtggaggaggaagagccggctctgctcctagctcacgcaagcatcgagctacctccagcggcaccggccgcagcggctttcctccaccttgatgagccgaaggtactcgtctccctctgcgacggctccagcaacgacaaggctgatgggtggtacctcgacaccggcgccacccatcacatgaccggccgacgggagttcttcaccgagttcgactccagcgtccgaggctccgtcaagttcggggacacctccggcgtggagatcaagggtgttggctccgtcaccttcaccgccaagtccggtgagcacaggctgctcaccagagtctactacatccccgcgttgaggaattctatcatcagcgtgggacagctggatgagaacggctcacgcgtgttggtcgaggacggactcatgaggatttgggatcgccgccgtcgccttcttgccaaggtaaccagaggcactaatcgactctacatcctcagcgcgcaggtcgcacaaccagtttgcctcgccgctcgtcgggacgacgaggcgtggcagtggcacgagcgcttcgggcacctccacttcgaggccctgaagcagctcagtgccaaggagatggtgcgaggcatgccgtgcctcgaccacgtggagcagctctgcgacgtctgcgtggtgacgaagcagcggcggctcccctttccccagcagacgagcttccgagccaaggagcggctcgagctcgtgcacggggacttgtgtggcccagtgacaccggccacaccaggaggacgacgttacttcctgctgctcgtcgacgacctctcccgctacatgtgggtgatggtcctcggcagcaagggagaggctgcggacgccatcaggcatgcgcaggctgctgcagaggcggagtgcggccgcaagctgcgcgtgctgcgcaccgacaacggcggcgaattcacggcggctgaattcgtgtcgtactgcgctgatgagggcattcagcgccactacaccgcgccgtacagcccacagcagaacggcgtcgtcgagcggcgcaaccagacggttgtggggatggctcgggccctcctcaagcagagggggatgctggccatcttctggggggaggcggtggacaccgtacgaggcttggcatggcgcaagccggcggtctcccacctgcgggtcttcggctgcctcgcgttcgccaaggagcttggccacatcggcaagctcgacgacaggagcaccccaggggtgttcatcggctacgcggagggctcgaagacctaccgcatcctcgacccggagacacagcgtgtgcgcattgcgcgcgatgttgtgttcgacgaagggcgagggtgggtatgggacaaggcggtggatgatggttcgactccgacgtacgacgacttcaccatcgagtacgtccacttcgagggagctgggggaccggtgtccccacacgctccagcaccaacagccactcctccgggcacgtctactccgacgccagctcgtgttgagcgcagcccggtggggttcgttactccgctctcccacgacgaggagcgcatcgacgcgtaccatgatggcgagcagctacggtaccgtacgatggaggatcttctcggcgaccagccggtgccgggactggtgcctcgcaacctggaggcgcagttgcaccttgcgtgcgacgacggtgagcctcggtcctttgcaaaggccgagaaacacgcggcatggcgtgccacgatgcagtcggagatggacgcggttcaggagaaccgcacctgggagcttgctgacctccctcgtggtcaccgcgcgatcacccttaagtgggtgttcaagctgaagagggatgaagccggagccatcgtcaagcacaaggctcgcttggtggcacgcggtttcgtgcagcaggaggggatcgactacgacgatgccttcgctcccgtggcacggatggagtctgtgcgactcctccttgcgctggctgctcaggaaggctggggcgtccatcacatggacgtcaagtcggcgttcctaaacggcgacttgaaggaggaggtctacgtgcaccagccgccgggatttgtgattctcggcaaggagggcaaggtgctacgcctgcacaaggccctctacggcttgcggcaggcaccgagggcgtggaatgccaagttggattccacgctcaaggggatgggcttcgagcaaagcccgcacgaggcggccatctaccggcggggcaatggaggaaatgccttgctggtgggtgtctacgtcgacgacttagtgatcaccggcaccaaggatgcagaggtcgcggcattcaaggaggagatgaaggccaccttccagatgagtgatctggggcctctctccttctacctggggatcgaagtgcaccaggacaactccgggatcacgcttcgacagaccgcctacgccaagcgcgtcgttgagctggctgggctcaccgattgcaacccagctctcactccgatggaggagagactgaagctgagccgcgacagcacggcggaggaagtggatgctacacagtaccggcgtcttgtggggagccttcgctacctcacccacacacggccggacttggccttctccgtcggctacgtcagtcggttcatgcagcgaccgacgacggagcaccagcaggctgtgaagaggatcatccgctacgttgcggggactctcgaccacggtctctactacccgaggtgtcctgacaaggcacacttcgtcgggtacagcgacagcgaccacgccggcgacattgacaccagcaagagcacgagcgggattctcttcttcctcggcgagtgcctcgttagctggcagtcaatcaagcagcaagtggtggccctgtccagctgcgaggccgagtacatggcggcatccgccgcttcgacccaggcgctatggcttgctcgactgcttagtgatctcctcggcagagatactggagcggtggagctcagggtggataacaagtccgctctggccctggcaaagaaccccgtttttcacgaacggagcaagcacatccgggtgaggtaccatttcatccgaagctacctggaggaagggagcatcaaggcgagctacatcaacaccaaggaccagcttgcggatttgctcaccaaaccccttgggaggatcaagttccttgagctttgctcccggatcgggatggctcaactttcccacaagacggcgcacaagacttag

SEQ ID NO: 15243 - DNA, 3861 bp, Oryza sativa
  Clone ID: TFbOSC401589j.C1.o7.fg
atgtgggaggcagtctggtacggcgacgtcgactacgacaaagatcgacgggcgctggatgccctcatcactgcagtcccgcccgagatgcagttctcgctttcccagaagcggactgccaaggaggcctgggacgctatcgctgcggcacgcatcggcagcgaccgcgcccgcaagtccacgctgcaggcactccgcaaggagtgggagaacctggccttcaagccaggtaaggatgttgatgactttgccctccgtctcaacaatcttttgcagaagatggtgcagtgcgacgacgacacctacgacgaggagagagctgtcgagaagctcttccactgcgtcccagagaagtacaggcagatcgctcgctcgatcgagtctctgctggacctctccacgatgtcgattgaggaggcgttgggtcgcctcaaggtcgtcgacgatgatgagccacagcctctctcggggcctatcaccattggcgggaagctccatctcactcgggagcagtgggaggcctctcagagtgacggaagaaagggggagtcttctccctcgataggcggccgcaagccgcgcaaggcatgcggaggtgtccagctgcggtgggcgcgaagacgcgccgagggtggcgctcgcagaggtgcccagggcggcgccgccagcaaccacaagccggcacgagacgacacctgccgcaactgtggcaagcttggccattgggccaaagactgtcgacagccacgacgtggccaggcccacgtcgcacaggtggaggaggaagagccggctctgctcctggcacacgcaagcatcgagcttcctccagcggcaccggccgcagcggctttcctccaccttgatgagccgaaggtactcgtctctctctgcaacagctccagcaacaacaaggctgatgggtggtacctcgacaccggcgccacccatcacatgaccggccgacgggagttcttcaccgagttcgaccccggcgtccgaggctccatcaagtttggggacgcctccggcgtggagatcaagggcgttggctccgtcaccttcaccgccaagtccggtgagcacaggctgctcaccggagtttactacatccccgcgttgaggaattctatcatcagcgtgggacagctggatgagaacggctcacgcgtgttggtcgaggacagactcatgaggatttgggatcgccgtcgtcgccttcttgccaaggtaaccagaggcactaatcgactctacatcctcggcgcgcaggtcgcacaaccagtttgcctcaccgctcgtcgggacgacgaggcatggcagtggcacgagcgcttcgggcacctccacttcgaggccctgaagcacctcagtgccaaggagatggtgcgaggcatgccgtgccttgaccatgtggagcagctctgcgacgtcttcatgacgagcttccgagccaaggagcggctcgagctcgtgcacggggacttgtgtggcccagtgacaccggccacaccaggaggacgatgttacttcctgctgctcgtcgacgacctctcccgctacatgtgggtgatggtcctcggcagcaagggagaggctgcggatgccatcaggcgcgcgcaggccgctgcagaggtggagtgcggccgcaagctgcgcgtgctgcgcaccgacaacggcagcgaattcacggcggctgaattcgcgttgtactgcgttgatgagggcattcagcgccactacaccgcgccgtacagcccgcagcagaacggcgtcgttgagcggcacaaccagacggttgtggggatggctcgggctctcctcaagcagagggggatgccggccatcttctggggggaggcggtggtgacagccgtctacatcctcaaccgctcgcctaccaaggccctcgatggcaggacaccgtacgaggcttggcatggacgcaagccggcggtctcccacctacgggtctttggctgcctcgcgttcgccaaggagcttggccacatcggcaagcttgacgacaagagcaccccaggggtgctcatcagctacgcggagggctcgaaggcctaccacatcctcgacccggagacacagcgtgtgcgcacagcgcgcgacgtagtgttcgacgaagggcgagggtgggtatgggacaaggcggtggatgatggtttgactccgacgtacgacgacttcaccatcgagtacgtccacttcgagggagctgggggatcggtgtccccacgtgctccagcaccaacagccactcctccgggcacgtctactccgacgccagctcgtgttgagcgcagcccggtggagttcgctactccactctcccacgacggggagcgcatcgacgcgtaccacgacggcgagcagctacggtaccgtacgatggaagatcttctcagcgaccagccggtgccgggactggtgcctcgcgacctagaggcgcagttgcaccttgcgtgtgatgacggtgagcctgggtcttttgcagaggccgagaaacatgcggcatggcgtgccacgatgcagtcggagatggacgcggttcaggagaaccgcacctgggagtttgctgacctccctcgtggtcaccgcgcgatcacccttaagtgggtgttcaagctgaagagggatgaagccggagccatcgtcaagcacaaggctcgcttggtggcacgcggcttcgtgcagcaggaggggatcgactacgacgatgccttcgctcccgtggcacggatggagtcctcggcatttctgaacggcgacttgaaggaggaggtctacgtgcaccagccgccgggattcgtgctccccagcaaggagggcaaggtgctacgcctgcacaaggccctctacggcttgcggcaggcaccgagggcgtggaatgccaagttggattccacgctcaaggggatgggcttcgagcaaagcccgcacgaggcggccatctaccggcggggcaatggaggaaatgccttgctggtgggtgtctacgtcgacgacttggtgatcactggcaccaaggatgcggaggtggcggcattcaaggaggagatgaaggccaccttccagatgagtgatctggggcctctcttcttctacctggggatcgaagtgcaccaggacaacttcgggatcacgcttcgacagaccgcctacgccaagcgcgtcgttgagctggctgggctcaccgattgcaacccagctctcactccgatggaggagagactgaagctgagccacgacagcacggcggaggaggtggatgctacacagtaccggcgccttgtggggagccttcgctacctcacccacacacggccggacttggccttctccgtcggctacgtcagtcggtgtcctggcaaagcacacttcctcaggtacagcgacagcgaccacgccggcgacatcgacaccagcaagagcacgagcgggattctcttcttcctcggcgagtgcctcgttagctggcagtcggtcaagcagcaggtggtggccctgtccagctgcgaggctgagtaccaggcgctctggcttgctcgactgcttggtgatctcctcggcagagacactggagcggtagagctcagggtggacagcaagtccgctctggccctggcaaagacccccgttttccacgaacggagcaagcacatccgggtgaggtaccacttcatccgaagctacttggaggaagggagcatcaaggcgagctacatcaacaccaaggaccagcttgcggacttgctcaccaagcctcttgggaggatcaagttcctcgagctctgctccaggatcgggatggcccaactttcccacaagacgacacacaagacttag

SEQ ID NO: 15244 - DNA, 4806 bp, Oryza sativa
  Clone ID: TFbOSC401648j.C1.o6.fg
atgtccgacgctcggtctcggcgttcggtcgcctcgagcactcggcgtcagcaggacgccgagctcgccgcagcagaagagcgcaggcgagcaacggctcagaccgctgcagcagcagcgagggcggccagactggcggcagcggagttggcagcagccagggcggaggcggaggcggaggcggcggaagatgcggcacgtgcggcggaggtagaggttgagaccttgcgcagcagcatcaacggctccatcgccggcgacatcaccgctgacagggagcttgaggagctggcaagaggaagggcacgggagcgagcagagcggtgggcagcagcccacctccacggcggcggcggcggcccaagggaccgtgcgcccgccgacgggaacccagacgggcgcgggcgtgccggcggcagcccggagcccgcacgcggccctcgcaggcggcacggctccctctcccctgaccggcgccatggtcaccacggcgtccagacggtggtcagggattttggtcccggcggtgggtggcctaccctcaccaaaaccaactacatcgagtgggccgcggtgatgagggtgaggctccaggtgcggcacatgtgggaggcagtccggtacggtgacgtcgactacgacgaggatcggcgggcactggatgccctcatcgctgcagttccgcccgagatgcagttctcgctttcccagaagcggactgccaaggaggcctgggacgccatcgctgcggcacgcatcggcagcgaccgcgcccgcaagtccacactgcaggcactccgcaaggagtgggagaacctggccttcaagccaggtgaggatgttgatgactttgctctccgtctcaacactctcttgcagaaaatggtgcagtacggcgacgacacctacgacgaggagagagctgtcgagaagctcttccgctgcgtccctgagaagtacaggcagatcgctcgctcgattgaatctctgctggacctctccacgatgtcgatcgaggaggcgttaggtcgcctcaaggtcgtcgatggtgatgagccacggcctctctcggggcccatcaccatcggcgggaagctccatctcactcgggagcagtgggaggcctctcagggtgacgggaggaagggggagtcatcttccccgacaggcggccataagccgcgcaaggcgcggggaggtgtccagctacggtgggcgcgaagacgtgccgagggtggcgcccgcagaggcgcccagggcgttgccaccggcaaccacaagccggcacgagacgacacctgccgcaactgtggcaagcttggccattgggccaaagactgtcgacagccacgacgcggccaggcccacgtcgcacaggtggaggaggaagagccggctctgctcctagctcacgcaagcatcgagctacctccagcggcaccggccgcagcggctttcctccaccttgatgagccgaaggtactcgtctccctctgtgacggctccagcaacgacaaggctgatgggtggtacctcgacaccggcgccacccatcacatgaccggccgacgggagttcttcaccgagttcgactccagcgtccgaggcaccgtcaagttcggggacgcctccggcgtggagatcaagggtgttggctccgtcaccttcaccgccaagtccggtgagcacaggctgctcaccggagtctactacatccccgcgttgaggaattctatcatcagcgtgggacagctggatgagaacggctcacgcgtgttggtcgaggacggactcatgaggatttgggatcgccgtcgtcgccttcttgccaaggtaaccagaggcactaatcgactttacatcctcagcgcgcaggtcgcacatccagtttgcctcgccgctcgtcgggacgacgaggcgtggcagtggcacgagcgcttcgggcacctccacttcgaggccctgaagcagctcagtgccaaggagatggtgcgaggcatgccgtgccttgaccacgtggagcagctctgcgacgtctgcgtggtgacaaagcagcggcggctcccctttccccagcagacgagcttccgagccaaggagcggctcgggctcgtgcacggggacttgtgtggcccagtgacaccggccacaccaggaggacgacgttatttcctgctgctcgtcgacgacctctcccgctacatgtgggtgatggtcctcggcagcaagggagaggctgcggacgccatcaggcatgcgcaggctgctgcagaggcggagtgcggccgcaagctgcgcgtgctgcgcaccgacaacggcggcgaattcacggcagctgaattcgcgtcgtactgcgctgatgagggcattcagcgccactacaccgcgccgtacagcccacagcagaacggcgtcgtcgagcggcgcaaccagacggttgtggggatggctcgggccctcctcaagcagagggggatgccggccatcttctggggggaggcggtggtgacggccgcctacatcctcaaccgctcgcctaccaaggccctcgatggcaggacaccgtacgaggcttggcatgggcgcaagccggcggtctcccacctgcgggtcttcggctgcctcgcgttcgccaaggagcttggccacatcggcaagctcgacgacaggagcaccccaggggtgttcatcggctacgcggagggctcgaaggcctaccgcatcctcgacccggagacacagcgtgtgcgcattacgcgcgatgttgtgttcgacgaagggcgagggtgggtatgggacaaggcggtggatgatggttcgactccgacgtacgacgacttcaccatcgagtacgtccacttcgagggagctgggggagtaggcagctcttcttcaccgagcgtgtctaccccagtccccgagcctccaccgactccaacaccaacacaccctcgggccacgacttcgactacgacgagctcttcgtcgacaccaccccagccggtgtccccacacgctccagcaccaacagccactcctccgggcacgtctactccgacgccagctcgtgttgagcgcagcccggtggagttcgttactccgctctcccacgacggggagcgcatcgacgcgtaccatgacggcgagcagctacggtaccgtacgatggaggatcttctcggcgaccagccggtgccgggactggtgcctcgcaacctggaggcgcagttgcaccttgcgtgcgacgacggtgagcctcggtcttttgcagaggccgagaaacacgcggcatggcgtgccgcgatgcagtcggagatggacgcggttcaggagaaccgcacctgggagcttgctgacctccctcgtggtcaccgcgcgatcacccttaagtgggtgttcaagctgaagagggatgaagccggagccatcgtcaagcacaaggctcgcttggtggcacgcggtttcgtgcagcaggaggggatcgactacgacgatgccttcgctcccgtggcacggatggagtccgtgcgactccttcttgcgctggctgctcaggaaggctggggcgtccatcacatggacgtcaagtcggcgtttctaaacggcgacttgaaggaggaggtctacgtgcaccagccgccgggatttgtgatccccggcaaggagggcaaggtgctacgcctgcacaaggccctctacggcttgcggcaggcaccgagggcgtggaatgccaagttggattccacgctcaaggggatgggcttcgagcaaagcccgcacgaggcggccatctaccggcggggcaatggaggaaatgccttgctggtgggtgtctacgtcgacgacttagtgatcaccggcaccaaggatgcagaggtcgcggcgttcaaggaggagatgaaggccaccttccagatgagtgatctggggcctctctccttctacctggggatcgaagtgcaccaggacaactccgggatcacgcttcgacagaccgcctacgccaagcgcgtcgttgagctggctgggctcaccgattgcaacccagctctcactccgatggaggagagactgaagctgagccgcgacagcacagcggaggaggtggatgctacacagtaccgacgtcttgtggggagccttcgctacctcacccacacacggccggacttggccttctccgtcggctacgtcagtcggttcatgcagcgaccgacgacggagcaccagcaggctgtgaagaggatcatccgctacgttgcggggactctcgaccacggtctctactacccgaggtgtcctggcaaggcacacttcgtcgggtacagcgacagcgaccacgccggcgacatcgacaccagcaagagcacgagcgggattctctttttcctcggcgagtgcctcgttagctggcagtcaatcaagcagcaggtggtggccctgtccagctgcgaggccgagtacatggcagcatccgccgcttcgacccaggcgctctggcttgctcgactgcttagtgatctcctcggcagagatactggagcggtggagctcagggtggatagcaagtccgctctggccctggcaaaaaaccccgtttttcacgaacggagcaagcacatccgagtgaggtaccatttcatccgaagctacttggaggaagggagcatcaaggcgagctacatcaacaccaaggaccagcttgcggatttgctcaccaaaccccttgggaggatcaagttccttgagctttgctcccggatcgggatggctcaactctcccacaagacggcgcacaagacttag

SEQ ID NO: 15245 - DNA, 5376 bp, Oryza sativa
  Clone ID: TFbOSC409503j.C1.o9.fg
atggacaacctgtcagagccactgctcgcagagatcatcaagaggattgccaagacaagtgatcgtaactctctttcccttgtgtcgaagcagctctacactatcgacgcggagcaaagggatgctatccatgttggctgtggtcttcacccggcaactgaagctttggcatcactatgctcccggttccctaatttgtggaaagtagtgattgattactctggttggatatctatccacgggaagcagttggacaaccaagggctccttgtgctttcgtctcactgctcttcactgaccgatctcacattaaacttctgctcctatatcgatgattctggtattggctatctggcttattgcaagaaactaaggtctttcaggctgaactttgcaccagcaataagttcaagagggcttctctcggtggcagttggttgcaagagtctttgtactttccaccttgttgattgcatgaaagtaggaagtgtggagtggctggagtaccttggcagggccggatcattggaagaacttgtggtaaaggattcagccccccggaggtgcgccatgtccgacgctcggtctcggcgttcggtcgcctcgagcactcggcgtcagcaggacgccgagctcgccgcagcagaagagcgcaggcgagcaacggctcagaccgctgcagcagcagcgagggcggccagactggcggcagcggagttggcagcagccagggcggaggcggaggcggaggcggcggaagatgcggcacgtgcggcggaggtagaggttgagaccttgcgcagcagcatcaacggctccatcgccggcgacatcaccgctgacagggagcttgaggagctggcaagaggaagggcacgggagcgagcagagcggtgggcagcagcccacctccacggcggcggcggcggcccaagggaccgtgcgcccgccgacgggaacccagacgggcgcgggcgtgccggcggcagcccggagcccgcacgcggccctcgcaggcggcacggctccctctcccctgaccggcgccatggtcaccacggcgtccagacggtggtcagggattttggtcccggcggtgggtggcctaccctcaccaaaaccaactacatcgagtgggccgcggtgatgagggtgaggctccaggtgcggcacatgtgggaggcagtccggtacggtgacgtcgactacgacgaggatcggcgggcactggatgccctcatcgctgcagttccgcccgagatgcagttctcgctttcccagaagcggactgccaaggaggcctgggacgccatcgctgcggcacgcatcggcagcgaccgcgcccgcaagtccacactgcaggcactccgcaaggagtgggagaacctggccttcaagccaggtgaggatgttgatgactttgctctccgtctcaacactctcttgcagaaaatggtgcagtacggcgacgacacctacgacgaggagagagctgtcgagaagctcttccgctgcgtccctgagaagtacaggcagatcgctcgctcgattgaatctctgctggacctctccacgatgtcgatcgaggaggcgttaggtcgcctcaaggtcgtcgatggtgatgagccacggcctctctcggggcccatcaccatcggcgggaagctccatctcactcgggagcagtgggaggcctctcagggtgacgggaggaagggggagtcatcttccccgacaggcggccataagccgcgcaaggcgcggggaggtgtccagctacggtgggcgcgaagacgtgccgagggtggcgcccgcagaggcgcccagggcgttgccaccggcaaccacaagccggcacgagacgacacctgccgcaactgtggcaagcttggccattgggccaaagactgtcgacagccacgacgcggccaggcccacgtcgcacgggtggaggaggaagagccggctctgctcctagctcacgcaagcatcgagctacctccagcggcaccggccgcagcggctttcctccaccttgatgagccgaaggtactcgtctccctctgcgacggctccagcaacgacaaggctgatgggtggtacctcgacaccggcgccacccatcacatgaccggccgacgggagttcttcaccgagttcgactccagcgtccgaggcaccgtcaagttcggggacgcctccggcgtggagatcaagggtgttggctccgtcaccttcaccgccaagtccggtgagcacaggctgctcaccggagtctactacatccccgcgttgaggaattctatcatcagcgtgggacagctggatgagaacggctcacgcgtgttggtcgaggacggactcatgaggatttgggatcgccgtcgtcgccttcttgccaaggtaaccagaggcactaatcgactctacatcctcagcgcgcaggtcgcacatccagtttgcctcgccgctcgtcgggacgacgaggcgtggcagtggcacgagcgcttcgagcacctccacttcgaggccctgaagcagctcagtgccaaggagatggtgcgaggcatgccgtgccttgaccacgtggagcagctctgcgacgtctgcgtggtgacaaagcagcggcggctcccctttccccagcagacgagcttccgagccaaggagcggctcgggctcgtgcacggggacttgtgtggcccagtgacaccggccacaccaggaggacgacgttatttcctgctgctcgtcgacgacctctcccgctacatgtgggtgatggtcctcggcagcaagggagaggctgcggacgccatcaggcatgcgcaggctgctgcagaggcggagtgcggccgcaagctgcgcgtgctgcgcaccgacaacggcggcgaattcacggcggctgaattcgcgtcgtactgcgctgatgagggcattcagcgccactacaccgcgccgtacagcccacagcagaacggcgtcgtcgagcggcgcaaccagacggttgtggggatggctcgggccctcctcaagcagagggggatgccggccatcttctggggggaggcggtggtgacggccgcctacatcctcaaccgctcgcctaccaaggccctcgatggcaggacaccgtacgaggcttggcatgggcgcaagccggcggtctcccacctgcgggtcttcggctgcctcgcgttcgccaaggagcttggccacatcggcaagctcgacgacaggagcaccccaggggtgttcatcggctacgcggagggctcgaaggcctaccgcatcctcgacccggagacacagcgtgtgcgcattacgcgcgatgttgtgttcgacgaagggcgagggtgggtatgggacaaggcggtggatgatggttcgactccgacgtacgacgacttcaccatcgagtacgtccacttcgagggagctgggggagtaggcagctcttcttcaccgagcgtgtctaccccagtccccgagcctccaccgactccaacaccaacacaccctcgggccacgacttcgactacgacgagctcttcgtcgacaccaccccagccggtgtccccacacgctccagcaccaacagccactcctccgggcacgtctactccgacgccagctcgtgttgagcgcagcccggtggagttcgttactccgctctcccacgacggggagcgcatcgacgcgtaccatgacggcgagcagctacggtaccgtacgatggaggatcttctcggcgaccagccggtgccgggactggtgcctcgcaacctggaggcgcagttgcaccttgcgtgcgacgacggtgagcctcggtcttttgcagaggccgagaaacacgcggcatggcgtgccgcgatgcagtcggagatggacgcggttcaggagaaccgcacctgggagcttgctgacctccctcgtggtcaccgcgcgatcacccttaagtgggtgttcaagctgaagagggatgaagccggagccatcgtcaagcacaaggctcgcttggtggcacgcggtttcgtgcagcaggaggggatcgactacgacgatgccttcgctcccgtggcacggatggagtccgtgcgactccttcttgcgctggctgctcaggaaggctggggcgtccatcacatggacgtcaagtcggcgtttctaaacggcgacttgaaggaggaggtctacgtgcaccagccgccgggatttgtgatccccggcaaggagggcaaggtgctacgcctgcacaaggccctctacggcttgcggcaggcaccgagggcgtggaatgccaagttggattccacgctcaaggggatgggcttcgagcaaagcccgcacgaggcggccatctaccggcggggcaatggaggaaatgccttgctggtgggtgtctacgtcgacgacttagtgatcaccggcaccaaggatgcagaggtcgcggcgttcaaggaggagatgaaggccaccttccagatgagtgatctggggcctctctccttctacctggggatcgaagtgcaccaggacaactccgggatcacgcttcgacagaccgcctacgccaagcgcgtcgttgagctggctgggctcaccgattgcaacccagctctcactccgatggaggagagactgaagctgagccgcgacagcacagcggaggaggtggatgctacacagtaccgacgtcttgtggggagccttcgctacctcacccacacacggccggacttggccttctccgtcggctacgtcagtcggttcatgcagcgaccgacgacggagcaccagcaggctgtgaagaggatcatccgctacgttgcggggactctcgaccacggtctctactacccgaggtgtcctggcaaggcacacttcgtcgggtacagcgacagcgaccacgccggcgacatcgacaccagcaagagcacgagcgggattctctttttcctcggcgagtgcctcgttagctggcagtcaatcaagcagcaggtggtggccctgtccagctgcgaggccgagtacatggcagcatccgccgcttcgacccaggcgctctggcttgctcgactgcttagtgatctcctcggcagagatactggagcggtggagctcagggtggatagcaagtccgctctggccctggcaaaaaaccccgtttttcacgaacggagcaagcacatccgagtgaggtaccatttcatccgaagctacttggaggaagggagcatcaaggcgagctacatcaacaccaaggaccagcttgcggatttgctcaccaaaccccttgggaggatcaagttccttgagctttgctcccggatcgggatggctcaactctcccacaagacggcgcacaagacttag

SEQ ID NO: 15246 - DNA, 4284 bp, Oryza sativa
  Clone ID: TFbOSC416913j.C1.o26.fg
atggtcaccacggcgtccagacggtggtcagggattgtggttccggcggtgggtgggcctaccctcaccaaaaccaactacatcgagtgggccgcggtgatgagggtgaggctccaggtgcggcacatgtgggaggcagtccggtacggtgacgtcgactacgacgaggatcggcgggcactggatgccctcatcgctgcagttccgcccgagatgcagttctcgctttcccagaagcggactgccaaggaggcctgggacgccatcgctgcggcacgcatcggcagcgaccgcgcccgcaagtccacactgcaggcactccgcaaggagtgggagaacctggccttcaagccaggtgaggatgttgatgactttgctctccgtctcaacactctcttgcaaaaaatggtgcagtacggcgacgacacctacgacgaggagagagctgtcgagaagctcttccgctgcgtccctgagaagtacaggcagatcgctcgctcgattgaatctctgctggacctctccacgatgtcgatcgaggaggcgttaggtcgcctcaaggtcgtcgatggtgatgagccacggcctctctcggggcccatcaccatcggcgggaagctccatctcactcgggagcagtgggaggcctctcagggtgacgggaggaagggggagtcatcttccccgacaggcggccgtaagccgcgcaaggcgcggggaggtgtccagctacggtgggcgcgaagacgtgccgagggtggcgcccgcagaggcgcccagggcgttgccaccggcaaccacaagccggcacgagacgacacctgccgcaactgtggcaagcttggccattgggccaaagactgtcgacagccacgacgcggccaggcccacgtcgcacgggtggaggaggaagagccggctctgctcctagctcacgcaagcatcgagctacctccagcggcaccggccgcagcggctttcctccaccttgatgagccgaaggtactcgtctccctctgcgacggctccagcaacgacaaggctgatgggtggtacctcgacaccggcgccacccatcacatgaccggccgacgggagttcttcaccgagttcgactccagcgtccgaggcaccgtcaagttcggggacgcctccggcgtggagatcaagggtgttggctccgtcaccttcaccgccaagtccggtgagcacaggctgctcaccggagtctactacatccccgcgttgaggaattctatcatcagtgtgggacagctggatgagaacggctcacgcgtgttggtcgaggacggactcatgaggatttgggatcgccgtcgtcgccttcttgccaaggtaaccagaggcactaatcgactctacatcctcagcgcgcaagtcgcacatccagtttgcctcgccgctcgtcgggacgacgaggcgtggcagtggcacgagcgcttcgggcacctccactttgaggccctgaagcagctcagtgccaaggagatggtgcgaggcatgccgtgccttgaccacgtggagcagctctgcgacgtctgcgtggtgacaaagcagcggcggctcccctttccccagcagacgagcttccgagccaaggagcggctcgggctcgtgcacggggacttgtgtggcccagtgacaccggccacaccaggaggacgacgttatttcctgctgctcgtcgacgacctctcccgctacatgtgggtgatggtcctcggcagcaagggagaggctgcggacgccatcaggcatgcgcaggctgcagcagaggcggagtgcggccgcaagctgcgcgtgctgcgcaccgacaacggcggcgaattcacggcggctgaattcgcgtcgtactgcgctgatgagggcattcagcgccactacaccgcgccgtacagcccacagcagaacggcgtcgtcgagcggcgcaaccagacggttgtggggatggctcgggccctcctcaagcagagggggatgccggccatcttctggggggaggcggtggtgacggccgcctacatcctcaaccgctcgcctaccaaggccctcgatggcaggacaccgtacgaggcttggcatgggcgcaagccggcggtctcccacctgcgggtcttcggctgcctcgcgttcgccaaggagcttggccacatcggcaagctcgacgacaggagcaccccaggggtgttcatcggctacgcggagggctcgaaggcctaccgcatcctcgacccggagacacagcgtgtgcgcattacgcgcgatgttgtgttcgacgaagggcgagggtgggtatgggacaaggcggtggatgatggttcgactccgacgtacgacgacttcaccatcgagtacgtccacttcgagggagctgggggagtaggcagctcttcttcaccgagcgtgtctaccccagtccccgagcctccaccgactccaacaccaacacaccctcgggccacgacttcgactacgacgagctcttcgtcgacaccaccccagccggtgtccccacacgctccagcaccaacagccactcctccgggcacgtctactccgacgccagctcgtgttgagcgcagcccggtggagttcgttactccgctctcccacgacggggagcgcatcgacgcgtaccatgacggcgagcagctacggtaccgtacgatggaggatcttctcggcgaccagccggtgccgggactggtgcctcgcaacctggaggcgcagttgcaccttgcgtgcgacgacggtgagcctcggtcttttgcagaggccgagaaacacgcggcatggcgtgccgcgatgcagtcggagatggacgcggttcaggagaaccgcacctgggagcttgctgacctccctcgtggtcaccgcgcgatcacccttaagtgggtgttcaagctgaagagggatgaagccggagccatcgtcaagcacaaggctcgcttggtggcacgcggtttcgtgcagcaggaggggatcgactacgacgatgccttcgctcccgtggcacggatggagtccgtgcgactccttgcgctggctgctcaggaaggctggggcgtccatcacatggacgtcaagtcggcgtttctaaacggcgacttgaaggaggaggtctacgtgcaccagccgccgggatttgtgatccccggcaaggagggcaaggtgctacgcctgcacaaggccctctacggcttgcggcaggcaccgagggcgtggaatgccaagttggattccacgctcaaggggatgggcttcgagcaaagcccgcacgaggcggccatctaccggcggggcaatggaggaaatgccttgctggtgggtgtctacgtcgacgacttagtgatcaccggcaccaaggatgcagaggtcgcggcgttcaaggaggagatgaaggccaccttccagatgagtgatctggggcctctctccttctacctggggatcgaagtgcaccaggacaactccgggatcacgcttcgacagaccgcctacgccaagcgcgtcgttgagctggctgggctcaccgattgcaacccagctctcactccgatggaggagagactgaagctgagccgcgacagcacagcggaggaggtggatgctacacagtaccgacgtcttgtggggagccttcgctacctcacccacacacggccggacttggccttctccgtcggctacgctgtgaagaggatcatccgctacgttgcggggactctcgaccacggtctctactacccgaggtgtcctggcaaggcacacttcgtcgggtacagcgacagcgaccacgccggcgacatcgacaccagcaagagcacgagcgggattctcttcttcctcggcgagtgcctcgttagctggcagtcaatcaagcagcaggtggtggccctgtccagctgcgaggccgagtacatggcggcatccgccgcttcgacccaggcgctctggcttgctcgactgcttagtgatctcctcggcagagatactggagcggtggagctcagggtggatagcaagtccgctctggccctggcaaaaaaccccgtttttcacgaacggagcaagcacatccgagtgaggtatcatttcatccgaagctacttggaggaagggagcatcaaggcgagctacatcaacaccaaggaccagcttgcggatttgctcaccaaaccccttaggaggatcaagttccttgagctttgctcccggatcgggatggctcaactctcccacaagacagcgcacaagacttag

SEQ ID NO: 15247 - DNA, 5484 bp, Oryza sativa
  Clone ID: TFbOSC419638j.C1.o10.fg
atgtccgacgctcggtctcggcgttcggtcgcctcgagcactcggcgtcagcaggacgccgagctcgccgcagcagaagagcgcaggcgagcaacggctcagaccgctgcagcagcagcgagggcggccagactggcggcagcggagttggcagcagccagggcggaggcggaggcggaggcggcggaagatgcggcacgtgcggcggaggtagaggttgagaccttgcgcagcagcatcaacggctccatcgccggcgacatcaccgctgacagggagcttgaggagctggcaagaggaagggcacgggagcgagcagagcggtgggcagcagcccacctccacggcggcggcggcggcccaagggatcgtgcgcccgccgacgggaacccagacgggcgcgggcgtgccggcggcagcccggagcccgcacgcggccctcgcaggcggcacggctccctctcccctgaccggcgccatggtcaccacggcgtccagacggtggtcagggattttggtcccggcggtgggtggcctaccctcaccaaaaccaactacatcgagtgggccgcggtgatgagggtgaggctccaggtgcggcacatgtgggaggcagtccggtacggtgacgtcgactacgacgaggatcggcgggcactggatgccctcatcgctgcagttccgcccgagatgcagttctcgctttcccagaagcggactgccaaggaggcctgggacgccatcgctgcggcacgcatcggcagcgaccgcgcccgcaagtccacactgcaggcactccgcaaggagtgggagaacctggccttcaagccaggtgaggatgttgatgactttgctctccgtctcaacactctcttgcagaaaatggtgcagtacggcgacgacacctacgacgaggagagagctgtcgagaagctcttccgctgcgtccctgagaagtacaggcagatcgctcgctcgattgaatctctgctggacctctccacgatgtcgatcgaggaggcgttaggtcgcctcaaggtcgtcgatggtgatgagccacggcctctctcggggcccatcaccatcggcgggaagctccatctcactcgggagcagtgggaggcctctcagggtgacgggaggaagggggagtcatcttccccgacaggcggccataagccgcgcaaggcgcggggaggtgtccagctacggtgggcgcgaagacgtgccgagggtggcgcccgcagaggcgcccagggcgttgccaccggcaaccacaagccggcacgagacgacacctgccgcaactgtggcaagcttggccattgggccaaagactgtcgacagccacgacgcggccaggcccacgtcgcacgggtggaggaggaagagccggctctgctcctagctcacgcaagcatcgagctacctccagcggcaccggccgcagcggctttcctccaccttgatgagccgaaggtactcgtctccctctgtgacggctccagcaacgacaaggctgatgggtggtacctcgacaccggcgccacccatcacatgaccggccgacgggagttcttcaccgagttcgactccagcgtccgaggcaccgtcaagttcggggacgcctccggcgtggagatcaagggtgttggctccgtcaccttcaccgccaagtccggtgagcacaggctgctcaccggagtctactacatccccgcgttgaggaattctatcatcagcgtgggacagctggatgagaacggctcacgcgtgttggtcgaggacggactcatgaggatttgggatcgccgtcgtcgccttcttgccaaggtaaccagaggcactaatcgactctacatcctcagcgcgcaggtcgcacatccagtttgcctcgccgctcgtcgggacgacgaggcgtggcagtggcacgagcgcttcgggcacctccacttcgaggccctgaagcagctcagtgccaaggagatggtgcgaggcatgccgtgccttgaccacgtggagcagctctgcgacgtctgcgtggtgacaaagcagcggcggctcccctttccccagcagacgagcttccgagccaaggagcggctcgggctcgtgcacggggacttgtgtggcccagtgacaccggccacaccaggaggacgacgttatttcctgctgctcgtcgacgacctctcccgctacatgtgggtgatggtcctcggcagcaagggagaggctgcggacgccatcaggcatgcgcaggctgctgcagaggcggagtgcggccgcaagctgcgcatgctgcgcaccgacaacggcggcgaattcacggcagctgaattcgcgtcgtactgcgctgatgagggcattcagcgccactacaccgcgccgtacagcccacagcagaacggcgtcgtcgagcggcgcaaccagacggttgtggggatggctcgggccctcctcaagcagagggggatgccggccatcttctggggggaggcggtggtgacggccgcctacatcctcaaccgctcgcctaccaaggccctcgatggcaggacaccgtacgaggcttggcatgggcgcaagccggcggtctcccacctgcgggtcttcggctgcctcgcgttcgccaaggagcttggccacatcggcaagctcgacgacaggagcaccccaggggtgttcatcggctacgcggagggctcgaaggcctaccgcatcctcgacccggagacacagcgtgtgcgcattacgcgcgatgttgtgttcgacgaagggcgagggtgggtatgggacaaggcggtggatgatggttcgactccgacgtacgacgacttcaccatcgagtacgtccacttcgagggagctgggggagtaggcagctcttcttcaccgagcgtgtctaccccagtccccgagcctccaccgactccaacaccaacacaccctcgggccacgacttcgactacgacgagctcttcgtcgacaccaccccagccggtgtccccacacgctccagcaccaacagccactcctccgggcacgtctactccgacgccagctcgtgttgagcgcagcccggtggagttcgttactccgctctcccacgacggggagcgcatcgacgcgtaccatgacggcgagcagctacggtaccgtacgatggaggatcttctcggcgaccagccggtgccgggactggtgcctcgcaacctggaggcgcagttgcaccttgcgtgcgacgacggtgagcctcggtcttttgcagaggccgagaaacacgcggcatggcgtgccgcgatgcagtcggagatggacgcggttcaggagaaccgcacctgggagcttgctgacctccctcgtggtcaccgcgcgatcacccttaagtgggtgttcaagctgaagagggatgaagccggagccatcgtcaagcacaaggctcgcttggtggcacgcggtttcgtgcagcaggaggggatcgactacgacgatgccttcgctcccgtggcacggatggagtccgtgcgactccttcttgcgctggctgctcaggaaggctggggcgtccatcacatggacgtcaagtcggcgtttctaaacggcgacttgaaggaggaggtctacgtgcaccagccgccgggatttgtgatccccggcaaggagggcaaggtgctacgcctgcacaaggccctctacggcttgcggcaggcaccgagggcgtggaatgccaagttggattccacgctcaaggggatgggcttcgagcaaagcccgcacgaggcggccatctaccggcggggcaatggaggaaatgccttgctggtgggtgtctacgtcgacgacttagtgatcaccggcaccaaggatgcagaggtcgcggcgttcaaggaggagatgaaggccaccttccagatgagtgatctggggcctctctccttctacctggggatcgaagtgcaccaggacaactccgggatcacgcttcgacagaccgcctacgccaagcgcgtcgttgagctggctgggctcaccgattgcaacccagctctcactccgatggaggagagactgaagctgagccgcgacagcacagcggaggaggtggatgctacacagtaccgacgtcttgtggggagccttcgctacctcacccacacacggccggacttggccttctccgtcggctacgtcagtcggttcatgcagcgaccgacgacggagcaccagcaggctgtgaagaggatcatccgctacgttgcggggactctcgaccacggtctctactacccgaggtgtcctggcaaggcacacttcgtcgggtacagcgacagcgaccacgccggcgacatcgacaccagcaagagcacgagcgggattctctttttcctcggcgagtgcctcgttagctggcagtcaatcaagcagcaggtggtggccctgtccagctgcgaggccgagtacatggcagcatccgccgcttcgacccaggcgctctggcttgctcgactgcttagtgatctcctcggcagagatactggagcggtggagctcagggtggatagcaagtccgctctggccctggcaaaaaaaccccgtttttcacgaacggagcaagcacatccgagtgaggttgatgtcattacatacagtacactcatcgatggatattgcttggcaggtaagatggatgaagcaatgaagttactttctgacatggtctcagttgggttgaaacctgatactgttacttatagcactttgattaatggctactgtaaaattagtaggatggagaatgcattatctcttttcaggcagatggtgtgcaatggtgttagtcctaatattatcacgtataacatagttcttcaaggtttatttcagactggacaaactcgtgctgctaaagaaatctatgtcaggattatcaaaaggggaatacagcttgaaattagcacatgcaacatagtccttcaaggactttgcaaaaataatctcactggtgaggcacttcagatgtttcagaatctatgtttgatggatgtaaagcttgagactagaactttcaatataatgattggttccttgcttagaagtggcagaaaggatgaatcaaaggatttgtttgctgctctctcggcaaatggtttagcaccggatgttgtgacctataccttaatgattgaaaatctcatagaagatggcttgctcgaagagtctgataatctatttctttcaatggagaagaatggctgtgttcctaactcccgtatgcttaattgcatcgtcagaaagttacttcagaaaggggagataggcagggctggtgtttatctgtccaaaattgataaaaatgacttctcccttgaagcttccactgctgagttactgattttgctggtttcaagtgggaagtacaatcaacatatgaagggtctccctgagaagtaccactcctttgtgaaatccagggctgtttga

SEQ ID NO: 15248 - DNA, 3744 bp, Oryza sativa
  Clone ID: TFbOSC421987j.C1.o2.fg
atggagttggcagcagccagggcggaggcggaagcagaggcggcggaagatgcggcacgtgtggcggaggtagaggttgaaaccttgcgcagtagcatcaacggttccatcaccggcgacagcaccgccgacagggagcttgaggagctggcaagaggaaggacggtggtcagggactttggtcccggctgtgggtggcctaccctcaccaaaaccaactacattgagtgggccgcgatgatgagggtgaggctccaggtgcagcacatgtgggaggcagtccggtacggcgacgtcgactacgacgaggatcggcgggcactggatgccctcatcgctgcagtcttgcccgagatgcagttctcgctttcccagaagcggactgccaaggaggcctgggacgccatcgttgcggcacgcatcggcagcgaccgcgcccgcaagtccacactgcaggcactccgcaaggagtgggagaacctggccttcaagccaggtgaggatgttgatgactttgccctccgtctcaacactcttttgcagaagatggtgcagtacggtgacgacacctacgacgaggagagagctgtcgagatgctcttccgctgcgtcccagagaagtacaggcagatcgctcgctcgatcgagtctctgctggacctctccacgatgtcgatcgaggaggcgttaggtcgcctcaaggtcgtcgacggtgatgagccacagcccctctcggggcctatcaccattggcgggaagctccatttcactcgggagcagtgggaggcctctcaaggtgacgggatgaagggggagtcttctccctcgacaggcggccgcaagccgcgcaaggcgtgtggaggtgtccagctgcggtgggcgcgaagacgcgccgagggtggcgctcgcagaggcgcccagggcggcgccgccggcaaccacaagccggcacgagacgacacctgccgcaactgtggcaagcttggccattgggccaaagactgtcgacagccacgacatggccaggcccacgtcgcacaggtagaggaggaagagccggctctgctcctggcatacgcaagcatcgagctacccccagcgacaccggccacagcggctttcctccaccttgatgagccgaaggtgctcgtctccctctgcaacagctccagcaatgacaaggctgatgggtggtacctcgacaccggtgccacccatcacatgaccggccgacgggagttcttcaccgagcttgaccccagcgtccgaggctccatcaagtttggggacgcctccggcgtggagatcaagggcgttggctccgtcaccttcatcgccaagtccggtaagcacaggctgctcaccggagtctactacatccccgcgttaaggaactctatcatcagcgtggggcagctggatgagaacggctcacacgtgttggtcaagcacggagtcatgaggatttgggatcgccgccgtcgccttcttgccaagcgcgcaggtcgcacaaccagtttgctcgccgctcgtcgggacgacgaggcgtggcagtggcacgagcgtttcgggcacctccactttgaggccctgaagcagctcagcgccaaggagatggtgcgaggcctgccatgccttgaccacgtggagcagctctgcgacgtttgcgtggtgacgaagcagaggcggctccccttgccccagcagacgagcttccgagccaaggagcggctcgagctcgtgcacggggacttgtgtggcctagtgacaccggccacaccaggaggacgacgttacttcctactgctcgtcgacgacctctcccgctacatgtgggtgatggtcctcggcagcaagggagaagctgcggacgccatcaggcgcgcggggatgccggccatcttctggggagaggcggtggtaacggccgtctacatcctcaaccgctcgcccacgaaggccctagacggcaggacaccgtatgaggcctggcatgggcgcaagccggcggtctcccacctgcgggtcttcggctgcctcgcgttcgccaaggagcttggccacatcggcaagctcgacgataggagcaccccaggggtgttcatcggctacgcggagggctcgaagacctaccgcattctcgacccggagacacagcgtgtgcgcacggcgcgcgacgtagtgttcgacgaagggcgagggtgggtatgggacaaggcggtggacgatggttcgactctgacgtacgacttcactgtcgagtacgtccacttcgagggagctgggggagtaggcagctcttcctcaccgagcgtgcctaccccagtccccgagcctccaccaactccggcagcgacacattctcgagcttcgacttcggctgcgacgacttcttcgccagcaccaccacagccggcgaccccacgcactccagcaccaacagccactcccctgggcatgtctactccgacgccagctcgtgttgagcgcagcccggtggagttagctactccgctctccacgacggggagcgcatcgacgcgtaccacgacggcgagcagctccggtaccgtacgatggaggaccttctcggcgaccagccggtgccgagactggtgccccgcgacctggaggcgcagttgcaccttgcgtgcgacgacgtcggagatggacgcggttcaggagaactgcacctgggagcttgctaacctccctcgtggtcaccgcgcgatcacccttaaatgggtgttcaagctgaagagggatgaagccggagccatcgtcaagcacaaggctcgcttggtggcacgcggtttcgtgcaacaggaggggatcgactacgacgatgccttcgctcccgtcgcacggatggagtccgtgcgactccttgcgctggctgctcaggaaggctggggcgtccatcacatggacgtcaaatcggcgtttctgaacggcgacttgaaggaggtctacgtacaccagccaccgggatttgtgatccccggcaaggagggcaatgtgctacgcttgcacaaggccctctacggcttgcggcaggcaccgagggcgtggaatgccaagttggattccacgctcaaggggatgggcttcgagcaaagcccgcacgaggcggccatctaccagcggggtaatggaggaaatgccttgctggtgggtgtctacgtcgacgacttgatcaccggcaccaagaatgcggaggtgtaccaggatgactccgggatcacgcttcgacagaccgcatacgccaagcgcgtcgttgagctggctgggctcaccgattgcaacccagctctcactccgatggagagactgaagctgagccgcgatagcacgacggaggaagtggatgctacacagtaccggcgtcttgtggggagccttcgctacctcacccacacacggccggacttggccttctccgtcggctacgtcagtcggttcatgcagcgaccgacaacggagcaccagcaggctgtgaagaggatcatctgctacgttgcggggactctcgaccacggtctctactacccaaggtgtcctggcaaggcacacttcgtcgggtacagcgaccacgccggcgacatcgacaccagcaagagcacgagcgggattctcttcttccttggcgagtgccttgttagctggcagtcagtcaagcagcaggtggtggccctgtctagttgcgaggccgagtacatggcggcctccgccgcttcgacctag

SEQ ID NO: 15249 - DNA, 4806 bp, Oryza sativa
  Clone ID: TFbOSC422301j.C1.o5.fg
atgtccgacgctcggtctcagcgttcggtcgcctcgagcactcggcgtcagcaggacgccgagctcgccgcagcaaaagagcgcaggcgagcaacggctcagaccgctgcagcagcagcgagggcggccagactggcggcagcggagttggcagcagccagggcggaggcggaggcggaggcggcggaagatgcggcacgtgcggcggaggtagaggttgagaccttgcgcagcagcatcaacggctccatcgccggcgacatcaccgctgacagggagcttgaggagctggcaagaggaagggcacgggagcgagcagagcggtgggcagcagcccacctccacggcggcggcggcggcccaagggaccgcgcgcccgccgacgggaacccagacgggcgcgggcgtgccggcggcagcccggagcccgcacgcggccctcgcaggcggcacggctccctctcccctgaccggcgccatggtcaccacggcgtccagacggtggtcagggattttggtcccggcggtgggtggcctaccctcaccaaaaccaactacatcgagtgggccgcggtgatgagggtgaggctccaggtgcggcacatgtgggaggcagtccggtacggtgacgtcgactacgacgaggatcggcgggcactggatgccctcatcgctgcagttccgcccgagatgcagttctcgctttcccagaaacggactgccaaggaggcctgggacgccatcgctgcggcacgcatcggcagcgaccgcgcccgcaagtccacactgcaggcactccgcaaggagtgggagaacctggccttcaagccaggtgaggatgttgatgactttgctctccgtctcaacactctcttgcaaaaaatggtgcagtacggcgacgacacctacgacgaggagagagctgtcgagaagctcttccgctgcgtccctgagaagtacaggcagatcgctcgctcgattgaatctctgctggacctctccacgatgtcgatcgaggaggcgttaggtcgcctcaaggtcgtcgatggtgatgagccacggcctctctcggggcccatcaccatcggcgggaagctccatctcactcgggagcagtgggaggcctctcagggtgacgggaggaagggggagtcatcttccccgacaggcggccgtaagccgcgcaaggcgcggggaggtgtccagctacggtgggcgcgaagacgtgccgagggtggcgcccgcagaggcgcccagggcgttgccaccggcaaccacaagccggcacgagacgacacctgccgcaactgtggcaagcttggccattgggccaaagactgtcgacagccacgacgcggccaggcccacgtcgcacgggtggaggaggaagagtcggctctgctcctagctcacgcaagcatcgagctacctccagcggcaccggccgcagcggctttcctccaccttgatgagccgaaggtactcgtctccctctgcgacggctccagcaacgacaaggctgatgggtggtacctcgacaccggcgccacccatcacatgaccggccgacgggagttcttcaccgagttcgactccagcgtccgaggcaccgtcaagttcggggacgcctccggcgtggagatcaagggtgttggctccgtcaccttcaccgccaagtccggtgagcacaggctgctcaccggagtctactacatccccgcgttgaggaattctatcatcagcgtgggacagctggatgagaacggctcacgcgtgttggtcgaggacggactcatgaggatttgggatcgccgtcgtcgccttcttgccaaggtaaccagaggcactaatcgactctacatcctcagcgcgcaagtcgcacatccagtttgcctcgccgctcgtcgggacgacgaggcgtggcagtggcacgagcgcttcgggcacctccactttgaggccctgaagcagctcagtgccaaggagatggtgcgaggcatgccgtgccttgaccacgtggagcagctctgcgacgtctgcgtggtgacaaagcagcggcggctcccctttccccagcagacgagcttccgagccaaggagcggctcgggctcgtgcacggggacttgtgtggcccagtgacaccggccacaccaggaggacgacgttatttcctgctgctcgtcgacgacctctcccgctacatgtgggtgatggtcctcggcagcaagggagaggctgcggacgccatcaggcatgcgcaggctgcagcagaggcggagtgcggccgcaagctgcgcgtgctgcgcaccgacaacggcggcgaattcacggcggctgaattcgcgtcgtactgcgctgatgagggcattcagcgccactacaccgcgccgtacagcccacagcagaacggcgtcgtcgagcggcgcaaccagacggttgtggggatggctcgggccctcctcaagcagagggggatgccggccatcttctggggggaggcggtggtgacggccgcctacatcctcaaccgctcgcctaccaaggccctcgatggcaggacaccgtacgaggcttggcatgggcgcaagccggcggtctcccacctgcgggtcttcggctgcctcgcgttcgccaaggagcttggccacatcggcaagctcgacgacaggagcaccccaggggtgttcatcggctacgcggagggctcgaaggcctaccgcatcctcgacccggagacacagcgtgtgcgcattacgcgcgatgttgtgttcgacgaagggcgagggtgggtatgggacaaggcggtggatgatggttcgactccgacgtacgacgacttcaccatcgagtacgtccacttcgagggagctgggggagtaggcagctcttcttcaccgagcgtgtctaccccagtccccgagcctccaccgactccaacaccaacacaccctcgggccacgacttcgactacgacgagctcgtcgtcgacaccaccccagccggtgtccccacacgctccagcaccaacagccactcctccgggcacgtctactccgacgccagctcgtgttgagcgcagcccggtggagttcgttactccgctctcccacgacggggagcgcatcgacgcgtaccatgacggcgagcagctacggtaccgtacgatggaggatcttctcggcgaccagccggtgccgggactggtgcctcgcaacctggaggcgcagttgcaccttgcgtgcgacgacggtgagcctcggtcttttgcagaggccgagaaacacgcggcatggcgtgccgcgatgcagtcggagatggacgcggttcaggagaaccgcacctgggagcttgctgacctccctcgtggtcaccgcgcgatcacccttaagtgggtgttcaagctgaagagggatgaagccggagccatcgtcaagcacaaggctcgcttggtggcacgcggtttcgtgcagcaggaggggatcgactacgacgatgccttcgctcccgtggcacggatggagtccgtgcgactccttcttgcgctggctgctcaggaaggctggggcgtccatcacatggacgtcaagtcggcgtttctaaacggcgacttgaaggaggaggtctacgtgcaccagccgccgggatttgtgatccccggcaaggagggcaaggtgctacgcctgcacaaggccctctacggcttgcggcaggcaccgagggcgtggaatgccaagttggattccacgctcaaggggatgggcttcgagcaaagcccgcacgaggcggccatctaccggcggggcaatggaggaaatgccttgctggtgggtgtctacgtcgacgacttagtgatcaccggcaccaaggatgcagaggtcgcggcgttcaaggaggagatgaaggccaccttccagatgagtgatctggggcctctctccttctacctggggatcgaagtgcaccaggacaactccgggatcacgcttcgacagaccgcctacgccaagcgcgtcgttgagctggctgggctcaccgattgcaacccagctctcactccgatggaggagagactgaagctgagccgcgacagcacagcggaggaggtggatgctacacagtaccgacgtcttgtggggagccttcgctacctcacccacacacggccggacttggccttctccgtcggctacgtcagtcggttcatgcagcgaccgacgacggagcaccagcaggctgtgaagaggatcatccgctacgttgcggggactctcgaccacggtctctactacccgaggtgtcctggcaaggcacacttcgtcgggtacagcgacagcgaccacgccggcgacatcgacaccagcaagagcacgagcgggattctcttcttcctcggcgagtgcctcgttagctggcagtcaatcaagcagcaggtggtggccctgtccagctgcgaggccgagtacatggcggcatccgccgcttcgacccaggcgctctggcttgctcgactgcttagtgatctcctcggcagagatactggagcggtggagctcagggtggatagcaagtccgctctggccctggcaaaaaaccccgtttttcacgaacggagcaagcacatccgagtgaggtaccatttcatccgaagctacttggaggaagggagcatcaaggcgagctacatcaacaccaaggaccagcttgcggatttgctcaccaaaccccttgggaggatcaagttccttgagctttgctcccggatcgggatggctcaactctcccacaagacggcgcacaagacttag

SEQ ID NO: 15250 - DNA, 4230 bp, Oryza sativa
  Clone ID: TFbOSC900345j.C1.o5.fg
atgagggtgaggctccaggtgcggcacatgtgggaggcagtccggtacggtgacgtcgactacgacgaggatcggcgggcactggatgccctcatcgctgcagttccgcccgagatgcagttctcgctttcccagaagcggactgccaaggaggcctgggacgccatcgctgcggcacgcatcggcagcgaccgcgcccgcaagtccacactgcaggcactccgcaaggagtgggagaacctggccttcaagccaggtgaggatgttgatgactttgctctccgtctcaacactctcttgcaaaaaatggtgcagtacggcgacgacacctacgacgaggagagagctgtcgagaagctcttccgctgcgtccctgagaagtacaggcagatcgctcgctcgattgaatctctgctggacctctccacgatgtcgatcgaggaggcgttaggtcgcctcaaggtcgtcgatggtgatgagccacggcctctctcggggcccatcaccatcggcgggaagctccatctcactcgggagcagtgggaggcctctcagggtgacgggaggaagggggagtcatcttccccgacaggcggccgtaagccgcgcaaggcgcggggaggtgtccagctacggtgggcgcgaagacgtgccgagggtggcgcccgcagaggcgcccagggcgttgccaccggcaaccacaagccggcacgagacgacacctgccgcaactgtggcaagcttggccattgggccaaagactgtcgacagccacgacgcggccaggcccacgtcgcacgggtggaggaggaagagccggctctgctcctagctcacgcaagcatcgagctacctccagcggcaccggccgcagcggctttcctccaccttgatgagccgaaggtactcgtctccctctgcgacggctccagcaacgacaaggctgatgggtggtacctcgacaccggcgccacccatcacatgaccggccgacgggagttcttcaccgagttcgactccagcgtccgaggcaccgtcaagttcggggacgcctccggcgtggagatcaagggtgttggctccgtcaccttcaccgccaagtccggtgagcacaggctgctcaccggagtctactacatccccgcgttgaggaattctatcatcagcgtgggacagctggatgagaacggctcacgcgtgttggtcgaggacggactcatgaggatttgggatcgccgttgtcgccttcttgccaaggtaaccagaggcactaatcgactctacatcctcagcgcgcaagtcgcacatccagtttgcctcgccgctcgtcgggacgacgaggcgtggcagtggcacgagcgcttcgggcacctccacttcgaggccctgaagcagctcagtgccaaggagatggtgcgaggcatgccgtgccttgaccacgtggagcagctctgcgacgtctgcgtggtgacaaagcagcggcggctcccctttccccagcagacgagcttccgagccaaggagcggctcgggctcgtgcacggggacttgtgtggcccagtgacaccggccacaccaggaggacgacgttatttcctgctgctcgtcgacgacctctcccgctacatgtgggtgatggtcctcggcagcaagggagaggctgcggacgccatcaggcatgcgcaggctgcagcagaggcggagtgcggccgcaagctgcgcgtgctgcgcaccgacaacggcggcgaattcacggcggctgaattcgcgtcgtactgcgctgatgagggcattcagcgccactacaccgcgccgtacagcccacagcagaacggcgtcgtcgagcggcgcaaccagacggttgtggagatggctcgggccctcctcaagcagagggggatgccggccatcttctggggggaggcggtggtgacggccgcctacatcctcaaccgctcgcctaccaaggccctcgatggcaggacaccgtacgaggcttggcatgggcgcaagccggcggtctcccacctgcgggtcttcggctgcctcgcgttcaccaaggagcttggccacatcggcaagctcgacgacaggagcaccccaggggtgttcatcggctacgcggagggctcgaaggcctaccgcatcctcgacccggagacacagcgtgtgcgcattacgcgcgatgttgtgttcgacgaagggcgagggtgggtatgggacaaggcggtggatgatggttcgactccgacgtacgacgacttcaccatcgagtacgtccacttcgagggagctgggggagtaggcagctcttcttcaccgagcgtgtctaccccagtccccgagcctccaccgactccaacaccaacacaccctcgggccacgacttcgactacgacgagctcttcgtcgacaccaccccagccggtgtccccacacgctccagcaccaacagccactcctccgggcacgtctactccgacgccagctcgtgttgagcgcagcccggtggagttcgttactccgctctcccacgacggggagcgcatcgacgcgtaccatgacggcgagcagctacggtaccgtacgatggaggatcttctcggcgaccagccggtgccgggactggtgcctcgcaacctggaggcgcagttgcaccttgcgtgcgacgacggtgagcctcggtcttttgcagaggccgagaaacacgcggcatggcgtgccgcgatgcagtcggagatggacgcggttcaggagaaccgcacctgggagcttgctgacctccctcgtggtcaccgcgcgatcacccttaagtgggtgttcaagctgaagagggatgaagccggagccatcgtcaagcacaaggctcgcttggtggcacgcggtttcgtgcagcaggaggggatcgactacgacgatgccttcgctcccgtggcacggatggagtccgtgcgactccttcttgcgctggctgctcaggaaggctggggcgtccatcacatggacgtcaagtcggcgtttctaaacggcgacttgaaggaggaggtctacgtgcaccagccgccgggatttgtgatccccggcaaggagggcaaggtgctacgcctgcacaaggccctctacggcttgcggcaggcaccgaggacgtggaatgccaagttggattccacgctcaaggggatgggcttcgagcaaagcccgcacgaggcggccatctaccggcggggcaatggaggaaatgccttgctggtgggtgtctacgtcgacgacttagtgatcaccggcaccaaggatgcagaggtcgcggcgttcaaggaggagatgaaggccaccttccagatgagtgatctggggcctctctccttctacctggggatcgaagtgcaccaggacaactccgggatcacgcttcgacagaccgcctacgccaagcgcgtcgttgagctggctgggctcaccgattgcaacccagctctcactccgatggaggagagactgaagctgagccgcgacagcacagcggaggaggtggatgctacacagtaccgacgtcttgtggggagccttcgctacctcacccacacacggccggacttggccttctccgtcggctacgtcagtcggttcatgcagcgaccgacgacggagcaccagcaggctgtgaagaggatcatccgctacgttgcggggactctcgaccacggtctctactacccgaggtgtcctggcaaggcacacttcgtcgggtacagcgacagcgaccacgccggcgacatcgacaccagcaagagcacgagcgggattctcttcttcctcggcgagtgcctcgttagctggcagtcaatcaagcagcaggtggtggccctgtccagctgcgaggccgagtacatggcggcatccgccgcttcgacccaggcgctctggcttgctcgactgcttagtgatctcctcggcagagatactggagcggtggagctcagggtggatagcaagtccgctctggccctggcaaaaaaccccgtttttcacgaacggagcaagcacatccgagtgaggtaccatttcatcagaagctacttggaggaagggagcatcaaggcgagctacatcaacaccaaggaccagcttgcggatttgctcaccaaaccccttgggaggatcaagttccttgagctttgctcccggatcgggatggctcaactctcccacaagacggcgcacaagacttag

SEQ ID NO: 15251 - DNA, 7002 bp, Oryza sativa
  Clone ID: TFbOSC900415j.C1.o7.gm
atgggcaacggagttttcaagaaaactgaagttcttgctgctgttaaacataagaaatctggaatatctggatctacgaattcttacaatgctgtagtgcgtgagaatgcacaacttcgccatgaagtgactgaacagcgtggaatgatacgtgaacagcgtggaatgatacaagaacatcgtggaatgctaaaggcagtatatgagaagcttggaatggacatacctgaggaggtactttcaaggtgggagtcacaaagagaggattctgaattagatgtggactgttctgaggggtctgaagagtatgaaatagaggaagaagatgaggggcagtcaccaaaattccgttctcttgtagtggatgggccgccgccctccggccgacacaacctcgccaccctcgtcggcggcgccggcgccggcgccgcctccgccgggaaggaatgcaacagcaatgcagcatcacggggacagtaccagaatttccatgaaattccaccggatgatgctgattttaataaccttacaatttacttgaagtcagcatcaccgcctgcagctgaactaccatctctgactgatcatgtcaacgaggaggtggccaagctggacagaactgtgcgccgaatcaccgcggtgttggttgatgcagatgaaagggaaatcgctgacgagactatgaagctttggatctctgagctcaagcaagtgacatgggaagctgaggggatacttgaagattacagctatgagttgctccgcagcaccaccgtccaggaagagaaggaaggattgtgtaggaaagaatctaggattagtaggtgcaccagttctttgcttgatccattggaggtctacggccgggaggatgagaaaaaattaataatatcttctttgcttgatgggtgccttacatttaagaagagaagattgaaggaacatgaatatgaaacttgtaaagctggtgctgtaaggcttatttctatagttgccatgggtggaatggggaagacaacactagctaggctcgtctataatgacgcaagggttcaaaatcactttgatatacaagcatgggtttgggtttcagaagtattcgatgaagtcagactaaccaaagcagcaatcgagtcggtcaccgctaaaccctgtgatctgactgagctagagccactccagaggcaattgcacgaggaggtcaaggggagccacatgatcatcactactcgcaacgagaatgtctccacaattgtgcaggcgaagaagttggctggttcacgggagaagtttgtcatagtgcacgacctcattcatgaccttgctaaatcaattgggggtaaagagatccttgtcaaaaagtgttgtggttcatctgttggtggttgcaatactagtgccaataatcatcttcgatatttagctgttcttgttggaacaacgcccttctactcagacaataaattggtgcttgttcagagccagtggtggtataaccttgaaggttgtctgctgcattcaccacacctgaagtatctacgaatcctggatgtatcatcaagtgatcagatcaagctggtggccaattcagggagcggagctgccacgctggatgaaatcaaggacattaacactcttcaagggcagctctgcatcatggatctccagaacatcacacatgacagaatttgggaaccaaggagtgcaaacctgagcaagaaaaaattaactcgcttagaactagtgtggaatcctctgccttcctacaaaagcgtaccccatgatgaggttgtactggaatccctgcagcctcacaactacatccgacaactcgtaataagtggttttagaggattgaacttctgttcatggctaggagaccggtccttgtttagtttacaagaactggagctgtgcaagtgctactacactgatcatctaccaccacttggacaattgccaaacctgaagcagctcaagctgacgagcctgtggaaattgagaagcatagggcctgagttctacggcgattgcgaggccccatttcagtgtcttgagacattggtggtacagaacctggttgcatgggaggaatggtggctacctgaaaaccatccacattgtgtcttccctctccttcgtacgatcgacatcaggggctcacacaagcttgtgcgccttccactgtcaaatctccatgcccttgcagggatcaccgtatcatcgtgcagcaagttagagaccatagttgggctcaaggagcgctgtgaagtgactgctgggaacggtggattgcaagcaggtcagactaacgtgcttccctcccttcgaagggtaaagatcactgcttgcccttcactggaggagcctctgatatcgatgcttcgccggcagacggagatcggcttctcctactgggaacaaagccccagcacctctcccaccgacatcgctgattttggcaagactccatggaaagattctggcaaggacgccgagctcgccgcagcagaagagcgcaggcgagcaacggctcagaccgctgcagcagcagcgagggcggccagactggcggcagcagagttggcagcagccagggcggaggcagaagcagaggcggcggaagatgcggcacgtgcggcggaggtagaggttgagaccttgcgcagcagcatcaacggctccatcgccggcgacatcaccgctgacagggagcttgaggagctggcaagaggaagggcacgggagcgagcagagcggtgggcagcagcccacctccacggcggcggcggcggcccaagggaccgcgcgcccgccgacgggaacccagacgggcgcgggcgtgccggcggcagcccggagcccgcacgcggccctcgcaggcggcacggctccctctcccctgaccggcgccatggtcaccacggcgtccagacggtggtcagggattttggtcccggcggtgggtggcctaccctcaccaaaaccaactacatcgagtgggccgcggtgatgagggtgaggctccaggtgcggcacatgtgggaggcagtccggtacggtgacgtcgactacgacgaggatcggcgggcactggatgccctcatcgctgcagttccgcccgagatgcagttctcgctttcccagaaacggactgccaaggaggcctgggacgccatcgctgcggcacgcatcggcagcgaccgcgcccgcaagtccacactgcaggcactccgcaaggagtgggagaacctggccttcaagccaggtgaggatgttgatgactttgctctccgtctcaacactctcttgcaaaaaatggtgcagtacggcgacgacacctacgacgaggagagagctgtcgagaagctcttccgctgcgtccctgagaagtacaggcagatcgctcgctcgattgaatctctgctggacctctccacgatgtcgatcgaggaggcgttaggtcgcctcaaggtcgtcgatggtgatgagccacggcctctctcggggcccatcaccatcggcgggaagctccatctcactcgggagcagtgggaggcctctcagggtgacgggaggaagggggagtcatcttccccgacaggcggccgtaagccgcgcaaggcgcggggaggtgtccagctacggtgggcgcgaagacgtgccgagggtggcgcccgcagaggcgcccagggcgttgccaccggcaaccacaagccggcacgagacgacacctgccgcaactgtggcaagcttggccattgggccaaagactgtcgacagccacgacgcggccaggcccacgtcgcacgggtggaggaggaagagccggctctgctcctagctcacgcaagcatcgagctacctccagcggcaccggccgcagcggctttcctccaccttgatgagccgaaggtactcgtctccctctgcgacggctccagcaacgacaaggctgatgggtggtacctcgacaccggcgccacccatcacatgaccggccgacgggagttcttcaccgagttcgactccagcgtccgaggcaccgtcaagttcggggacgcctccggcgtggagatcaagggtgttggctccgtcaccttcaccgccaagtccggtgagcacaggctgctcaccggagtctactacatccccgcgttgaggaattctatcatcagcgtgggacagctggatgagaacggctcacgcgtgttggtcgaggacggactcatgaggatttgggatcgccgtcgtcgccttcttgccaagtggcacgagcgcttcgggcacctccactttgaggccctgaagcagctcagtgccaaggagatggtgcgaggcatgccgtgccttgaccacgtggagcagctctgcgacgtctgcgtggtgacaaagcagcggcggctcccctttccccagcagacgagcttccgagccaaggagcggctcgggctcgtgcacggggacttgtgtggcccagtgacaccggccacaccaggaggacgacgttatttcctgctgctcgtcgacgacctctcccgctacatgtgggtgatggtcctcggcagcaagggagaggctgcggacgccatcaggcatgcgcaggctgcagcagaggcggagtgcggccgcaagctgcgcgtgctgcgcaccgacaacggcggcgaattcacggcggctgaattcgcgtcgtactgcgctgatgagggcattcagcgccactacaccgcgccgtacagcccacagcagaacggcgtcgtcgagcggcgcaaccagacggttgtggggatggctcgggccctcctcaagcagagggggatgccggccatcttctggggggaggcggtggtgacggccgcctacatcctcaaccgctcgcctaccaaggccctcgatggcaggacaccgtacgaggcttggcatgggcgcaagccggcggtctcccacctgcgggtcttcggctgcctcgcgttcgccaaggagcttggccacatcggcaagctcgacgacaggagcaccccaggggtgttcatcggctacgcggagggctcgaaggcctaccgcatcctcgacccggagacacagcgtgtgcgcattacgcgcgatgttgtgttcgacgaagggcgagggtgggtatgggacaaggcggtggatgatggttcgactccgacgtacgacgacttcaccatcgatccccgagcctccaccgactccaacaccaacacaccctcgggccacgacttcgactacgacgagctcgtcgtcgacaccaccccagccgtggagttcgttactccgctctcccacgacggggagcgcatcgacgcgtaccatgacggcgagcagctacggtaccgtacgatggaggatcttctcggcgaccagccggtgccgggactggtgcctcgcaacctggaggcgcagttgcaccttgcgtgcgacgacggtgagcctcggtcttttgcagaggccgagaaacacgcggcatggcgtgccgcgatgcagtcggagatggacgcggttcaggagaaccgcacctgggagcttgctgacctccctcgtggtcaccgcgcgatcacccttaagtgggtgttcaagctgaagagggatgaagccggagccatcgtcaagcacaaggctcgcttggtggcacgcggtttcgtgcagcaggaggggatcgactacgacaatgccttcgctcccgtggcacggatggagtccgtgcgactccttcttgcgctggctgctcaggaaggctggggcgtccatcacatggacgtcaagtcggcgtttctaaacggcgacttgaaggaggaggtctacgtgcaccagccgccgggatttgtgatccccggcaaggagggcaaggtgctacgcctgcacaaggccctctacggcttgcggcaggcaccgagggcgtggaatgccaagttggattccacgctcaaggggatgggcttcgagcaaagcccgcacgaggcggccatctaccggcggggcaatggaggaaatgccttgctggtgggtgtctacgtcgacgacttagtgatcaccggcaccaaggatgcagaggtcgcggcgttcaaggaggagatgaaggccaccttccagatgagtgatctggggcctctctccttctacctggggatcgaagtgcaccaggacaactccgggatcacgcttcgacagaccgcctacgccaagcgcgtcgttgagctggctgggctcaccgattgcaacccagctctcactccgatggaggagagactgaagctgagccgcgacagcacagcggaggaggtggatgctacacagtaccgacgtcttgtggggagccttcgctacctcacccacacacggccggacttggccttctccgtcggctacgtcagtcggttcatgcagcgaccgacgacggagcaccagcaggctgtgaagaggatcatccgctacgttgcggggactctcgaccacggtctctactacccgaggtgtcctggcaaggcacacttcgtcgggtacagcgacagcgaccacgccggcgacatcgacaccagcaagagcacgagcgggattctcttcttcctcggcgagtgcctcgttagctggcagtcaatcaagcagcaggtggtggccctgtccagctgcgaggccgagtacatggcggcatccgccgcttcgacccaggcgctctggcttgctcgactgcttagtgatctcctcggcagagatactggagcggtggagctcagggtggatagcaagtccgctctggccctggcaaaaaaccccgtttttcacgaacggagcaagcacatccgagtgaggtaccatttcatccgaagctacttggaggaagggagcatcaaggcgagctacatcaacaccaaggaccagcttgcggatttgctcaccaaaccccttgggaggatcaagttccttgagctttgctcccggatcgggatggctcaactctcccacaagacggcgcacaagacttag

SEQ ID NO: 15252 - DNA, 4326 bp, Oryza sativa
  Clone ID: TFbOSC900422j.C1.o3.fg
atggcggacagactggcggcggtggggggggaaggtcgtcccggcggtgggtggcctaccctcaccaaaaccaactacatcgagtgggccgcggtgatgagggtgaggctccaggtgcggcacatgtgggaggcagtccggtacggtgacgtcgactacgacgaggatcggcgggcactggatgccctcatcgctgcagttccgcccgagatgcagttctcgctttcccagaagcggactgccaaggaggcctgggacgccatcgctgcggcacgcatcggcagcgaccgcgcccgcaagtccacactgcaggcactccgcaaggagtgggagaacctggccttcaagccaggtgaggatgttgatgactttgctctccgtctcaacactctcttgcaaaaaatggtgcagtacggcgacgacacctacgacgaggagagagctgtcgagaagctcttccgctgcgtccctgagaagtacaggcagatcgctcgctcgattgaatctctgctggacctctccacgatgtcgatcgaggaggcgttaggtcgcctcaaggtcgtcgatggtgatgagccacggcctctctcggggcccatcaccatcggcgggaagctccatctcactcgggagcagtgggaggcctctcagggtgacgggaggaagggggagtcatcttccccgacaggcggccgtaagccgcgcaaggcgcggggaggtgtccagctacggtgggcgcgaagacgtgccgagggtggcgcccgcagaggcgcccagggcgttgccaccggcaaccacaagccggcacgagacgacacctgccgcaactgtggcaagcttggccattgggccaaagactgtcgacagccacgacgcggccaggcccacgtcgcacgggtggaggaggaagagccggctctgctcctagctcacgcaagcatcgagctacctccagcggcaccggccgcagcggctttcctccaccttgatgagccgaaggtactcgtctccctctgcgacggctccagcaacgacaaggctgatgggtggtacctcgacaccggcgccacccatcacatgaccggccgacgggagttcttcaccgagttcgactccagcgtccgaggcaccgtcaagttcggggacgcctccggcgtggagatcaagggtgttggctccgtcaccttcaccgccaagtccggtgagcacaggctgctcaccggagtctactacatccccgcgttgaggaattctatcatcagcgtgggacagctggatgagaacggctcacgcgtgttggtcgaggacggactcatgaggatttgggatcgccgttgtcgccttcttgccaaggtaaccagaggcactaatcgactctacatcctcagcgcgcaagtcgcacatccagtttgcctcgccgctcgtcgggacgacgaggcgtggcagtggcacgagcgcttcgggcacctccacttcgaggccctgaagcagctcagtgccaaggagatggtgcgaggcatgccgtgccttgaccacgtggagcagctctgcgacgtctgcgtggtgacaaagcagcggcggctcccctttccccagcagacgagcttccgagccaaggagcggctcgggctcgtgcacggggacttgtgtggcccagtgacaccggccacaccaggaggacgacgttatttcctgctgctcgtcgacgacctctcccgctacatgtgggtgatggtcctcggcagcaagggagaggctgcggacgccatcaggcatgcgcaggctgcagcagaggcggagtgcggccgcaagctgcgcgtgctgcgcaccgacaacggcggcgaattcacggcggctgaattcgcgtcgtactgcgctgatgagggcattcagcgccactacaccgcgccgtacagcccacagcagaacggcgtcgtcgagcggcgcaaccagacggttgtggagatggctcgggccctcctcaagcagagggggatgccggccatcttctggggggaggcggtggtgacggccgcctacatcctcaaccgctcgcctaccaaggccctcgatggcaggacaccgtacgaggcttggcatgggcgcaagccggcggtctcccacctgcgggtcttcggctgcctcgcgttcaccaaggagcttggccacatcggcaagctcgacgacaggagcaccccaggggtgttcatcggctacgcggagggctcgaaggcctaccgcatcctcgacccggagacacagcgtgtgcgcattacgcgcgatgttgtgttcgacgaagggcgagggtgggtatgggacaaggcggtggatgatggttcgactccgacgtacgacgacttcaccatcgagtacgtccacttcgagggagctgggggagtaggcagctcttcttcaccgagcgtgtctaccccagtccccgagcctccaccgactccaacaccaacacaccctcgggccacgacttcgactacgacgagctcttcgtcgacaccaccccagccggtgtccccacacgctccagcaccaacagccactcctccgggcacgtctactccgacgccagctcgtgttgagcgcagcccggtggagttcgttactccgctctcccacgacggggagcgcatcgacgcgtaccatgacggcgagcagctacggtaccgtacgatggaggatcttctcggcgaccagccggtgccgggactggtgcctcgcaacctggaggcgcagttgcaccttgcgtgcgacgacggtgagcctcggtcttttgcagaggccgagaaacacgcggcatggcgtgccgcgatgcagtcggagatggacgcggttcaggagaaccgcacctgggagcttgctgacctccctcgtggtcaccgcgcgatcacccttaagtgggtgttcaagctgaagagggatgaagccggagccatcgtcaagcacaaggctcgcttggtggcacgcggtttcgtgcagcaggaggggatcgactacgacgatgccttcgctcccgtggcacggatggagtccgtgcgactccttcttgcgctggctgctcaggaaggctggggcgtccatcacatggacgtcaagtcggcgtttctaaacggcgacttgaaggaggaggtctacgtgcaccagccgccgggatttgtgatccccggcaaggagggcaaggtgctacgcctgcacaaggccctctacggcttgcggcaggcaccgaggacgtggaatgccaagttggattccacgctcaaggggatgggcttcgagcaaagcccgcacgaggcggccatctaccggcggggcaatggaggaaatgccttgctggtgggtgtctacgtcgacgacttagtgatcaccggcaccaaggatgcagaggtcgcggcgttcaaggaggagatgaaggccaccttccagatgagtgatctggggcctctctccttctacctggggatcgaagtgcaccaggacaactccgggatcacgcttcgacagaccgcctacgccaagcgcgtcgttgagctggctgggctcaccgattgcaacccagctctcactccgatggaggagagactgaagctgagccgcgacagcacagcggaggaggtggatgctacacagtaccgacgtcttgtggggagccttcgctacctcacccacacacggccggacttggccttctccgtcggctacgtcagtcggttcatgcagcgaccgacgacggagcaccagcaggctgtgaagaggatcatccgctacgttgcggggactctcgaccacggtctctactacccgaggtgtcctggcaaggcacacttcgtcgggtacagcgacagcgaccacgccggcgacatcgacaccagcaagagcacgagcgggattctcttcttcctcggcgagtgcctcgttagctggcagtcaatcaagcagcaggtggtggccctgtccagctgcgaggccgagtacatggcggcatccgccgcttcgacccaggcgctctggcttgctcgactgcttagtgatctcctcggcagagatactggagcggtggagctcagggtggatagcaagtccgctctggccctggcaaaaaaccccgtttttcacgaacggagcaagcacatccgagtgaggtaccatttcatcagaagctacttggaggaagggagcatcaaggcgagctacatcaacaccaaggaccagcttgcggatttgctcaccaaaccccttgggaggatcaagttccttgagctttgctcccggatcgggatggctcaactctcccacaagacggcgcacaagacttag

SEQ ID NO: 15253 - DNA, 1995 bp, Oryza sativa
  Clone ID: TFbOSC400177j.C1.o42.np
atggatgaagtcgttgcgacgatggatatctctgaggcaaatgaaggctacgcgagctgcggctcggtaatcgagatgtctaggcaaatgaagactacacgggtcggtgcccgggctcaaccctggcctgcctgtcccgggataccggccgtaggcagggttgggtcggtacttttgttcacggctaggatgggtgaagggttatgtcacatctttacgacgggttccaaggccatggaatgcggagtaaagatgtgtcttgtgggttggcctgggttggcttgggacgagctggaacccaggtcgggttgccagttcggtccgaatcatcgtaggccttgggttaaggcagtactagatggtcagctttgcgaagaagaagatgtcgtcagtcgtttgccgaagctccggaagactgcaggatccgctagcgaagcgaaggaagcagtgaagccagctgtgaagcaggacaaaagacttagatctgttaaggtcctatccttagtttctaatctgtctctcccctttgttttccctctctccctctccaaacctttgcaacagatggctgacaatgagaaaggcaataaggtcagaagtcaggacattggtacctcaagctcccgagtgaatgaagcaccagacaccagttgtgtgacactagtccaacacctgattaaccagaaccgattgcttatagagatactacagcagcaccagacgccaattctgaacttgagtcaaatacaacctcaagtacagttggaggcagtccaagcactcacaccacaagtcagcgcaccgccaacatcccagaaggcccctcatgccatgccacatgttgacccaaaagaagcaagtatcatctgttttatgtgtgatgagcaagggcactacgcaaggaactgtcctcagcagaaaagaaaagcaccaatgcgaaccgaagatgaagtccgtaagatgatcattaccagcacagaatggcctccaccaggaatgacaaaacatcagagaagaaattccttccgaggtgcacaacagttgacagagcatcttttagctaatggaggtagagtgtctgatagtgaagattcagatcaagtctcctcagatgatgaagatgcgaagtctccccaagattttaaccagaataaaatagaacttaaggcatgctctcgttgtggagaaatcggtcatgttgccagctcgtgtgcctttacatgcgttcgttgtgaggaagaccatccacccgataggtgccctatgagcaggatcacttgtttcttgtgtgaaggaactgatcatgtaccaaaagattgtcaactcagttttctgctgacgaagaagatggccgaccaacacgcccattctaatggagagaagcatcaaggaagcacaaatcctcgccaagattacagtttcagcctaactccagtgccaggacagaggaaacaaaatgagaaaagaaaatgccgagtccgggaagatatccgttgcttcaattgtcaaggaatgggtcatttcgccgacaagtgcccaaaaccgagaaacatagctgccggcacgtcagtccacgcaactccctgcaatcagcagcttgctcctcaacgaattgtcatccatgcatcccgaagcagtcctttagcccgcgttgcaacaactccaattccaatgagtgcactaccacaaggtgtcaatgctcaatttcagccccagccaccagctgacaagacagaggccagtatctgcgttgtacctttggaagttccaatacagcagctgagaaatcaagtacaagatgaagaacccgagtgtaagaaagttattgtttgttacaactgcagtgaagaagggcattactccaaaaactgtccccaaccaaggcaaaatcgacctccacattaccgccaatttacacgaagcagacattccaatcgtattgtggtcacgggagcaaacgccgtacccgtaaggcctcgtgttaatcagaaccca

SEQ ID NO: 15254 - DNA, 1961 bp, Oryza sativa
  Clone ID: TFbOSC407089j.C1.o1.np
atgaataaagtcgttgcgacgatgaatattctgaggcaaatgaaggctacgcgagctgcggctcggtaatcgagatgtctaggcaaatgaagactacacgggtcggtgcccgggctcaaccctggcctgcctgtcccgggataccggccgtaggcagggttgggtcggtacttttgttcacggctaggatgggtgaagggttatgtcacatctttacgacgggttccaaggccatggaatgcggagtaaagatgtgtcttgtgggttggcctgggttggcttgggacgagctggaacccaggtcgggttgccagttcggtccgaatcatcgtaggccttgggttaaggcagtactagttggtcagctttgtgaagaagatgtcgtcagttgtttgccgaagctccggaagactgcaggatccgctagtgaagtgaaggaagcagtgaagccagctgtgaaggacagcaaaagacttagatctgttaaggtcctatccttagtttctaatctgtctctcccctttgttttccctctctccctctccaaacctttgcaacagatggctgacaatgagaaaggcaataaggtcagaagtcaggacattggtacctcaagctcccgagtgaatgaagcaccagacaccagttgtgtgacactagtccaacacctgattaaccagaaccgattgcttatagagatactacagcagcaccagacgccaattctgaacttgagtcaaatacaacctcaagtacagttggaggcagtccaagcactcacaccacaagtcagcgcaccgccaacatcccagaaggcccctcatgccatgccacatgttgacccaaaagaagcaagtatcatctgttttatgtgtgatgagcaagggcactatgcaaggaactgtccccagcagaaaagaaaagcaccactgcgaaccgaagatgaagtccgtaagatgatcattaccagcacagaatggcctccaccaggaatgacaaaacatcagagaagaaattccttccgaggtgcacaatagttgacagagcatcttttagctaatggaggtagagtgtctgatagtgaagattcagatcaagtctcctcagatgatgaaaataaaatagaacttaaggcatgctctcgttgtggagaaatcggtcatgttgccagctcgtgtgcctttacatgcgttcgttgtgaggaagaccatccacccgataggtgccctatgagcaggatcacttgtttcttgtgtgaaggaactgatcatgtaccaaaagattgtcaactcagttttctgctgacgaagaagatggccgaccaacacgcccattctaatggagagaagcatcaaggaagcacaaatcctcgccaagattacagtttcagcctaactccagtgccaggacagaggaaacaaaatgagaaaagaaaatgccgagtccgggaagatatccgttgcttcaattgtcaaggaatgggtcatttcgccgacaagtgcccaaaaccgagaaacatagctgccggcacgtcagtccacgcaactccctgcaatcagcagcttgctcctcaacgaattgtcatccatgcatcccgaagcagtcctttagcccgcgttgcaacaactccaattccaatgagtgcactaccacaaggtgtcaatgctcaatttcacccccagccaccagctgacaagacagaggccagtatctgcgttgtacctttggaagttccaatacagcagctgagaaatcaagtacaagatgaagaacccgagtgtaagaaagttattgtttgttacaactgcagtgaagaagggcattactccaaaaactgtccccaaccaaggcaaaatcgacctccacattaccgccaatttacacgaagcagacattccaatcgtattgtggtcactggagcaaacgccgtacccgtaaggcctcgtgttaatcaggaccca

SEQ ID NO: 15255 - DNA, 1902 bp, Oryza sativa
  Clone ID: TFbOSC10729j.C1.o1.np
atgggggtcattggggagtccatgcctctggttgtagaggggggggattctgatccaggtatggtgcactgtggtgagttgtgttttgcaaggggtactgttacagttcctttccaaggtaccgtggtggcattgaggcgcatggagacatgttttggagctgtgtcttgtgggtacagtgttgtatatttgctgtgtagcttgttgagtatgtcatatgctcattcttgcaatattcattcatcagaggaggagtacttcagtgaagaaattccgggcgtgacaagttggtatcagagccatgttgaccttaggacaagccaaatgatgtcgccccatccgccggaaagattgatcgatgtggtaggattcgtcagggggctgagaatgatggcatttgaagtaggctacgacgttgcccctgagtatcgtcagattccccatgaccccaacgaggagcaatgtcgtgttcgcgtgacgttgactagtgatcgtgaagaccttccgtcaataaagtttgaagctgggggaaaaaagtatagtcatgcttgtcaggaggcagccttggtggccattggagagctacgtcatcgctttgatgaggagttagagtcatcagctttttagtatcatccacacaagccacatggtcaagactatggagttcacaactaccctgaagatgaagatagcaccactctgaagcatgcggtgtatatgcttagcgccatggatgcaataggcgtggagcgggagaaagcagctcatgataaggaaaactagaaccatggcaagatttacaagctggagagcaaggtgtaccgtctgcagaaggaactggccgagcttaagggagaagcacaaccgccagcacccaagcttcgcctcaccgcaaggaagagaacccgtcctccacgtcatatccagttggcttcgaagactcgtgtggtgggagatgctgtgcctgatcatgctgaacctgtcatccatatggtgaacacccgcactgaaagtgaagtggtcacaatgaagaagatcccacccttgcccaagttttggctcagcaaactcagtttgattaatctactagtgcagcaagcgcagaaccagcaggcaaataacaacaatcaaccaccacctccacagaacaagttggcagattttctacgtgtcagagcacctaccttctcaagcaccactaacccagtagaggcaggtgattggctgcatgctgttgaaaagaaagctgcgggaaagcctatcacttggcgggagtttactgctgctttcaagaagacacatataccatcaggtgttgtggcacttaagaagagagagttcagcgcactcaatcagggatcccgttctgtcatagagtacctccatgactttaatcgcctagctcgttatgccccagaggatgttcgcactgatagagaacgtcaggagaagtttttagagggactgaatgatgagttgtcttatgcattactggctatggaataacgggatttccagcagttggtggacaaggcgattcgccaagaaaacatgtacgataggatggaacagaagaagcttgctcgccctcaatgccagttctacaacaacaacactggtaatcgcagcaacaacaatcgtaatgtggtcactcgtccagtagcaactccaactcagaatcagcctgtcaggaaggaacagggaagcaagctaggggtgtgcttcaattgtggtgatccaggacattatgctaataagtgtccaaagcctcggcgtgtgaagactgctcctgtccagaacaactccaatgctccagcaccgaaggctcgtgttaatcacgttacagctgcagaagcccagatcgacctgcaggcatgcaagaatgaagttctcagtgacagt

SEQ ID NO: 15256 - DNA, 5850 bp, Oryza sativa
  Clone ID: TFbOSC417563j.C1.o1.fg
atggccaagaaccccaaggcggccaagaaccgccgccccacgacgcggagacctcgcgccgccgccgccgccgccaccgcctccgcctccgcggacatcgaggacctggcgccgccgtccgggtgcagggcagcagtggggctcaccacggccgccgcggcggtgcgcgcggagctgctgcggtggtacgacgccaaccggcgcgacctgccatggcggcgcgccgcggagccggcggggagcgggagcgggagcgggcgcggcgaggagaagagggcgtacgcggtgtgggtgtcggaggtgatgctgcagcagacgcgggtgcccgtggtggtcgactactactcccggtggatggcccgctggcccaccgtggacagcctcgccgctgccacgcaggaggaggtgaacgagatgtgggcggggctcgggtattaccggagggctcgatttcttctcgagggagcaaagcaaattgttgaaaaaggcgagttccctcgcacagcatcagcactccgtgaagttcgtggcattggggattacacagcaggagccattgcttccatagccttcaatgaggttgtccctgttgtggatggaaatgtccgagttatcagcaggctttacgctattcctgataacccaaaagaatcctcaactgtgaagagattctgcactcggcgtcagcaggacgccgagctcgccgcagcagaagagcgcaggcgagcaacggctcggaccggtgcagcagcagcgagggcggccagactggcggcagcggagttggcagcagccagggcggaggcggaggcggaggcggcggaagatgcggcacgtgcggcggaggtagaggttgagaccttgcgcagcagcatcaacggctccatcgccggcgacatcaccgccgacagggagcttgaggagctggcaagaggaagggcacgggagcgagcagagcggtgggtagcagcccacctccatggcggcggcggcggcccaagggaccgcgcgcccgccgacgggaacccaaacgggcgcgagcgtgctggcggtagcccggagcccgcacgcggccctcgcaggcagcacggctctctctcccctgaccggcgccatggtcaccacggcgtccagacggtggtcagggactttggtcccggcggtgggtggcctaccctcaccaaaaccaactacatcgagtgggccgcggtgatgagggtgaggctccaggtgcggcatgtgggaggcagtccgttctcgctttcccagaagcggactgccaaggaggcctgggacgccatcgctgcggcacgcatcggcagcgaccgcgcccgcaagtccacactgcaggcactccgcaaggagtgggagaacctggccttcaagccaggtgaggatgttgatgactttgctctccgtctcaacactctcttgcagaaaatggtgcagtacggtgacgacacctacgacgaggagagagctgtcgagaagctcttccgctgcgtccctgagaagtacaggcagatcgctcgctcgatcgaatctctgttggacctctccacgatgtcgatcgaggaggcgttaggtcgcctcaaggtcgtcgatggtgatgagccacagcctctctcggggcccatcaccatcggcgggaagctccatctcactcgggagcagtgggaggcctctcaaggtgacaggaggaagggggagtcatcttccccgacaggcggccgtaagccgcgcaaggcgcggggaggtgtccagctacgaggtgcccagggcgttgccaccggcaaccacaagccggcacgagacgacgcctgccgcaactgtggcaagcttggccattgggccaaagactgtcaacagccacgacgtggccaggcccacgtcgcacgggtggaggaagagccggctctgctcctggctcacgcaagcatcgagctacctccagcggcaccggccgcagcggctttcctccaccttgatgagccgaaggtactcgtctccctctgcaacggctccagcaacgacaaggctgatgggtggtacctcgacaccggcgccacccatcacatgaccggccgacgggagttcttcaccgagttcgactctagcgtccgaggctccgtcaagttcggggacgcctccggcgtggagatcaagggtgttggctccgtcaccttcaccgccaagtccggtgagcacaggctgctcactggagtctactacatccccgcattgaggaattctatcatcagcgtgggacagctggatgagaacggctcacgcgtgatggtcgaggacggactcatgaggatttgggatcgccgtcgtcgccttcttgccaaggtaaccagaggcactaatcgactctacatcctcagcgcgcaggtcgcacaaccagtttgcctcgccgctcgtcgggacgacgaggcgtggcagtggcacgagcgcttcgggcacctccacttcgaggccctgaagcagctcagtgccaaggagatggtgcgaggcatgccgtgccttgaccacgtggagcagctctgcgacgtctgcgtggtgacgaagcagcggcggctcccctttccccagcagacgagcttccgagccaaaaagcggctcgagctcgtgcacgaggacttgtgtggcccagtgacaccggccacaccaggaggacgacgttacttcctactgctcgtcgacgacctctcccgctacatgtgggtgatggtcctcggcagcaagggagaggctgcggacgccatcaggcatgcgcaggctgctgcagaggcagagtgcggccgcaagctgcgcgtgctgcgcaccgacaacggcggcgaattcacagcggctgaattcgcgtcgtactgcgctgatgagggcattcagcgccactacaccacgccgtacagcccgcagcagaacggcgtcgtcgagcggcgcaaccagacggttgtggggatggctcgggccctcctcaagcagagggggatgccggccatcttctggggggaggtggtggtgacggccgcctacatcctcaaccgctcgcctaccaaggccctcgatggcaggacaccgtacgaggcttggcatgggcgcaagccggcggtctcccacctgcgggtcttcggctgcctcgcgttcgctaaggagcttggccacatcggcaagctcgacgacaggagcaccccaggggtgttcatcggctatgcagagggctcgaaggcctaccgcatcctcgacccggagacacagcgtgtgcgcactgcgcgtgacgttgtgttcgatgaagggcgagggtgggtatgggacaaggcggtggacgatggttcgattccgacgtacgacgacttcaccgtcgagtacgtccacttcgagggagctgggggagtaggcagctcttcttcacctagcgtgtctaccctagcccctgaatctccaccgactccaacaccaacacaccctcgggccacgacttcgactacgacgagctcttcgtcgacaccaccccagccagtgactccacatgctccagtaccaacagccactcctccaagcacgtctactctgacgccagctcgtgttgagcgtagcccggtggagttcgctactccgctctcccacgacggggagcgcatcgacgcgtacaacgacggcgagcagctacggtaccgtacgatggaggatcttctcggcgaccagccggtgccgggactggtgcctcgcgacctagaggcgcagttgcaccttgcgtgcgacgacggtgagcctcggtcttttgcagaggccgagaaacacgcggcatggcgtgccgcgatgcagtcggagatggacgcggttcaggagaaccgcacctgggagcttgctgacctccctcgtggtcaccgcgcgatcacccttaagtgggtgttcaagctaaagagggatgaagccggagccatcatcaagcacaaggctcgcttggtggcacgcggtttcgtgcagcaggaggggatcgactacgacgatgccttcgctcccgtggcacggatggagtccgtgcgactccttcttgcgctggctgctcaggaaggctggggcgtccatcacatggacgtcaagtcggcgtttctaaacggcgacttgaaggaggaggtctacgtgcaccagccgccgggatttgtgatccccggcaaggagggcaaggtgctacgcctgcacaaggccctctacggcttgcagcaggcaccgagggcgtggaatgccaagttggattccacgctcaaggggatgggcttcgagcaaagcccgcacgaggcggccatctaccggcggggcaatggaggaaatgccttgctggtgggtgtctacgtcgacgacttagtgatcaccggcaccaaggatgcggaggtcgcggcgttcaaggaggagatgaaggccaccttccagatgagtgatcaggggcctctctccttctacctggggatcgaagtgcacaaggacaactccgggatcacgcttcgacagaccgcctacgccaagcgcgtcgttgagctggctgggctcaccgattgcaacccagctctcactccgatggaggagagactgaagctgagccgcgacagcacggcggaggaggtggatgctacacagtaccgacgtcttgtggggagccttcgctacctcacccacacacggccggacttggccttctccgtcggctacgtcagtcggttcatgcagcgaccgacgacggagcaccagcaggctgtgaagaggatcatccgctacgttgcggggactctcgaccacggtctctactacccaaggtgtcctggcaaggcacacttcgtcgggtacagcgacagcgaccacgccggcgacatcgacaccagcaagagcacgagcgggattctcttcttcctcggcaagtgcctcgttagctggcagtcggtcaagcagcaggtggtggccctgtccagctgcgaggccgagtacatggcggcctccgccgcttcgacccaggcgctctggcttgctcgactgcttagtgatctcctcggcagagacactggaacggtggagctcagggtggatagcaagtctgctctagccctggcaaaaaaccccgttttcacgaacggagcaagcacatccgggcagctcactggtgaactggtcgacccttctaggccaggagacttcaaccaagcaattatggaactaggagcaacactctgcagaaagacgaagcccggttgctcccagtgccctgtctccaaccactgccaagcactcacactttccaaccaaagtgcttccgtaaaagttacagactacccacgagtggttccaaaagccaagccacggtctgattttgctgctgtttgtgttgttcaaatcaatgataatctctttctattgatcaagaggccagaagagggcctgctcgctgggctctgggagttcccatctgttcttgtgagcgaagagaagactgatgtgctgaataggagaaaagagatggacaaatatttgaagcaggtccttagcatagatgttaaaaggagatccagtgtgatcctcagggaagatgttggccaacatgttcacattttctctcacattcgcctgacgatgtttgttgagctgatgattttgaacctcaaagatgatggggataaattatgcatggagggacaagataacagcaaactgagattcattgacgaaaatgcagtcgactcaataggattgatatcagggatccggaaggtgtacaacatggtcaaggccttcaaggagaagaggccgaaagagcagagccaagtaccatcgaggaaaaggagtagacggctgaagtag

SEQ ID NO: 15257 - DNA, 1411 bp, Oryza sativa
  Clone ID: TFbOSC900136j.C1.o9.np
atgtcatggcacagggctggtgtcctgctgctagggggctcaatcctgcctgcctgtcccgggggttccggccgtaggtggggttgggtcggtactcttgtttatggctaggatgggttgggaactatgtcacgtcttccgtccgtataccgtggtgatgtttaacagagaaaaaggaaagaatgtcagagggtatgcctccagtaactcaagttttcaactcaatccaccactggcctcaagagagttaaccagggcacacccttggtccattccaagcatgctgcttagttcccagctaccattggttggaagtcaagaccaaaatcagtatgtgtttgatcgagcatttgccacccagatcaatgagcttccaatgccagaagagcatgtccccttttgtcatgattgtagagaataaggacactatgccttgaattgtccatgggtatatgccaaagaagccccttcctttggtttaacagggcagacatcgctaaaccagcctcctcgcaccaagtcaagcttgcagcctagtgtgcaaagtagagagcccaatggagagaatccattgaatcccgggaattgctttcctcctagcctttcgtaccacgtggggtcacgtactaagcaagccaaaggcaagaagagtaagaatcagaagagaaaagcaccgatgcgaactgaagaagaagtacgtaagatgactattaccagcaccgaatggcctccagcagggataactattcctagacgtcaaagaggaaataccttccgaggtgcacgacagttgacccagcacctcctaagccatggtggcagagtatctgatagtgaagggtcagatcaagtctcctcggatgttgaagatgagtctccccgacatctcggcgaggaagagatggaatcaaaggcatgcacccgttgtggagaaattggacacattgctagcaggtgtctcacactctgccctcattgtgaagaagaccatccaccaggtgaatgtcccacccgcaaggtcacatgttttctgtgcgaaggtaccaaccatgtgcccaaggattgccaactcagtgtgttgttgaccaagaccgcagaaatccaacgaacaaccctacgattgtctcatcagctagtcagctccaacagcaacctcgacgatatcatccacagcaccaatgctcctcctgctgcacctgactctgcagtaaatcatagcaataataccttcaacaccaaccattctctgcaccgacggcctcagcaaagaattgtcgtcgatggaagaagttgtgtctctccccgacctactccaggccgagcgaagggcaatcaatctcaggagtgcgataccaagcagaagaccgttatctgcttcaaatagcaatcagaaggaagcttctcctgtgaa

SEQ ID NO: 15258 - DNA, 5976 bp, Oryza sativa
  Clone ID: TFbOSC1745j.C1.o15.fg
atgaagagtggcaagtccaaattcgccgttgccaacatcacctcaactgcatggagagggagaaggcagggaggccaacgagctcctccaagtctaaatatgccgtcgacgacaccacctccaccacagtcgtcgctgccaccaagcacaggagagaagcaagatggcaactctgatgttgagggcaatctcgaagctgtctcaccgcttgctcagacgacgcatgccaccggcttcggtgccaagatcaacgacaacgacggccaccccgctgcatctagagaaggagaggggagaaggggaagaaggccaccggtcgcatctgcgagggaggctgccatcctcaaaaccaaatggtgttgcgaggagggaggagcgaggcgaggactggatgccgcctggggatcacgaggaagaaattatggtttgtttggtttcactatgaatgactacctgtcagttggcactgtgatctcttttacgacaataataaattttggacgtgtcatgatggcccttgcagtagatgtctctcgttttgaaggagtgccgatggcccctccagacccaattctcggggtttcagaagcatttaaggcagatcaaaatgatctgaagctcaaccttggtgttggtgcctatagaacagaagagttacagccttatgtcctcaatgtggtcaagaaggctgaaactcttatgttggagaaaggagaaaacaaggagtatctgccaattgaaggcttagctgcatttaacaaagcaactgcagaactattgtttggagctgataatccagtactcaagcaaggacgtgttgctactcttcagtctctctcaggaaccgggtcgctgcgccttgctgcagcatttatacaaagatatttccctgaagcaaaagtactgatatcatctcccacttggggcaatcacaagaacattttcaatgatgcaaaggtaccttggtcagagtaccgttattacgaccccaagactgttggcttggattttgagggaatgatagctgacatacaggctgccccagatggatcttttgttctgctgcatggttgcgctcacaacccaactggaatagacccaactccggaacaatgggagaaaattgcagatgtcattcaagagaagaaacacatgcctttctttgatgttgcatatcagggttttgccagtggaagccttgatgaagatgcatcttctgtcaggctttttgttcaacggggactggaagtgtttgttgcgcagtcttatagcaaaaaccttggtttatatgcagaaagaattggagcaataaatgttgtctgctcaacacctgaagtcgcaaacagggtgaagagccagctgaaacgattggcacggcccatgtattcgaatccccctattcatggtgctaggatagttgccaacgttgttggggatccaaccatgtttggtgaatggaaacaggagatggaagaaatggcagggcgtatcaagaatgtaagacagaagctttatgatagtttgtctgcaaaggacgacagtggcaaggactggtctttcattctgaggcagataggcatgttctcctacacgggcttgaacaaaactcagagtgataatatgaccgacaaatggcacatatacatgacaaaggatgggagaatttcgttggctggattgtccctggctaaatgcgagtacctagctgacgccatcatcgactccttccataacggcccatctagtcatgtatatgtaaataaggatagcaatacagagaaggtgaagcttccagagaaaattggctgccaaaaaacttcatggtatcagagccgaccggccggcggcaggcgacggttgaaccctagctggccggaggcgtggaggcttgagcagggtagagagtgcgcatcagcagcggcgcggaagagcggggccagcgcggcgcgtcgaggaggaagaagccgagcagctgcaggtgcggagctgctgctgctgcttggggctgagctcgcaggaagaagtggctcttgctctgtagtggcggggtcacagcacagtgaagactttgcatctcttgtggaaaatcaaggaatagaacaagtgatgggtaaattggtggacatgctagcgaaaaaatttagtgaggcctcaactacaagcaatgcaattatccctcatactgaatcaatactgaagattgagttaatgcaaaacgaaatcaagttggagggtgtcaaaaattatttgagttggtcaaggagggcattactaatactaaaaacaaaggggttagaaggatatgtcacaggagaagtgaaggagcctgagaacacatcaagtgtagaatggaagacttggagcactaccaactctttagtggtggcatggttgttgacttcattaatcccagctattgctacaactgttgagactatctctagtgcgagggagatgtggaaaactcttactaaactatactcaggagaaggtaatgtgatgctaatggtggaggcacaagagaagataagtgctttgagacagggggagcgctctgtggcagaatatgtcgtagagttgaagagtttgtggtccgatttagatcattatgatcctcttggattagagcactctgattgcatagcaaaaatgaagaaatgggttgagcgtagaagggttattgagttcttgaagggtctaaatccagagttcgaaggaagaagagatgcaatgtttcaccaaaccactcttcctaccttagatgaggccattgcagctatggcacaggaggagcttaagaagaaagtattgcctagtgccgcaccatgttcaccaagtcccacctatgcaattgtacaaggtaaagagactagagagtgcttcaattgtggtgaaatgggacaccttatgcgtgattgtcatgctccacgcaagcctacttatgggagaggaagaggtgttgatagaggtggaacaagaggtggaagaggctatgctggtaggagcaatagaggaagaggttatggatatagaggtgattacaaggctaatgcagttactctagaagagggttcttccgggactacacctgacaatgttgccaactttgctcattctacttcaggtagttttaatcaagcatttatgtctatgaacacttctcattcaagttggatattagactcaggtgcatccaggcatgtcactggcatgagtggagaatttacatcatataaaccatattcatttgcacacaaagagaccattcaaactgctgatggcacatcatgtcaggagagaagaacagggaagaaacttgggattagtatcaggcgtgatggactttggtacttggacagaagagggacaaatgaggatgtgtgtgcactaatggcttcaacaagtaaagaagtgactgagtttattagaactgataatggaggggagtatatgaatagtgaattcggtcactttctttctttagaaggaatattacatcagacttcttgtcctgatactcctccacagaatggagtggctgaaagaaaaaatcgccatcttttggagatagctcggtcactaatgtatactatgaatgtacctaaatttctatggagtgaggcagtaatgacggcagcttatctcatcaaccgcacaccatcaagaatacttggaatgaagacaccatatgagatgatatttgggaagaatgaatttgtggttccaccgagggtgtttggctgcacttgttttgttagagatcatagaccatctattggaaaacttgatcctcgagctgttaaatgcatctttataggctattcatccaaccagaaggggtataagtgttggagtccatcagaacggcggacatttgtaagtatggatgttacgtttagggaatctgttccattctatggtgagaaaacagatataagctctttatttgttgatcttgatgatttaactagaggtgaccatgatcaacaaaaggaaggtgaaatcttgggtctcaaggagaatgaacaatcaaagggaaagattatggttggtgaaattccatgtgctataggtgatcctgtacaagaacaagaatggagaaagccacatgaagaggaaaatcttcaagtttacacaaggagaatgagacttccaacaactcaacaagttgaagttgatgatcaagtatcagatgatcttactcatgtgcaagtgtcttcggagtcagggggagaacaaatagaaattagagaagaagaatcaaacttgccaattgccataagaaaggggatgagaagcaatgcaggcaaacctccacaaagatatggttttgaaattggagatgaaagtggtgatgagaatgatatagccaattatgtatcttacacttccttgtcatcgacatacaaggcctttgtggcatctctaaattcagctataattcctaaggattggaaagaggcaaagcaagacccaaggtggcatcaagcaatgctagatgaactagaagctcttgagaagaacaaaacatgggatcttgtatcctatcccaatggaaagaaagtggtaaactgtaagtgggtatatgcagtgaaacaaaatccggatggaaaagtggagaggtacaaagcaagacttgtggctaaggaatatagccagacatatggaattgattatgatgaaacgtttgcaccggttgcaaaaatgagtacggtaagaactataatatcttgtgcagttaactttgattggccattacatcaattggatgtcaagaatgcttttctacatggcgatcttcaagaggaggtatatatggaaattccacctggatttgctactttgcaaactaaaggtaaagtattgagattgaagaaatccttatatggtctcaaacagtcgccaagagcatggtttgatcgatttaggcgtgcaatgtgtgctatgggctataaacaatgtaatggagatcacacagttttctatcatcatagtggagatcatataaccattcttgctgtttatgttgatgatatgattatcactggaaatgattgctcggagataactaggctgaaacaaaatctaagcaaagaatttgaagttaaggacctaggccagttgaaatattttctgggtattgaaattgcaagatctcctagagggatagttctttcacagcggaaatatgcattggacttgctcagtgacacaggtatgcttggatgtcgcccagcctctacaccagttgatcaaaatcataagttatgtgcagagtctggaaatccagtgaataaggaaagataccaaaggctggttgggagactgatatatttatgtcatacacgacctgacataacttatgctgtcagtatggtgagtcgatatatgcatgatccaaggagtgggcatatggatgctgtctataggatcttgagatatttgaaaggaagcccaggtaaaggcctatggtttaagaaaaatggacacttggaggttgaaggctattgtgatgcagattgggcaagttgtcctgatgatagaagatcaacttcaggctattgtgtgtttgttggtggtaatctagtatcttggaggagcaagaagcaaccggtggtgtctcgctcaaccgctgaggcagaatatcgggcaatgtcagtgagtttaagtgagttgttatggctaaggaatcttctttctgagttgatgttgccggtggatactccaatgaaattgtggtgtgacaacaagtcagcaatcagcattgctaacaacccagttcaacatgatcgaacaaagcatgtggagttggatcgtttctttatcaaggaaaaactggatgagggagttttggaattagaatttgtaatgtctggtggacaagttgctgattgtttcacaaagggtttaggtgttaaaaagtgtaatagttcatgtgacaagatgggtatgatagatatctatcacccatcttga

SEQ ID NO: 15259 - DNA, 3714 bp, Oryza sativa
  Clone ID: TFbOSC401213j.C1.o23.fg
atggcagaaaatcaaggaatagaacaagtgatgggtaaattggtggacatgctagcgaaaaaatttagtgaggcctcaactacaagcaatgcaattatccctcatactgaatcaatactgaagattgagttaatgcaaaacgaaatcaagttgggtgtcaaaaattatttgagttggtcaaggagggcattactaatactaaaaacaaaggggttagaaggatatgtcacaggagaagtgaaggagcctgagaacacatcaagtgtagaatggaagacttggagcactaccaactctttagtggtggcatggttgttgacttcattaatcccagctattgctacaactgttgagactatctctagtgcgagtgagatgtggaaaactcttactaaactatactcaggagaaggtaatgtgatgctaatggtggaggcacaagagaagataagtgctttgagacagggggagcgctctgtggcagaatatgtcgcagagttgaagagtttgtggtccgatttagatcattatgatcctcttggattagagcactctgattgcatagcaaaaatgaagaaatgggttgagcgtagaagggttattgagttcttgaagggtctaaatccagagttcgaaggaagaagagatgcaatgtttcaccaaaccactcttcctaccttagatgaggccattgcagctatggcacaggaggagcttaagaagaaagtattgcctagtgccgcaccatgttcaccaagtcccacctatgcaattgtacaaggtaaagagactagagagtgcttcaattgtggtgaaatgggacaccttatgcgtgattgtcatgctccacgcaagcctacttatgggagaggaagaggtgttgatagaggtggaacaagaggtggaagaggctatgctggtaggagcaatagaggaagaggttatggatatagaggtgattacaaggctaatgcagttactctagaagagggttcttccgggactacacctgacaatgttgccaactttgctcattctactccaggtagttttaatcaagcatttatgtctatgaacacttctcattcaagttggatattagactcaggtgcatccaggcatgtcactggcatgagtggagaatttacatcatataaaccatattcatttgcacacaaagagaccattcaaactgctgatggcacatcatgtcaggagagaagaacagggaagaaacttgggattggtatcatgcgtgatggactttggtacttggacagaagagggacaaatgaggatgtgtgtgcactaatggcttcaacaagtaaagaagtgactgagaatggagtggctgaaagaaaaaatcgccatcttttggagatagctcggtcactaatgtatactatgaatgtacctaaatttctatggagtgaggcagtaatgacggcagcttatctcatcaaccgcacaccatcaagaatacttggaatgaagacaccatatgagatgatatttgggaagaatgaatttgtggttccaccgagggtgtttggctgcacttgttttgttagagatcatagaccatctattgggaaacttgatcctcgagctgttaaatgcatctttataggctattcatccagccagaaggggtataagtgttggagtccatcagaacggcggacatttgtaagtatggatgttacgtttagggaatctgtccattctatggaaggtgaaatcttgggtctcaaggagaatgaacaatcaaagggaaagattgtggttggtgaaattccatgtgctataggtgatcctgtacaagaacaagaatggagaaagccacatgaagaggaaaatcttcaagtttacacaaggagaatgagacttccaacaactcaacaagttgaagttgatgatcaagtatcagatgatcttactcatgtgcaagtgtcttcggagtcagggggagaacaaatagaaattagagaagaagaatcaaacttgccaattgccataagaaaggggatgagaagcaatgcaggcaaacctccacaaagatatggttttgaaattggagatgaaagtggtgatgagaatgatatagccaattatgtatcttacacttccttgtcatcgacatacaaggcctttgtggcatctctaaattcagctataattcctaaggattggaaagaggcaaagcaagacccaaggtggcatcaagcaatgctagatgaactagaagctcttgagaagaacaaaacatgggatcttgtatcctatcccaatggaaagaaagtggtaaactgtaagtgggtatatgcagtgaaacaaaatccggatggaaaagtggagaggtacaaagcaagacttgtggctaagggatatagccagacatatggaattgattatgatgaaacgtttgcaccggttgcaaaaatgagtacggtaagaactataatatcttgtgcagttaactttgattggccattacatcaattggatgtcaagaatgcttttctacatggcgatcttcaagaggaggtatatatggaaattccacctggatttgctactttgcaaactaaaggtaaagtattgagactgaagaaatccttatatggtctcaaacagtcgccaagagcatggtttgatcgatttaggcgtgcaatgtgtgctatgggctataaacaatgtaatggagatcacacagttttctatcatcatagtggagatcatataaccattcttgctgtttatgttgatgatatgattatcactggaaatgattgctcggagataactaggctgaaacaaaatctaagcaaagaatttgaagttaaggacctaggccagttgaaatattttctgggtattgaaattgcaagatctcctagagggatagttctttcacagcggaaatatgcattggacttgctcagtgacacaggtatgcttggatgtcgcccagcctctacaccagttgatcaaaatcataagttatgtgcagagtctggaaatccagtgaataaggaaagataccaaaggctggttgggagactgatatatttatgtcatacacgacctgacataacttatgctgtcagtatggtgagtcgatatatgcatgatccaaggagtgggcatatggatgctgtctataggatcttgagatatttgaaaggaagcccaggtaaaggcctatggtttaagaaaaatggacacttggaggttgaaggctattgtgatgcagattgggcaagttgtcctgatgatagaagatcaacttcaggctattgtgtgtttgttggtggcaatctagtatcttggaggagcaagaagcaaccggtggtgtctcgctcaaccgctgaggcagaatatcgggcaatgtcagtgagtttgagtgagttgttatggctaaggaatcttctttctgagttgatgttgccggtggatactccaatgaaattgtggtgtgacaacaagtcagcaatcagcattgctaacaacccagttcaacatgatcgaacaaagcatgtggagttggatcgtttctttatcaaggaaaaactggatgagggagttttggaattagaatttgtaatgtctggtggacaagttgctgattgtttcacaaagggtttaggtgttaaagagtgtaatagttcatgtgacaagatgggtatgatagatatctatcacccatcttga

SEQ ID NO: 15260 - DNA, 3900 bp, Oryza sativa
  Clone ID: TFbOSC401669j.C1.o18.fg
atggcagaaaatcaaggaatagaacaagtgatgggtaaattggtggacatgctagcgaaaaaatttagtgaggcctcaactacaagcaatgcaattatccctcatactgaatcaatactgaagattgagttaatgcaaaacgaaatcaagttggagggtgtcaaaaattatttgagttggtcaaggagggcattactaatactaaaaacaaaggggttagaaggatatgtcacaggagaagtgaaggagcctgagaacacatcaagtgtagaatggaagacttggagcactaccaactctttagtggtggcatggttgttgacttcattaatcccagctattgctacaactgttgagactatctctagtgcgagtgagatgtggaaaactcttactaaactatactcaggagaaggtaatgtgatgctaatggtggaggcacaagagaagataagtgctttgagacagggggagcgctctgtggcagaatatgtcgcagagttgaagagtttgtggtccgatttagatcattatgatcctcttggattagagcactctgattgcatagcaaaaatgaagaaatgggttgagcgtagaagggttattgagttcttgaagggtctaaatccagagttcgaaggaagaagagatgcaatgtttcaccaaaccactcttcctaccttagatgaggccattgcagctatggcacaggaggagcttaagaagaaagtattgcctagtgccgcaccatgttcaccaagtcccacctatgcaattgtacaaggtaaagagactagagagtgcttcaattgtggtgaaatgggacaccttatgcgtgattgtcatgctccacgcaagcctacttatgggagaggaagaggtgttgatagaggtggaacaagaggtggaagaggctatgctggtaggagcaatagaggaagaggttatggatatagaggtgattacaaggctaatgcagttactctagaagagggttcttccgggactacacctgacaatgttgccaactttgctcattctacttcaggtagttttaatcaagcatttatgtctatgaacacttctcattcaagttggatattagactcaggtgcatccaggcatgtcactggcatgagtggagaatttacatcatataaaccatattcatttgcacataaagagaccattcaaactgctgatggcacatcatgtcaggagagaagaacagggaagaaacttgggattggtatcaggcgtgatggactttggtacttggacagaagagggacaaatgaggatgtgtgtgcactaatggcttcaacaagtaaagaagtgactgagtttattagaactgataatggaggggagtatatgaatagtgaattcggtcactttctttctttggaaggaatattacatcagacttcttgtcctgatactcctccacagaatggagtggctgaaagaaaaaatcgccatcttttggagatagctcggtcactaatgtatactatgaatgtacctaaatttctatggagtgaggcagtaatgacggcagcttatctcatcaaccgcacaccatcaagaatacttggaatgaagacaccatatgagatgatatttgggaagaatgaatttgtggttccaccgagggtgtttggctgcacttgttttgttagagatcatagaccatctattgggaaacttgatcctcgagctgttaaatgcatctttataggctattcatccagccagaaggggtataagtgttggagtccatcagaacggcggacatttgtaagtatggatgttacgtttagggaatctgttccattctatggtgagaaaacagatataagctctttatttgttgatcttgatgatttaactagaggtgaccatgatcaacaaaaggaaggtgaaatcttgggtctcaaggagaatgaacaatcaaagggaaagattgtggttggtgaaattccatgtgctataggtgatcctgtacaagaacaagaatggagaaagccacatgaagaggaaaatcttcaagtttacacaaggagaatgagacttccaacaactcaacaagttgaagttgatgatcaagtatcagatgatcttactcatgtgcaagtgtcttcggagtcagggggagaacaaatagaaattagagaagaagaatcaaacttgccaattgccataagaaaggggatgagaagcaatgcaggcaaacctccacaaagatatggttttgaaattggagatgaaagtggtgatgagaatgatatagccaattatgtatcttacacttccttgtcatcgacatacaaggcctttgtggcatctctaaattcagctataattcctaaggattggaaagaggcaaagcaagacccaaggtggcatcaagcaatgctagatgaactagaagctcttgagaagaacaaaacatgggatcttgtatcctatcccaatggaaagaaagtggtaaactgtaagtgggtatatgcagtgaaacaaaatccggatggaaaagtggagaggtacaaagcaagacttgtggctaagggatatagccagacatatggaattgattatgatgaaacgtttgcaccggttgcaaaaatgagtacggtaagaactataatatcttgtgcagttaactttgattggccattacatcaattggatgtcaagaatgcttttctacatggcgatcttcaagaggaggtatatatggaaattccacctggatttgctactttgcaaactaaaggtaaagtattgagactgaagaaatccttatatggtctcaaacagtcgccaagagcatggtttgatcgatttaggcgtgcaatgtgtgctatgggctataaacaatgtaatggagatcacacagttttctatcatcatagtggagatcatataaccattcttgctgtttatgttgatgatatgattatcactggaaatgattgctcggagataactaggctgaaacaaaatctaagcaaagaatttgaagttaaggacctaggccagttgaaatattttctgggtattgaaattgcaagatctcctagagggatagttctttcacagcggaaatatgcattggacttgctcagtgacacaggtatgcttggatgtcgcccagcctctacaccagttgatcaaaatcataagttatgtgcagagtctggaaatccagtgaataaggaaagataccaaaggctggttgggagactgatatatttatgtcatacacgacctgacataacttatgctgtcagtatggtgagtcgatatatgcatgatccaaggagtgggcatatggatgctgtctataggatcttgagatatttgaaaggaagcccaggtaaaggcctatggtttaagaaaaatggacacttggaggttgaaggctattgtgatgcagattgggcaagttgtcctgatgatagaagatcaacttcaggctattgtgtgtttgttggtggcaatctagtatcttggaggagcaagaagcaaccggtggtgtctcgctcaaccgctgaggcagaatatcgggcaatgtcagtgagtttgagtgagttgttatggctaaggaatcttctttctgagttgatgttgccggtggatactccaatgaaattgtggtgtgacaacaagtcagcaatcagcattgctaacaacccagttcaacatgatcgaacaaagcatgtggagttggatcgtttctttatcaaggaaaaactggatgagggagttttggaattagaatttgtaatgtctggtggacaagttgctgattgtttcacaaagggtttaggtgttaaagagtgtaatagttcatgtgacaagatgggtatgatagatatctatcacccatcttga

SEQ ID NO: 15261 - DNA, 1470 bp, Oryza sativa
  Clone ID: TFbOSC900020j.C1.o11.fg
atgagcaacagcgccgccacctccacctacgcggagagcgtcgcgtcctgccgcgctcccgctcccgccacccccagggcccccccacgccgccgtgaggcgccacttcgacttcgccgccggcgacggcgttatatgttggattttctggatgcatgtgtatattttctcaagcatgcgagagtacatgaggaaagaaatgcaaatattctgtttggtgtggagaagctgatatttgtccaaatgccacagcctgcttatatgagccatcctaaaccaaatcctcatgtttttagcagcccatgcagtcctgttgtgttcaacagtcctagcaatcatttagctggttctacaactcctacaccgaacaatctccaagtttttaatggtccaagaaaccctcatgtgtccaacagtcctagcaatcatttagctggttctacaactcctacaccaaacaatctccaagtttttaatgctccaggaaaccttcatgtgtccaacagtccaaacaatcatcgatctggtgctacaactccagttaacgctaatccccctggttctagatcaagtgataaacaaccaatctgccattgtagggctggaaaatgcaaagtggagacaataaaagggcaaaagtactatgtgtgttgtatacagaagggacaaggtgcatgcccttaccaagtgccggtcaatgcttttgttgaagaatcaccacaagctggaaacagcgttccattggaggataaccgtgggaactacagtccagttaaagtggaggcgaacaatgacaacggatcaatcaatcctgatcaacctgaatacgatgagtggccatttgacatcgtcaacaatgatgttgtatgcagtggcttcttgccaactgctgagcctacactaagagatggtatagttgctggggaatcaccaagtacgcagcacctgtcaaatgctacgactgaagcgaaaacaccaacaaaatcgcccattatgccgccacctcatggtagcgggagccccttcactcctcggtcgaacccctgctaccgatgtggtgaagacgggcactggtccaggaactgccctaagccggcttcgagcccacttaactctccttgctacaactgcggcaagcttgggcactggagagcaagaggtgggctcctacggtgtttgtccatcatctgctttgttaatcacttcttacatgaatgcaaagtgcagacctgttactgctacaactgctactttgctcctttcttcttcagtatgatgaactggaaggcgatcggctgccgttctctgaatctttctctgaaatttttcctcgagagtttctttcagagatggtccagccctctgccgttcattcggtcagaaactgaaacctgggatgatgatcgttgcagagacttgaccaggacatacgaggacaagaagaagaacaccaatcgatggatggattga

SEQ ID NO: 15262 - DNA, 1658 bp, Oryza sativa
  Clone ID: TFbOSC13693j.C1.o1.np
actagtactagatggtcagctttgcgaagaagaagatgtcgctagtggtctgccgaagttctagaaggctgcaggatccactagcgaagcaaaggaagcagtgaagccagatgtgaagcaggaggaaaagattagatctgttaaggtcctatccttagtttctgatctctttctttcctccaattttctctttccccctctctaaaccttgtaacagatggctgacaatgagaaaggaagtaggtcagaaatcaaaacaagggtgccccaagctccgagtgaatgaagcaccagacaccagttgtgtgacagtggtctaacacctgattaactagaacgaattgcttatagagctaccacagcagcatcagatgccaattctagacccgagtcagatgcaacctcaagtgcaggtggaggcagtccaatcactcacaccacaagttagcgcaccgccagcatcccaacaagcccatcgtgccatgccacatgtggactcaaaagaagcaagaatcatttgttttatctatgttgaacaagggcactatgcaaggaactgtccttagcagaaaaaaaaagcaccaatgcgaaccgaagatgaggtccgtaagatgaccattaccggcacagaatggcctccaccaggaatgacaaaacgtcaaagaagaaatttcttccgaggtgcaccatagttgacggaacatcttttagctaatggaggtagagtgtctgatagcgaagattcagatcaagtctcctcacgggttgaagatgagaagtctctccaaggtttcaaccagaataaaaaggaacatatggcatgctctcgttgtggagaaatcggtcactttgccagctcatgtgtcaccacttgcgttcattgtgaggaagaccatccacccgacgagtgtccaacaagcaggattacttatttcttgtgcgaatgagctgatcatgtacgaaaagattgtcaattcagttttctgctgatgaagaagatggccaaccaacccgccagttacaacagacagaagcatcaaggcaacccaaatcctcgacaagactacagtttcagcctaactccaatgccaggacagaggaatcaaaatgggaaaagaaaatgccgagtctggaaagatatctgttgtttcaattgtcaagaagtgggtcatttcgccgacaagtgctcgaaaccgagaaacatatttaccaacacgtcagtccatgcaactccgcgcaatcagaagcttgctccttagcaaattggcatccatgcatcctgaagcagccctatagcccaagttgcaatagctcccactccaatgagtgcactaccacaaggtgtcaatgctcaatttcagccccagccaccagttgacaagacagaggccagtatagggttggacctttggatggtccaggacaacagccaagaaatcaagtcaagatgaagaacctgagagtaagaaagttattggtttgttacaactggaaagaaccagggcataactccaggacttgtccctaaccaaggaaaaaaaatcggcctccacattttcgccaatttacaagaaacagacatgccaatcgccaagtggtcactgagaaaaaaaattttttttgggccccccccaaaaaagggggtttttaaaaacccc

SEQ ID NO: 15263 - DNA, 3645 bp, Oryza sativa
  Clone ID: TFbOSC900382j.C1.o4.fg
atggctggttttgccgatgcactgaggacggataaattcaccgatgtgcacttcaagagatggcagatcagggtcactctgtggctgacagctatgaaatgcttctgggtgagtactggcaagcctatgggtgttcttaatgctgatcagcagaaagaattcgatgaggccactactctctttgtgggatgcattcttagcgtgcttggcgatcgtctggtcgaggtgtatatgcatatgaccgacgctaaggagttgtgggatgcactgaatactaaattcggtgctactgatgctagcaatgatctgtatatcatggagcaatttcatgactacaagatggctgacaaccgttctgtagtcaaacaggctcatgagatacaaaccatggctaaggaactcgaactccttaagtgtgtcttacccaacaaatttgtggtcgggtgcattattgcgaaactacctccatcttggagaggtttcggtactgcactcaaacacaagagacaggaatactccattgaggggttgatagcgtctcttgatgttgaggagaaagctcgggaaaaagatgccgcgtctaagggcgatggtggccagtccactgccaatgttgtgcacaaggcccagaacaagagcaaggggaaatacaaagctcagcagaccaccaacttcaagaagaagaagaacaacaacaatcctaatcaggatgagaggacttgctttgtgtgtagtcaacctggccatctagcgaggaagtgtccacaacgcaaggggatgaaggcacctgcagggcagacctctaagtctgctaatgtgaccattggcaacactggagatggaagcgggtatggtaatttacctactgttttttcagttaatcaatctactaattggtgggttgatactggggccaatgtacatgtttgtgctgacatctcattgttttcttcttatcaggtcgcacggggttacaccgtcctagtggggaatgggtcacatgcttctgttcatggtgttggcacggtagatctgaaatttacttcaggaaagatcgtgcagctgaagaacgtgcagcatgccccttccatcgacaggaatcttgttagtggctcccgtctgactagagacggatttaagttggtttttgagtctaataaagtagtcgtgtctaaacatggatattttattggtaaagattatgagtgcggaggcctgttccgcttttccctttctgatttctgcaataagtctgtgaaccatatttgtggcagtgtggatgatgaggctaatgtttggcactcacgtttatgttatattaattttggcttgatgtctcggctttccagcatgtgtttaattcctaagttttccattgtcaaaggttctaagtgccatagctgtgtgcaatcgaagcaacctcgcaagcctcacaaggctgccgaggagagaaacttggcaccactagaactcctacattcagatcattgtgaaatgaattgggtgttgacgaagggtggaaaacgatatttcatgacgttgattgatgatgctactagattttgctatatgtacctgttgaaaatgaaagacgaggctctagactattttaaaatatataaggcagaagttgaaaatcaacttgacagaaagataaaaaggcttaggtctgatcgtggtggagagtttttctcaaacgagtttgacttattctgtgaggaacatggcatcatacatgagaggacgcctccctattctcccgagtctaatgggattgctgaaaggaagaaccgcacactgactgacttggtgaatgccatgttggacaccgcgggactacctaaggcatgcattgcctatagatttttaatatttaaatctgaggtacctgacatgcatgttggtacaatcatggagtctcgtgatgctaccttctttgagagcttttttccaatgaaggatacacatagtagttctagccaaacctctgaaataattcctaattcaatcacaccaccagaacaaactgaacatacacatgaacatgtcactgaggaggatgacagtgaagctcctcgaaggagtaaaagacaaaggacggctaagtcttttggtgatgatttcactgtgtacctcgtggacgacactcctaagtcaatttcagaagcatatgcatctcctgatgtagactactggaaggaggctgagatgacagagcgaccctatgggtgtaaacctgtggggtgcaagtgggtgttcaaaaagaagctgaggcctgatggtaccattgaaaagtacaacgctcggcttgttgctaagggctatactcagaaagaaggcgaagatttctttgacacttactcacctgttgccagattgaccacaattcgtgtgttactttccctagcagcctcacatggtcttctcgttcatcaaatggacgttaagacagcttttcttaatggagagctggatgaggagatctatatggatcagcctgatgggtttgtagttgaaggtcaagaaggcaagatatgcaaattgttgaagtctttgtatggtctgaaacaagctcctaagcaatggcacgagaaatttgatagaacattgacatctgcaggcttcgcagtcaatgaagcagataaatgtgtatactatcgccatggtgggggtgagggagttattctgtgcttgtatgttgatgacatactgatatttgggacaaaccttgaggtgataaatgaggttaaatcattcttgtctcaaaaatttgatatgaaggatttgggagtagctgatgttatcctaaacattaagctaattagaggtgagaatgggattacactcttgcagtcccattatgtggagaagatcttgaatcgctttggctactttgatagtaagccttctccaacaccttatgatcctagcttgttgcttcgcaagaacaagagaattgctaggaatcaactggaatactccaaaatcattggctcgctgatgtacctggctagtgcaactaggcctgatatctcctttgctgtgagcaagttgagccggtttacctctaatccgggagatgatcactggcgtgcgcttgagcgagtaatgcactatctgaaaggtactatggaattggggcttcactattctgggtatcctgtggtactggaaggatatagtgattctaactggatctctgatgtggatgagatcaaagccactagtggatatatcttcacactaggtggtggtgctgtttcgtggaggtcttgcaaacagaccattttgacgaggtcaaccatgaaagcagagttgacggcactggatactgctactgttgaggcagaatggctgcgtgatctattaatggatctccctattgttgaaaaaccggtgccggctatctttatgaactatgacaatcaaacggtaattgtcaaagtgaatagttctaaggataatatgaaatcgtctagacatgtgaaaagacgattgaagtctattaggaaactgagaaactccggagttataacgttggattacatccaaacagctagaaacctggcagatcccttcacgaagggactatcacaaaatgtgatagacaatgcatcgaaggagatgggtttgagacctatgtga

SEQ ID NO: 15264 - DNA, 1086 bp, Oryza sativa
  Clone ID: TFbOSC31099j.C1.o1.fg
atgccatgccacatgttgacccaaaagaagcaagggcactacgcaaggaactgtcctcagcagaaaagaaaagcaccaatgcgaaccgaagatgaagtccgtaagatgatcattaccagcacagaatggcctccaccaggaatgacaaaatgtcagagaagaaattcctcccgaggtgcacaacagttgacagagcatcttttagctaatggaggtagagtgtctggtagtgaagattcagatcaagtctcctcagatgatgaagatgcgaagtctccccaaggttttaaccagaataaaatagaacttaaggcatgctctcgttgtggagaaatcggtcatgttgccagctcgtgtgcctttacatgcgttcgttgtgaggaagaccatccacccgataggtgccctatgagcaggatcacttgtttcttgtgtgaaggaactgatcatgtaccaaaagattgtcaactcagttttctgctgacgaagaagatggccgaccaacacgcccattctaacggagagaagcatcaaggaaacacaaatcctcgccaacattacagtttcagcctaactccagtgccaggacagaggaatcaaaatgagaaaagaaaatgccgagttcgggaagatatctgttgcttcaattgtcaaggaatgggtcatttcgccgacaagtgcccaaaaccgagaaacatagctgccggcacgtcagtccacgcaactccctgcaatcagaagcttgctcctcaacgaattgtcatccatgcatcccgaagcagtcctatagcccgcgttgcaacagctccaattccaatgagtgcactaccacaaggtgtcaatgctcaatttcagccccagccaccagctggcaagacagaggccagtatctgcgttgtacctttggaagttccaatacaccagctgagaaatcaagtacaagatgaagaacccgagttgaagaagggcattactccaaaaactgtccccaaccaaggcaaaatcggcctccacattaccgccaatttacacgaagcggacattcccatcgtattgtggtcactggagcaaacgccgtgcccgtaa

SEQ ID NO: 15265 - DNA, 3222 bp, Oryza sativa
  Clone ID: TFbOSC400545j.C1.o30.fg
atggcagatcagggtcactatgtggctgacagctatgaaatgcttctggcgttcttggcgatcgtctggaacgaggtgtatatgcacatgaccgacgctaaggagttgtgggatgcactgaatactaaatttggtgctactgatgctagcaatgatctgtacatcatggaggagtttcatgactacaggatggttgacaaccgttctgtagtcgaacaggctcatgagatacaaaccatggctaaggaactcgaactccttaaaagtttcggtactgcactcaaacacaagagacaggaatactccattgaggggttgatagcgtctcttgatgttgaggagaaagctcgggaaaaggacgccgcgtctaagggcgatggtgggcagtccagtgccaatgttgtgcacaaggcccagaacaagagcaaggggaaatacaaagctcaacagaccaccaacttcaagaagcagaagaagaacaacaacaatcctaatcaggatgagaggacttgctttgtgtgtggccaacctagtcatctagctaggaagtgtccacagcgcaaggggatgaaggcacctgcagggcagacttctaagtctgctaatgtgaccattggcaatactggagatggaagcgggtatggtaatttacctactgttttttcagttaatcagtctactaattggtgggttgatactggggccaatgttgcacggggttccaccgtcctaatggggaatgggtcacatgctcctgttcatggtgttggcacggtagatctgaagtttacttcgggaaagatcgtgcaactgaagaacgtgcagcatgtcccttctatcgacaggaatcttgttagtggctcccgtctgactagagacggatttaagttggtttttgagtctaataaagtagtcgtgtctaaacatggatattttattggtaaaggttatgagtgcggaggcttgttccgcttttccctttctgatttctacaataagtctgtgaaccatatttgtggcagtgtggatgatgaggctaatgtttggcactcacgtttatgtcatattaattttggcttgatgtctcggctttccagcatgtgtttaatttctaagttttccattgtcaaaggttttaagtgccatagttgtgtgcaatcgaagcaacctcgcaagcctcacaaggctgccgaggagagaaacttggcaccactagaactcctacattcagatctttgtgaaatgaatggggtgttgacgaagggtggaaaacgatatttcatgacgttgattgatgatgctactagattttgctatgtgtacttgttaaaaatgaaagacgaggctctagactattttaaaatttataaggcagaagttgaaaatcaaattgacagaaagataaaaaaactcaggtctgatcgtggtggagagtttttctcaaacgagtttgacttattctgtgaggaacatggcatcatacatgagaggacgcctccctattctcccgagtctaatgggattgctgaaaggaagaaccgcacactgactgacttggtgaatgccatgttggacaccgcgggactacctaaggcatggtggggggaggcattgttgacctcgaatcatgtgttaaacagagttcctaacagaaataaggacaaaacaccatatgagatatggattgggagaaaaccatcactttgttatttgcgcacatgggggtgcttggcgaaagtcaatgtaccaataacgaagaagcgcaaacttggacctaagactgtggactgtgtctttctgggatatgctcatcatagcattgcctatagatttttaatagttaaatctgaggtacctgacatgcatgttggtacaattatggagactcgtgatgctaccttctttgagagctttttcccaatgaaggatacacatagtagttctagccaaccttctgaaataattcccagttcaatcacaccaccagaacaaactgaatatacacatgaacatgtcactgaggaggatggcagtgaagctcctcgaaggagtaagagacaaaggacggctaagtcctttggtgatgatttcactgtgtacttcgtggatgacactcctaagtcaatttcagaagcatatgcatctcctgatgcagactactggaaggaggctgtccctagtgaaatggattccattatcgctaacgggacttgggaggtgacagagcgaccctatgggtgtaaacctctggggtgcaagtgggtgttcaagaagaagcttaggcctgatggtactattgaaaagtacaaggctcggcttgttgctaagggctatactcagaaagaaggcgaagatttctttgacacttactcacctgttgctagattgaccacaattcgtgtgctactttccctagcagcctcacatggtcttctcgttcatcaaatggacgttaagacaacttttcttaatggagagctggatgaggagatctatatggatcaacctgatgggtttgtagttgaaggtcaagaaggcaaagtgataaatgaggttaaatcattcttgtctcaaaattttgatatgaaggatttgggagtagctgatgttatcctaaacattaagctaattagaggtgagaatgggattacactcttgcaatcccattatgtggagaagatcttgaatcgctttggctacattgatagtaagccttctccagcaccttatgatcctagcttgttgcttcgcaagaacaagagaattgctaggaatcaactggaatattcccaaatcattggctcgctgatgtacctggctagtgcaactaggcctgatatctcctttgctgtgagcaagttgagccggtttacctctaatctaggagatgatcactggcgtgcgcttgagcgagtaatgcgctatctgaaaggtactatggcattggggcttcactatactggatatcctgcgatactggagggttatagtgattctaactggatctctgatgtggatgagatcaaagccactagtggatatgtcttcacactgggtggtggtgctgtttcgtggaggtcttgcaaacagaccattttgacgaggtcaaccatggaagcagagttgacggcactgcatactgctactgttgaggcagaatggctgcgtgatctattaatggatttgcctattgttgaaaaaatggtgccggctatcttttga

SEQ ID NO: 15266 - DNA, 1110 bp, Oryza sativa
  Clone ID: TFbOSC415186j.C1.o1.fg
atggtgaacagtcgcaccaatggaagtggaaacaataacaatgaagggaacccaactcttgctcaagttctggctcaacagactcagttaatgaatatgatgatacagcagatgcagaaccagctcaaccaagggaacaacaatgctccaccgccgcagaacaagttaactgattttcttcgtgtgaggccacctaccttttctagcactaccaacctagtggaagcaggtgattggctgcacgctgttgagaagaagttggaactgctccagtgcacggatcaggagaaagttgttttcgcttcacatcagttgcaaggacctgcatcagaatggtgggatcatttccggatgaacagagcagatggacaaccaatcacttgggcagagttcacagaagcattcaagaagacacacatacctgtaggagttgttgctttgaagaagcgtgagttcagagcattgaagcaaaaggatcataccgtggcagagtatcttcatgagttcaatcgtctggcacgttatgctccagaagatgtgcgtactgacgaggaaaggcaggagaagttcttggaaggtctgaaggatgaactgtcagttacgttgatctcccatgactatgttgattttcagcagctggttgacaaagcaattcgacttgaagacaagaagaatatgatggataaccgtaaaaggaaaatgactgtattccatgaggcacaaggtagtagccagaggcagcgtatcaagccactccaaattggtgaatcttcctccgctggtcaaggacagtcgcaacagttgaacatcggtggtgagatcaaatcagagactaatggaagcaatgaagttaacatcgagcaagctaatcagccagtgccagttcagcaggatcagtctcaggagaataacagtagtggaagggagcagcaggtatgtttcaactgttacaacccaggtcactttgcaagagagtgtccgaagccgaagcatcagcagtcgcaagtcaacaacattgtcgtcacaggagccaatgcagtgtcagttgcgtcttcaagagttgcgtcttcaagtgttacagctcagccaccagtttcaaggcagcagtag

SEQ ID NO: 15267 - DNA, 4266 bp, Oryza sativa
  Clone ID: TFbOSC900086j.C1.o11.gm
atgccggagcgaagctgccgcttcccccgcggcgacgccacgccgccgccgccgccggcagcagcatccacatgcgggcgcttgggcgcgggcaccaggacaagcccagctggtggcgcctgtgccggcagcggacgcttcgtgtgcatatcgccgcgcaaggggatgaaggcacctgcagggcagacttctaagtttgctaatgtgaccattggcaacactagagatggaagcgggtatggtaatttacctactgtcgcacggggttccactgtcctaatggggaatgggtcacatgcttctgttcatggtgttggcacggtagatctgaagtttacttcgggaaagatcgtgcagctgaagaacgtgcagcatgtcccttctatcgacaggaatcatgttagtggctcccgtctgactagagacggatttaagttggtttttgagtctaataaagtagtcgtgtgtaaacatggatattttattggtaaaggttatgagtgcggaggcctgttccgcttttccctttctgatttctgcaataagtctgtgaaccatatttgtggcagtgtggataatgaggctaataagcgcaaacttggacctaagactgtggactgtgtctttctgggatatgctcatcacagcattgcctatagatttttaatagttaaatccgaggtacctgacatgcatgttggtacaattatggagtcccttgatgctaccttctttgagagctttttcccaatgaaggatacacatagtggttcgagccaaccctctgaaataattcccagttcaatcacaccaccagaacaaattgaacatacacatgaacatgtctctgaggaggatgtctgtgaagctcctcgaaggagtaagagacaaaggacggctaagtcctttggtgatgatttcactgtgtacctcgtggatgacactcctaagtcaatttcagaagcatatgcatctcctgatgcagactactggaaggaggctgtccgtagtgaaatggattccattatcgctaacgggacttgggaggtgacagagcgaccctatgggtgtgaacctgtggggtgcaagtgggtgttcaagaagaagcttaggcctgacggtactattgaaaagtacaaggctcggcttgttgctaagggctatactcagaaagaaggcgaagatttctttgacacttactcacctgttgctagattgaccacaattcgtgtgctactttccctagcagcttcacatggtcttctcgttcatcaaatggacgttaagacagcttttcttaatggagagctggatgaggagatctatatggatcaacctgatgggtttgtagttgaaggctttgcagtcaatgaggcagataaatgtgtgtactatcgccatggtgggggtgagggagttattctgtgcttgtatgttgacgacatactgatatttgggacaaaccttgaggtgataaatgagtcccattatgtggagaagatcttgaatcgctttggctacattgatagtaagccttctccaacaccttatgatcctagcttgttgcttcgcaagaacaaaagaattgctaggaatcaactggaatactcccaaatcattggctcgctgatgtacctggctagtgcaactaggcctaatatctcctttgctgtgagcaagttgagccggtttacctctaatccgggagatgatcactggcgtgcgcttgagcgaataatgcgctatctgaaaggtactatggaattggggcttcactatattgggtatcctgcggtactggagggttatagtgattctaactggatctctaatgtggatgagatcaaagccactagtggatatatcttcacattgggtggtggtgctgtttcgtggagcattcttggcgatcgtctggtcgaggtgtatatgcatatgaccgacgctaaggagttgtgggatgcactgaatactaaattcggtgctactgatgctagcaatgatctgtatatcatggagcagtttcatgactacaaaatggctgacaaccgttctgtagtcgaacaggctcatgagatacaaaccatggctaaggaactcgaactccttaagtgtgtcttacccgacaaatttgtggccgggtgcattattgcaaaactacctccatcttggaggagtttcggtactgcactcaaacacaagagacaggaatactccgttgaggggttgattgcgtctcttgatgttgaggagaaagctcggaaaaaagatgccgcgtctaagggcgatggtgggcagtccagtgccaatgttgtgcacaaggcccagaacaagagcaaggggaaatacaaagctcagcagaccaccaacttcaagaagcagaagaagaacaacaacaatcctaatcaggatgagaggacttgctttgtgtgtggccaagttggtcatctggttaggaagtgtccacagcgcaaggggatgaaggcacctgcagggcagacttctaagtctgctaatgtgaccattggcaacactagagatggaagcgggtatggtaatttacctactgtcgcacggggttccaccgtcctaatagggaatgggtcacatgcttctgttcatggtgttggcacggtagatctgaagtttacttcgggaaagatcgtgcagctgaagaacatgcagcatgtcccttctatcgacaggaatcttgttagtggctcccgtctgactagagacggatttaagttggtttttgagtctaataaagtagtcgtgtctaaacatgtatattttattggtaaaggttatgagtgcggaggcctgttccgtttttccctttctgatttctgcaataacatgtgtttaattcctaagttttccattgtcaaaggttctaagtgccatagttgtgtgcaatcgaagcaacctcgcaagcctcacaaggctgccgaggagataaacttggcaccactagaactcctacattcagatctttgtgaaatgaatggggtgttgacgaaggaagttgaaaatcaacttgacagaaagataaaaaggcttaggtctgatcgtggtggagagtttttctcgaacgagtttgacttattctgtgagaaacatggcatcatacatgagaggacgcctccctattctcccgagtctaatgggattggtgaaaggaagaaccgcacactgactgacttggtgaatgccatgttggacaccgcgggactgcctaaggcatgtgaagctcctcgaaggagtaagagacaaaggacagctaagtcttttggtgatgatttcattgtgtacctcgtggatgacactcctaagtcaatttcagaagcatatgcatctcctgatgcagactactggaaggaggctgtccgtagtgaaatggattccattatcgctaacgggacttgggaggtgacagagcgaccctatgggtgtaaacctgtggggtgcaagtgggtgttcaagaagaagcttaggcctgacgcctcacatggtcttctcgttcatcaaatggacgttaagacagcttttcttaatggagagctggatgaggagatctatatggatcagcctgatgggtttgtagttgaaggtcaagaaggcaaggcttcgcagtcaatgaggcagataaatgtgtgtactattgccatggtggagtcccattatgtggagaagatcttgaatcgctttggctacattgatagtaagccttctccaacaccttatgatcctagcttgttgcttcgcaagaacaagagaattgctaggaatcaactagaatactcccaaatcgttggctcgttgatgtacctggctagtgcaactaggcctgatatctcctttgctgtgagcaagttgagccgatttacctctaatccgggagataatcactggtgtgcgcttgagcgagtaatgcgctatctgaaaggtactgtggaattggggcttcactatactgggtatcctgcggtactggagggttatagtgattctaactggatctctgatgtggatgagataaaagccactagtggatatgtcttcacactgggtggtggtgctgtttcatggaggtcttgcaaacagaccattttgacgaggtcaaccatggaagcagagctgacggcactggatactgctactattgaggtctccggaacctctgccttcgacatcctgcaccggctcgtcttcctctccgctcgcgtgcttcgcgacttcgtcgacgctcgcaaccgcgagtag

SEQ ID NO: 15268 - DNA, 4119 bp, Oryza sativa
  Clone ID: TFbOSC900219j.C1.o7.fg
atggcatgccacataggcagaactgtttacatgtatagatctaatgatgcgttcatgctagttttcatctgtaatgttatgatttatttatggaatagattaaatcattatacgtctataatctcaacaatccaaaaaccttattataggcactgtgattttactatggctggttttgccgatgcactgaggccggataaattcaccggtgtgcattttaagagatggcagatcagggtcactctgtggctgacagctatgaaatgcttctgggtgagtactggcaaacctgaaggagttcttactgctgaacagcagaagcaattcgaggaagccactactctctttgtgggatgcattcttagcattcttggcgatcgtctggtcgaggtgtatatgcatatgaccgacgctaaggagttgtgggatgcactgaatactaaattcggtgctactgatgctagcaatgatctgtatatcatggagcagtttcatgactacaaaatggctgacaaccgttctgtagtcgaacaggctcatgagatacaaaccatggctaaggaactcgaactccttaagtgtgtcttacccgacaaatttgtggccgggtgcattattgcaaaactacctccatcttggaggagtttcggtactgcactcaaacacaagagacaggaatactccgttgaggggttgattgcgtctcttgatgttgaggagaaagctcggaaaaaagatgccgcgtctaagggcgatggtgggcagtccagtgccaatgttgtgcacaaggcccagaacaagagcaaggggaaatacaaagctcagcagaccaccaacttcaagaagcagaagaagaacaacaacaatcctaatcaggatgagaggacttgctttgtgtgtggccaagttggtcatctggttaggaagtgtccacagcgcaaggggatgaaggcacctgcagggcagacttctaagtctgctaatgtgaccattggcaacactggagatggaagcgggtatggtaatttacctactgttttttcagttaatcaatctactaattggtgggttgatactggggccaatgtacatgtttgtgctgacatctcattgttttcttcttatcaggtcgcacggggttccaccgtcctaatggggaatgggtcacatgcttctgttcatggtgttggcacggtagatctgaagtttacttcgggaaagatcgtgcagctgaagaacgtgcagcatgtcccttctatcgacaggaatcttgttagtggctcccgtctgactagagacggatttaagttggtttttgagtctaataaagtagtcgtgtctaaacatggatattttattggtaaaggttatgagtgcgaaggcctgttccgcttttccctttctgatttctgcaataagtctgtgaaccatatttgtggcagtgtggatgatgaggctaatgtttggcattcacgtttatgtcatattaattttggcttgatgtctcggctttccagcatgtgtttaattcctaagttttccattgtcaaaggttctaagtgccatagttgtgtgcaatcgaagcaacctcgcaagcctcacaaggctgccgaggagagaaacttggcaccactagaactcctacattcagatctttgtgaaatgaatggggtgttgacgaagggtggaaaacgatatttcatgacattgattgatgatgctactagattttgctatgtgtacttgttgaaaacgaaagacgaggctctagactattttaaaatttataaggcagaagttgaaaatcaacttgacagaaagataaaaaggcttaggtctgatcgtggtggagagtttttctcgaacgagtttgacttattctgtgaggaacatggcatcatacatgagaggacgcctccctattctcccgagtctaatgggattgctgaaaggaagaaccgcacactgactgacttggtgaatgccatgttggacaccgcgggactgcctaaggcatggtggggggaggcattgttgacctcaaatcatgtgttaaacagagttcctaacagaaataaggacaaaacaccatatgagatatggattggtagaaaaccatcactttcttatttgcgcacatgggggtgcttggcgaaagtcaatgtaccaataacgaagaagcgcaaacttggacctaagactgtggactgtgtttttctgggatatgctcatcatagcattgcctatagatttttaatagttaaatccgaggtaccggacatgcatgttggtacaattatggagtctcgtgatgctaccttctttgagagctttttcccaatgaaggatacacatagtggttcgaaccaaccctctgaaataattcccagttcaatcacaccaccagaacaaactgaacatacacatgaacttgtctctgaggaggatgtcagtgaagctcctcgaaggagtaagagacaaaggacggctaagtcttttggtgatgatttcactgtgtacctcgtggatgacactcctaagtcaatttcagaagcatatgcatctcctgatgcagactactggaaggaggctgtccgtagtgaaatggattccattatcgctaacgggacttgggaggtgacagagcgaccctatgggtgtaaacctgtggggtgcaagtgggtgttcaagaagaagcttaggcctgacggtactattgaaaagtacaaggctcggcttgttgctaagggctatactcagaaagaaggcgaagatttctttgacacttactcacctgttgctagattgaccacaattcgtgtgctactttccctagcagcctcacatggtcttctcgttcatcaaatggacgttaagacagcttttcttaatggagagctggatgaggagatctatatagatcaacctgatgggtttgtagttgaaggtcaagaaggcaaagtgtgcaaattgttgaagtctttgtatggtctgaaacaagctcctaagcaatggcatgagaaatttgacaaaacattgatatctgcaggctttgcagtcaatgaggcagataaatgtgtgtactatcgccatggtgggggtgagggagttattttgtgcttgtatgttgacgacatactgatatttgggacaaaccttgaggtgataaatgaggttaaatcattcttgtctcaaaattttgatatgaaagatttgggagtagctgatgttatcttaaacattaagctaattagaggtgagaatgggattacactcttgcagtcccattatgtggagaagatcttgaatcgctttggctacattgatagtaagccttctccaacaccttatgatcctagcttgttgcttcgcaagaacaagagaattgctaggaatcaactggaatactcccaaatcattggctcgttgatgtacctggctagtgcaactaggcctgatatctcctttgctggttatagtgattctaactggatctctgatgtggatgagatcaaagccactagtggatatgttttcacactgggtggtggtgctgtttcatggaagtcttgcaaacagacaattttgacgaggtcaaccatggaagcagagctaacggcactggatactgctactgttgaggcagaatggctgcgtgatctattaatggatctgcctgttgttgaaaaaccggtgccggctatccttatgaactgtgacaatcaaacgacatgtgaaaagacgattgaagtctgtcaggaaattaagaaactccggagttataacgttggattacatccaaacagcgagaaacctggcagatcccttcacgaagggactatcacgaaatgtgatagacaatgcatcgaaggagatgggtttgagacccattggcggcaaaggggaagggtggcggcggcgactggtggtgccaaaggggagggtggcatggttgagggagtagatcaaggaaggatatatcggcagcggccaaggggtgcaatggcgcggcttggtgccagtggcgcttggtggcaacagccgcggggagggggtggcttagtccagatcctacggcctcaaagacggcaacaacggatggcacagggaagccagtag

SEQ ID NO: 15269 - DNA, 2391 bp, Oryza sativa
  Clone ID: TFbOSC900421j.C1.o3.gm
atggagctctcccgtggtcgccacatccaactgggtgttgcggggccccgctcacccgcgggtcccctgcgggcccgccccctgaaccgccgctcacaccctcatgcgaaggcgcgaacgcgagatcgcggccgctggcaccagcgccgacgcaacacctcagccatctcgtccgaggccgccgcgcccgcgggccgtttgcgcgcgcttccgcttccgtcgcgcgacgcccacgcgaggcgccgaggcgcagccgccgagagccgcggagactactccatcccgctcgccggcgtgcaccggcgatcgggagagcaggtctccggaacctctaccttcaacgtcctgcaccgggagaaggcggcaataagggtcactctgtggctgacagctatgaaatgcttctgggtgagtactggcaaacctgaaggagttcttactgctgaacagcagaagcaattcgaggaagccactactctctttgtgggatgcattcttagcgttcttggcgatcgtctggtcgaggtgtatatgcatatgaccgacgctaagaagttgtgggatgcactgaatactaaattcggtgctactgatgctagcaatgatctgtatatcatggagcagttttatgactacaaaatggctgacaaccgttctgtagtcgaacaggctcatgagatacaaaccatggctaaggaactcgaactccttaagtgtgtcttacccgacaaatttgtggccgggtgcattattgtaaaactacctccatcttggagaagtttcggtactgcactcaaacacaagagacaggaatactccgttgaggggttgatagcgtctcttgatgttgaggagaaagctcgggaaaaagatgccgcgtctaagggcgatggtgggcagtccagtgccaatgttgtgcataaggcccagaacaagagcaaggggaaatacaaagctcagcagaccaccaacttcaagaagcagaagaagaacaacaacaatcctaatcaagatgagaggacttgctttgtgtgtggccaagttggtcatctggttaggaagtgcccacagcgcaaggggatgaaggcacctgcagggcagacttctaagtctgctaatgtgaccattggcaacactggagatggaagcgggtatggtaatttacctactgtcgcacggggttccaccgtcctaatggggaatgggtcacatgcttctgttcatggtgttggcacggtagatctgaagtttacttcgggaaagatcgtgcagctaaagaacgtgcagcatgtcccttctatcgacaggaatcttgttagtggctcccgtctgactagagacggatttaagttggtttttgagtctaataaagtagtcgtgtctaaacatggatattttattggtaaaggttatgagtgcggaggcctgttccgtttttccctttctgatttctgcaataagtctgtgaaccatatttgtggcagtgtggatgatgaggctaatgtttggcattcacactactggaaggaggctgtttgtagtgaaatggattccattatcgctaacgggacttgggaggtgacagagcgaccctatgggtgtaaacctgtggggtgcaagtgggtgttcaagaagaagcttaggcctgacgcctcacatggtcttctcgttcatcaaatggacgttaagacagcttttcttaatggagagctggatgaggagatctatgtggatcaacctgatgggtttgtagttgaaggctttgcagtcaatgaggcagataaatgtgtgtactatcgccatggtgggggtgagggagttattttgtgcttgtatgttgacgacatactgatatttgggacaaaccttgaggtgataaatgagtcccattatgtggagaagatcttgaatcgctttggctacattaatagtaagccttctccaacaccttatgatcctagcttgttgcttcgcaagaacaagagaattgctaggaatcaactggaatactcccaaatcattggctcgttgatgtacctggctagtgcaactaggcctgatatctcctttgctgtgagcaagttgagccgatttacctccaatccgggagatgatcactgcgaagatgttgtcctgcagagcattcttgaaagaactcacctttgtgagcttgactgttggtcgcagtctatgaagattttggactactccatcccgctcgccggcgtgcactggcgatcgggagagcaggtctccggaacctctaccttcgacgtcctgcaccgggagaaggcggcaataaggtttttgggaagcgcttcgcgcgactgctccctgttcgttcgcgacggctcgccttcctcttcgctcgcgtgtttcgtgccttcgtag

SEQ ID NO: 15270 - DNA, 957 bp, Oryza sativa
  Clone ID: TFbOSC400972j.C1.o1.fg
atgggaataaaccagcccatgctactctttgaagatcctccccaagcttccaggaacaaaggacgagtccaagcctcactaaagcctgaagactacaccatcaatctgaatcacctaaagcaatattcttcgaatgaaaggtgccacctgactccagcaaaacgaaggataaatgtcacgtgttatagatgtggcgaggaaggacattgtgccttggattgccctaagaaaaagctaggaaatggacaagtaaggaatatacctcgacacccaaaaaggaaaatgagggcaggaataccaccaaaaccgatgccacattcactctatccaaaacctatgtatcagcaatttcgtagacaaggaactacaccacattggtggaagggaaaacggaaaagaaaagcgtcatcacgaataacatatgctgaacttaacctcagtaaaatgggaatagaaatcggtgatttgcctgaagatgttgaagaactacaactatggcaacgaaagagagatggctgttgtttttcttgtggacaatttggacattatgcgataggttgtactcaagacaccaatgaagaacaagaaacactgccctcacagatcggcccggaaaaggatagagttccagacccatccaaagaagtttcgaagattaaggcatgtagtcgttgcggagagataggacactacggtagtaattgcattactcaatgcccctactgtgacgaagaccatccaaacggagaatgcccaacaacgaagatcacgtgcttcctctgcgaaaagacggatcatgtgccccaagattgtcaactaagtccgttgctgaccaagacggcggaagtacaaagagtgtcgcttcgcttcgcccatcgactcatgacatccagaagccacgaagacccgggatttcctacttttgatttgcatgtttgtttgtcgaacaatatttaa

SEQ ID NO: 15271 - DNA, 639 bp, Oryza sativa
  Clone ID: TFbOSC900146j.C1.o24.fg
atgtggaatggttggcctggattggcttgggacgagctgggacccaggtcgggttgccagttcggtctgaatcatcgtagaccttgggttaaggcaggcctgaagcgcctgtgtaataatatggctaacaatgaaaaaggcaataaggtcagaagtcaggacaagggtacctcaagctcccgattgaatgaagcaccagacaccagttgtgtggcagtggtccaacacctgattaaccagaatcgattgcttaaagagctactacagcagcatcagacaccaattctgaacccgagtcagatgcaacctcaagtgcagttggaggcagtccaagcactcacacctcaaccccagcaaccagttgacaagacagaggccagtatctgcgttgtacctttagatgttccagcacagcagccaagaaatcaggtacaagatgaagaacctgagtgtaagaaagttattgtttgttacaactgcagtgaagaaggacattactccagaaattgtccacaaccaaagcgtaacccacgccatcattccggacattatgcacgaagaagacatgaccacaatattagggtcactggagcaaatgcagaacctgtcaagcctagtgctagtcagaagcaatcataa

SEQ ID NO: 15272 - DNA, 975 bp, Oryza sativa
  Clone ID: TFbOSC400299j.C1.o12.fg
atggcggcggcggtgcccaccggctgctacaagtgcggccgtccgggccactggtcccgcgactgcccctccgagcccgccggcgccggcgctgcatccaccgacaaccctaaccctaaccccaaccccaaacccagcgcctcccgcttcgccccttacccgaggccgaggttcgggaagagtgccgcggcggcggcggcggcagaaggggaggacgggagtggcggccaggcgcagggtaagaagaagaagaaggagagggcgacgcggcccaagctcactccggacttgctgctctccgatgacggccttggcttcgtcctccgctacttccccaaggccttcaaaccccgcgcccgccccggccacgaggtagaggatcttggtaatctgatcaagctatacacagactggcactctcgcttgattccttattactcctttgatcagtttgtgcgaaaagtcgagaaagtgggggctagtaaccgtgttaggagatgcgtttctgaactgagggacagggttgccagagggggagatcctaccctactgcatgaaccgccggtcgaagtcatcccagagggcgaaccagatggagccacagctgaagacccaatttttgggactgaagttccggcgaccgaaaaccatggcgtggaccaggtgcaagaagatatagacataccggtcgaaagcaacgatgtggatcccatgcaagaagatctccttaatgaaatctacaataaggaagctgatgagccacaaatcccagctgttggaggaacagccgaggaaaccacaccggccatggctccaaaggaagcgaaaccacaagatgatccaccacgagaagcgcagaaccaaccgggcaagattcagctgaccgaagagcagagggcgcgcatggaggcaaaccggctcagggccttggagagggcagcagcggcgcgtgctcgcgcctcgcagccggcatag

SEQ ID NO: 15273 - DNA, 1068 bp, Oryza sativa
  Clone ID: TFbOSC10205j.C1.o1.fg
atggctgacaataaaaaaggcagtatggtcagaaatcaggacgtgggtacctcaagctcccgagtgaatgaagcaccagacaccagttgtatggcagtggtccaacacctgattaaccagaacaaattgcttatagagatactacagcagcatcagacgccaattctgaacccgagtcagatgcaacctcaagtgcagttggaggcagtccaagcactcacaccacaagtcagcgctccgccagcatcccaacaggcccatcgtgccatgccacttgtggactcaaaagaagcaagaatcatttgttttatctgtgttgaacaagggcactatgcaaggaaccgtcctcagcagaaaagaaaagcaccaatgcgaaccgaagatgaggtccgtaagatgaccattaccggcacagaatggcctccaccaggaatgacaaaacgtcagagaagaaatttcttccgaggtgcaccacagttgacagaacatcttttggctaatggaggtagagtgtctgatagcgaagattcagatcaagtctcctcacgggatgaagatgagaagtctctccaaggtttcaatcagaataaaaaggaacataaggcatgctctcgttgtggagaaatcggtcactttgccagctcatgtgtcaccacttgcgttccttgtgaggaagaccatccacccgacgagtgtccaacgagcaggatcacttgtttcttgtgtgaaggaactaatcatgtaccaaaagattgtcaattcagttttctgctgacgaagaagatggccaaccaacccgccagttacaatggagagaagcatcaaggcaacccaaatcctcgacaagactacagtttcagcctaactccagtgccaagacagaggaatcaaaatgggaaaagaaaatgccaagtctggaaagatatatgttgcttcaattgtcaagaagtgggtcatttcgccgacatgtgcccgaaaccgagaaacatatttgccagcacatcagtccatgcaactcccctcaatcagaagcttgctcctcagcgaattgtcatccatgcgtcctga

SEQ ID NO: 15274 - DNA, 1520 bp, Oryza sativa
  Clone ID: TFbOSC12275j.C1.o1.np
ctcaaaactgagcctccaacctttgccattgccatcgatcctatggaagccagtgattggttgcgcacagtcgagaagaagctagggttgattcagtgcaccgaccaggagcgggttggcttcgcaactcatcagttggttggaccggcttcagagtggtggaatagctacgaagcatcacggccagaaggacataccatcacctggaacgagcttttcagtcctgctactttcatggtagtatccatcatggtgtcccgtcaggtaatgtattacactaagaaaacgagagtttcgctacctgaagcaaggagatttgaccgtcacagagtacctgcacgagttctatcgtttggctcactatgcaccagaagatgtggaaacggatgaagacaaacaagagaagtttctccaggggttaaaagatgagccgcagtgcaactccttctagaggattatgaagattttgagaaacttgtggacaaagccatgcaactcgaaagtgagcataatcggatgacgaactgcaagaggaggattgtcaacatcccagtatttccatgtggtaaccaaagacagcgcactgagccacttcagatcaccggatcttctgttgtgcatcaagagtttccgcgccaagaagatggacacaatgcagacaacaacattagcaatactaatgatgatgatgttaccaccaacaaccatgcttcttgccccaatagtgaccactcgaatcaagcgtgcaatgtcaacatcattcaccaagatgtcgacgatagtatcaatgatggcacccaaaatgacaaccctagcaattgggactctgagaaagactccgatggtgatagcaactatggtaccactgatgccaatgttagcaaggatttccagccaccaattccaactccaagtcagaatgaccgtccccagacggatagctcagcaaagaagacgttgatttgctacaattgcaaagaaccagggcattactcgagggactgcctgcaaccaaggcaaagtcgacctccacattaccgccaatttacacgaagcagacatcccaatcgtattgtggtcactggagcaaacgctgtacccgtttctctgaaaggcagcaggctcaagtaccacatcgtcaccagaagcatccacaactctcggagtgaagagtacttagttgacaaagttgacgccaaagatatgaactatgcgaagttctggaactgaagccccatcttcaggtgccgcaacccagtcgaagtcagctaaaggttcaaccagggacaagtcgggtgaagagaagatcccatctgcaacaggagatcgagccaagcagtccagagtggagaagttttgctaggcaagtttgttatagaagacgcgacgaaagaagtccaccaagaagagaagaccgcccaacctatcttcttgctagcctcctcgaatctcggggacgagattcttgtaaggggggtggatttgtcacgtcctgataaattcatcccaaaattaaaaat

SEQ ID NO: 15275 - DNA, 800 bp, Oryza sativa
  Clone ID: TFbOSC13326j.C1.o2.gm
agtacctgcatgagttctatcgtttggctcactatgcaccagaagatgtggaaacggatgaagacaaacaagagaagtttctccaggggttaaaagatgagcttgcagtgcaactactcctagaggattatgaaaattttgagaaacttgtggacaaagccatgcaacttgaaagtgagcataatcggatgacgaactgcaagagaaggatggtcaacaacccagtatttccaggtggtaaccaaagacagcgcactgagccacttcagatcaccggatcttctgttgtgtatcaagagttcctgccccaagaagatgaacgcaatgcagacaacaacaatagcactactaatgctgataataccaccaaccaccatggttcttgccccattcatgatcacttagatcaagcgtgcaatgtcaacagcattcaccaagatatcgacgatagtatcaatgaaggcacccagaatgacaaccctagcaattttgactctgagaaagactccaatggtgatagcaactatggtaccactgatgccaatgttagcaaggatttccaaccaccaactccaactccaagtcagaatgatcgtcctcagacggatagctcagcaaagaagacgttgatttgctacaattgcaaagaaccagggcattactcgagggactgcctgcaaccaaggcaaaatcgacctccacattaccgccaatttacacgaagcagacattccaatcgtattgtggtcactggagcaaacgccgtacccgtgaggcctcgtgttaatcagaacccatag

SEQ ID NO: 15276 - DNA, 1504 bp, Oryza sativa
  Clone ID: TFbOSC14131j.C1.o1.np
gtcatatggcagagggttggtgccctgctgctaggggctcagttccgcctgcctgtcccgggtatcccggccgtaggtgggattgggtcggtactcttgtctaaggctaggatgggttggaaactatgtcacgtcttccgtccgtataccgtggtgatggataatactggtaacaaaggctatgggaatgatggatccgatgactcaagaacccaagccaatgggaatgagagaagcatcaacgaaacctcaccagagctaatccaagttgtggttaaccaaaccaacatgttggcaacagcctttcaactattacagaattggaacaacccagcaggggcaaccaacgttcaagtgcctacagtccagcaacagtgcaagttatcagaatttctcaaaactgagcctccaacctttgccattgccgtcgatcctatggaagccagtgattggttgcgcacaatcgagaagaagctagggttgattcagtgcaccgaccaggagcgggttggcttcgcaactcatcagctggttggaccggcttcagagtggtgggatagctacgaggcatcacggccagaaggacataccatcacctggaacgagttttcctctgtattcaggagatcacatgttcccgcgggaatgatcacactaagaaaacgagagtttcgctacctgaagcaaggggatttgaccgtcacagagtacctgcacgagttctatcgtttggctcactatgcaccagaagatgtggaaacggatgaagacaaacaagagaagtttctccaggggttaaaagatgaacttgcagtgcaactactcctagaggattatgaagattttgagaaacttgtggacaaagccatgcaactcgagagtgagcataatcgaatgacgaactgcaagagaaggattgtcaacatcccagtaattccatgtggtaaccaaaggcagcgcactgagccacttcagatcaccgggtcttctgttgtgcatcaagagttcctgctccaagaagacggacgcgatgcagacaacaacactagcaatactaatgatgatgataccaccaacaaccatggttcttgccccattagtgaccactcgaataaagcgtgcaatgtcagtagcattcaccaagatgtcaatgatagtatcaatgttggaacccagaatgacaaccttagcaattttgacactgagaaagactccaatggtgatagcaactatggtaccactgatgccaatgttagcaaggattggcaaccaccgattccaactccaagtcagaatgatcgccctcagacggatagctcagcaaagaagaacgttgatttgctacaattgcaaagaaccagggcattactcgagggactgcctgcaaccaaggcaaaatcgacctccacattaccggcaatttacaagaatcagacatcccaatcctattgggggcactggagcaaacaccgtacccgtgaggccttgtggtaatcaaaaacca

SEQ ID NO: 15277 - DNA, 1341 bp, Oryza sativa
  Clone ID: TFbOSC15236j.C1.o1.fg
atggataacactggtaacaaaggctatgggaatgatggatctgatgactcaagaacccaagccaatgggaatgagaaaagcatcaacgaaacctcaccagagctaatccaaattgtggttaaccaaaccaacatgttggcaacagcatttcaactattacaaaatcggaagaacccagcaggggcaaccaacgttcaagtacctacagtccagcgacagtgcaagttatcagaattcctcaaaactgatcctccaacctttgccattgccgtcgatcctatggaagcttgtgattggttgcgcacagtcgagaagaagctagggttgattcagtgcacagaccaggagcgggttgtcttcgcaactcatcagttggttcgaccagcttcagaatggtgggatagctatgaagcatcacggccagaaggacataccatcacctgggatgagttttcagccgtgttcaagagatcacatgttcccgtaggaatgatcacacagagaaaacgagagttccgctacctgaagcaagaagatttgaccgtcacagagtacctgcacgagttctattgtttggctcactatgcaccagaagatgtggaaacggatgaagacaaacaagagaagtttctccacgggttaaaggatgagatcgcagtgcaactactactagaggaatatgaagattttgagaaacttgtggacaaagccatacaactcgaaagtgagcataatcggatgaagaactgcaagagaaggattgttagcatcccagtatttccatgtggtaaccaaagacagcgcaccgagccacttcagatcaccggatcttctgttgcgcatcaagagtttctgccccaagaagatggacacaatgcagacaacaacattagcaatactaatgatgatgataccaccaacaaccatgcttcttgccccattagtgaccactcgaatcaagcgtgcaatgtcaacatcattcaccaaggtgtcgacgatagtatcaatgatggcacccagaatgacaaccctagcaattgtgactctgagaaagactccaatggtgatagcaactatggtaccactgatgccaatgttagcaaggatttccaaccaccaattccaactccaagtcagaatgatcgtccccagacggatagctcagcaaagaagacgttgatttgctataattgcaaagaacccgggcattactcaagggactgcctgcaaccaaggcaaagtcgacctccacattaccgccaatttacacgaagcagacatcccaatcgtattgtggtcactggagcaaacgccgtacccgtgaggcctcgtgttaattag

SEQ ID NO: 15278 - DNA, 2380 bp, Oryza sativa
  Clone ID: TFbOSC15753j.C1.o3.np
atggataatactggtaacaaaggctatgggaatgatggatccgatgactcaagaacccaagccaatgggaatgagagaagcatcaacgaaacctcaccagagctaatccaagttgtggttaaccaaaccaacatgttggcaacagcctttcaactattacagaattggaacaacccagcaggggcaaccaacgttcaagtgcctacagtccagcaacagtgcaagttatcagaatttctcaaaactgagcctccaacctttgccattgccgtcgatcctatggaagccagtgattggttgcgcacaatcgagaagaagctagggttgattcagtgcaccgaccaggagcgggttggcttcgcaactcatcagctggttggaccggcttcagagtggtgggatagctacgaggcatcacggccagaaggacataccatcacctggaacgagttttcctctgtattcaggagatcacatgttcccgcgggaatgatcacactaagaaaacgagagtttcgctacctgaagcaaggggatttgaccgtcacagagtacctgcacgagttctatcgtttggctcactatgcaccagaagatgtggaaacggatgaagacaaacaagagaagtttctccaggggttaaaagatgaacttgcagtgcaactactcctagaggattatgaagattttgagaaacttgtggacaaagccatgcaactcgaaagtgagcataatcgaatgacgaactgcaagagaaggattgtcaacatcccagtaattccatgtggtaaccaaaggcagcgcactgagccacttcagatcaccgggtcttctgttgtgcatcaagagttcctgctccaagaagacggacgcgatgcagacaacaacactagcaatactaatgatgatgataccaccaacaaccatggttcttgccccattagtgaccactcgaataaagcgtgcaatgtcagtagcattcaccaagatgtcaatgatagtatcaatgttggaacccagaatgacaaccttagcaattttgacactgagaaagactccaatggtgatagcaactatggtaccactgatgccaatgttagcaaggatttccaaccaccgattccaactccaagtcagaatgatcgtcctcagacggatagctcagcaaagaagacgttgatttgctacaattgcaaagaaccagggcattactcgagggactgcctgcaaccaaggcaaaatcgacctccacattaccgccaatttacaagaatcagacatcccaatcgtattgtggtcactggagcaaacaccgtacccgtttcactgaaaggcagcaagccaaaggacctcatcgtccccagaagcgtccgcaatccacgacatgaagtgggtaacttgtatgaggttgactccaaagatatgaactatgcaaagttctggaactgaatccccatcttcaagtgccgcaacccagtcgaagtcagctaaaggttcaaccagggataagtcaggtgaagagaagattccatctgcaccccgcgcgcgcgcgccgctgacaggcgggcccgcccgccactctcgctgacgggtgggacccacctgtcatctccctccccgcgccgcgcccgccgccgcccgtgccctagcgccgccgccgccgccgaatccgccgcttcccgccttccccgcgcgccataaagaggggcgaattactccccgcgtttccctctcccgattccccctcttttccctctctctctccctcggattcgtccgatttgaatcccgcaatcatcgccggcgtcttcaatggcggccgagatctccgcgcgcgattccttcctccccggccgccttctctcccttccgacgctataaaatcgtccctcgtgcttcgctcttccgtttccgccgctcgccgctcgctctcgccgtcggtttcgtgcccgcgccgtgctcctctctctccgccgtcgccgccgagctccgtttcgccgccgtcgtcgctccggtcctcctcccgactcggcgccacctccatcggcttcgccgagtggttgccgaccccgtccgccgctccgcttcgcccgccgaccgccggagcaccgtcgtcatcgtcatcccgaaccgcgccgccgctttcctccgctccggccgccgttctcgtcgtcgtcgttgtcccggggtgagccgaagaccgccgttcgctttcccccttccctccgctctctcgggcgccgctccaccgcgccgatggtcgccggcggtgaccatcggggcgcgggcgcgccgctcccgtcggccgtgccggcgagtgggattctctccattgttgttattggggttgttgggaccattcccgttgctgcgagtattc

SEQ ID NO: 15279 - DNA, 2425 bp, Oryza sativa
  Clone ID: TFbOSC16364j.C1.o1.np
atggataacactggtaacaaaggctatgggaatgatggatccgatgactcaagaacccaagccaatgggaatgagagaagcatcaacgaaacctcaccagagctaatccaagttgtggttaaccaaaccaacatgttggcaacagcctttcaactattacagaattggaacaacccagcaggggcaaccaacgttcaagtacctacagtccagcaacagtgcaagttatcagaatttctcaaaactgggcctccaacctttgccatggccgtcgatcctatggaagccagtgattggttgcgcacaatcgagaagaagctagggttgattcagtgcaccgaccaggagcgggttggcttcgcaactcatcagttggttggaccggcttcagagtggtgggatagctacgaagcatcacggccagaaggacataccatcacctggaacgagttttcatctgtattcaagagatcacatgttcccgcaggaatgatcacactaagaaaacgagagtttcgctacctgaagcaaggagatttgaccgtcacagagtacctgcacgagttctatcgtttggctcactatgcaccagaagatgtggaaacggatgaagacaaacaagagaagtttctccaggggttaaaagatgagcttgcagtgcaactacttctagaggattatgaaaattttgagaaacttgtggacaaagccatgcaactcgaaagtgagcataatcggatgacgaactgcaagagaaggattgtcaacatcccagtatttccatgtggaaaccaaggacagcgcactgagccacttcagatcaccggatcttctgttgcgcatcaagagtttccgccccaagaagatggacacaatgcagacaacaacattagcaatactaatgatgatgatgttaccaccaacaaccatgcttcttgccccaatagtgaccactcgaatcaagcgtgcaatgtcaacatcattcaccaagatgtcgacgatagtatcaatgatggcacccaaaatgacaaccctagtaattgggactctgggaaagactccgatggtgatagcaactatggtaccactgatgccaatgttagcaaggagttccagccaccaattccaactccaagtcagaatgactgtccccagacggatagctcagcaaagaagacgttgatttgctacaattgcaaagaaccagggcattactcgagggactgcctgcaaccaaggcaaagtcgacctccacattaccgccaatttacacgaagcagacatcccaatcgtattgtggtcactggagcaaacgccgtacccgtttcactgaaaggcagcaagccaaaggacctcatcgtccccagaagcgtccgcaatccacattaaagaataccacctgttagaggttgacgccaaagatatgaattatgagaagttctggaactgaagtcccatcttcaagtgccacaatccagtcgaagtcagctagaggtgcaaccagggaaaagtcaggtgaagagaagattccatctgcaacacccgcgcgcgcgccgctgacgggcgggcccgcccgccaccctcgctgacgggtggggcccacccgtcatcgcctacctcgcgccgcgcccgccgctcgcccgtgccctagcgccgccgccgccgccgaatccgccgcatcccgccgtccccgcgcgccataaagagggggaaatcactccccgtgattccctctcccttttcccccgtttttccctctctctctctccctcggattcgtttggaatctctcccgaaatcctcgccggcgtcattgatggagccgagatcgccgcgccggtttccctctcatccggccgccctctctccctcccgacgctatataatcgttccccgtgcctccctcctccgtttccgccgctcgccgctctctctctccgtcggaatcgtgcccgcgccgtcgtcctctctctccgccgtcgccgacgagctccggttcgccgccgccgtcgctccggacttcctcccctctcggcgtcgcctccttcggcttcgccgcgtcctcgtcgaccccgtccgctcctccgtttcgcccgccgaccgccggaacatcgccgtcctcgtcgatccgaaccgcgccgccgccttcctccgctccggtcgtcgtttccgccgtcctcgtcgtcccggggtgagccgaggaccgccgcttcgcttccctcttccctcccctctctcggccgccgctccgccgcgccgttggtcgccggcggcgaccatcggggcgcgggtgcgccgccttccgtcggccgtgccggcgaggccgccttcgggcgcgccccgcggctgccaggtgggcccggccgtcagccgcccgcgcccgcgggtgcggctgacgcgtgggacccacggcgccggccggcgt

SEQ ID NO: 15280 - DNA, 1350 bp, Oryza sativa
  Clone ID: TFbOSC23023j.C1.o1.fg
atggataacactggtaacaaaggctatgggaatgatggatccgatgactcaagaacccaagccaatgggaatgagaaaagcatcaacgaaacctcaccagagctaatccaaatagtggttaaccaaaccaacatgttggcaacagcctttcaactattacagaattggaacaacccagcaggggcaaccaacgttcaagtgcctacagtccagcaacagtgcaagttatcagaatttctcaaaactgaacctccaacctttgccattgccgtcgatcctatggaagccagtgattggttgcgcacaatcgagaagaagctagggttgattcagtgcaccgaccaggagcgggttggcttcgcaactcatcagctggttggaccggcttcagagtggtgggatcgctacgaagcatcacggccagaaggacataccattacctggaacgagttttcatctgtattcaggagatcacatgttcccgcaggaacgatcacactaagaaaacgagagtttcgctacctgaagcaaggagatttgaccgtcacagagtacctgcatgagttctatcgtttggctcactatgcaccagaagatgtggaaacggatgaagacaaacaagagaagtttctccaggggttaaaagatgagcttgcagtgcaactactcctagaggattatgaaaattttgagaaacttgtggacaaagccatgcaacttgaaagtgagcataatcggatgacgaactgcaagagaaggatggtcaacaacccagtatttccaggtggtaaccaaagacagcgcactgagccacttcagatcaccggatcttctgttgtgtatcaagagttcctgccccaagaagatgaacgcaatgcagacaacaacaatagcactactaatgctgataataccaccaaccaccatggttcttgccccattcatgatcacttagatcaagcgtgcaatgtcaacagcattcaccaagatatcgacgatagtatcaatgaaggcacccagaatgacaaccctagcaattttgactctgagaaagactccaatggtgatagcaactatggtaccactgatgccaatgttagcaaggatttccaaccaccaactccaactccaagtcagaatgatcgtcctcagacggatagctcagcaaagaagacgttgatttgctacaattgcaaagaaccagggcattactcgagggactgcctgcaaccaaggcaaaatcgacctccacattaccgccaatttacacgaagcagacattccaatcgtattgtggtcactggagcaaacgccgtacccgtgaggcctcgtgttaatcagaacccatag

SEQ ID NO: 15281 - DNA, 1563 bp, Oryza sativa
  Clone ID: TFbOSC28035j.C1.o1.fg
atggacatctctaggacaaatgaaggctacacgagctgcggcccggtagtcgagatgtcatggcacagggctggtgtcctgctgctgggggctcattcctgcctacctgtcccggaggttccggccgtaggtggggttgggtcggtactcttgtttatggctaggatgggttgggaactatgtcacgtcttccgtccgtataccgtggtgatggataacactggtaacaaaggctatgggaatgatggatccgatgactcaagaacccaagccagtgggaatgagaaaagcatcaacgaaacctcaccagagctaatccaaattgtggttaaccaaaccaacatgttggcaacagcctttcaactattacagaattggaacaacccagcaggggcaaccaacgttcaagtacccacagtccagcaacagtgcaagttatcagaatttctcaaaactgagcctccaacctttgccattgccgtcgatcctatggaagccagtgattggttgcgcacagtcgagaagaagctagggttgattcagtgcaccgaccaggagcgggttggcttcgcaactcatcagttggttggaccggcttcagagtggtgggatagctatgaagcatcacggccagaaggacataccatcacctggaacgagttttcatctgtattcaagagatcacatgttcccgcaggaatgatcacactaagaaaacgagagtttcgctacctgaagcaaggagatttgaccgtcacagagtacctgcacgagttctatcgtttggctcactatgcaccagaagatgtagaaacggatgaagacaaacaagagcagtttctccaggggttaaaagatgagcttgcagtgcaactactcctagaggattatgaagattttgagaaacttgtggacaaagccatgcaacttgaaagtgagcataatcggatgacgaactgcaagagaaggatggtcaacattccagtatttccatgtggtaaccaaggacagcgcactgagccacttcagatcaccggatcttctgttgcgcatcaagagtttccgccccaagaagatggacacaatgcagacaacaacattagcaatactaatgatgatgatgttaccaccaacaaccatgcttcttgccccaatagtgaccactcgaatcaagcgtgcaatgtcaacatcattcaccaagatgtcgacgatagtatcaatgatggcacccaaaatgacaaccctagcaattgggactctgagaaagactccgatggtgatagcaactatggtaccactgatgccaatgttagcaaggatttccagccaccaattccaactccaagtcagaatgaccgtccccagacggatagctcagcaaagaagacgttgatttgctacaattgcaaagaaccagggcattactcgagggactgcctgcaaccaaggcaaagtcgacctccacattaccgccaatttacacgaagcagacatcccaatcgtattgtggtcactggagcaaacgccgtacccgtgaggcctcgtgttaatcagaacccatag

SEQ ID NO: 15282 - DNA, 357 bp, Oryza sativa
  Clone ID: TFbOSC28035j.C1.o3.gm
atggaattggacgggagaacagcggacgaggtggacctcgggatggcggacgcggcggcgccgatggcggggtgcggcgggagctcgggagcggacggcgaaagagggaaaaaggtggagagaggcgcggtggtcggttatatagaggtggggaggccggacgtggccgggagcggcggttccgcggcgacgacgtggagagggcgtggggcggcgacgtggggacgtgtgggcgcggagtggggcgcggatgcggaggaagcggcggcgtgggcggcggtttcggcggcggatggtggcggctgccggaggttagggacaaccgacagagcaagggaggggtacttcagggcgtga

SEQ ID NO: 15283 - DNA, 803 bp, Oryza sativa
  Clone ID: TFbOSC32072j.C1.o1.fg
agtacctgcatgagttctatcgtttggctcactatgcaccagaagatgtggaaacggatgaagacaaacaagagaagtttctccaggggttaaaagatgagcttgcagtgcaattactcctagaggattatgaagattttgagaaacttgtggacaaagccatgcaactcaaaagtgagcataatcggatgacgaactgcaagagaaggattgtcaacatcccagtatttccaggtggtagccaaagacagcgcactgagccacttcagatcaccggatcttctgttgtgcatcaagagttcctgccccaagaagatgaacgcaatgcagacaacaacactagcaatactaatgatgatgataccaccaacaaccatggttcatgccccattagtgaccactcgaataaagcgtgcaatgtcagtagcattcaccaagatgtcaacgatagtatcaatgttggaacccagaatgacaaccttagcaattttgacactgagaaagactccaatggtgatagcaactatggtaccactgatgccaatgttagcaaggatttccaaccaccgattccaactccaagtcagaatgatcgtcctcagacggatagctcagcaaagaagacgttgatttgctacaattgcaaagaaccagggcattactcgagggactgcctgcaaccaaggcaaaatcgacctccacattaccgccaatttacacgaagcagacatcccaatcgtattgtggtcactggagcaaatgcagtacctgttaagcctagcgctagtcagaagcaaccataa

SEQ ID NO: 15284 - DNA, 3222 bp, Oryza sativa
  Clone ID: TFbOSC400220j.C1.o47.fg
atggcacggggctccgctccgcttgacggtagcgtgctgccgccttcccgcatcgtgagcgagagacaggccgggctgccgcgccgcttcatgccggaatctgccaccggccgggagatagtctcgctgggcgagggatgcccggcgccacactacccggggcggtccgtcttcttcctcccttttgctatggcatggctggttccgccattttcttttttcttcatggatgttctggagttttacgatctccagatggcgcacctcacccccaacgcggtaatgacattggccatcttcgcgcacctgtgcgagatgttcatcggggtacagccggtgtcgccgccgtcggtggttggtggttgctacttccagctgcgggggccggtgctgaaccgctacattccctgcgtcctccgcaagaagtgggatgattggaagagcgactggttctacacccccctcgccgacgaagcgcgcctccgacttccgagccagcctctagcgcaggcctacagctggcgggtgccggtagatctgggagatggctatgacgccgtcctcgaccgcctggcgggcctgcgatcccaggggctcacaggggccatggagtacaccgggtccgaggactgtatgaggacccaccagggggtcagatgggactgggctcctgaggacttcaagatagtggtccaacgggtgctgaatctcagttccatggagacatccctcattcctcaaggagtcctccccctctgcagcgatccagaccgcgcctccatcctgaccatcatgcaggcggtcggggcgtcggaggagcgggctcctcgaggccacgatggagcgggcgggagccgcaggggggaacaatctaccccgggagggggtcgtgcttctgggccccgcgacgggggcccggggagcggccgccctgccgacacccgggggaagaggaagcaggaaggaacccctcccccatctcctccccgagggggcggggcggcgcgtgccagcagcaggcgcccggaggtggccacgccgacgtcgcagcccgagggggagcggaagaagaaacggctccgcaagatgggggggacagaaccatcccggggaaacctcatttcccctccaaggtggtcgtttaaccgaccccctcgcagcgagatcccgtcgcgtccctcccgccattccaagtccggccagtctaaggccgaggacccggcgaccacagaggctcggaggcgggaatctgaccggcgagaagccgcggatcgcctacgggaagccgaggaggccgcccagcagctggttgacaaagcaattcgacttgaagacaagaagaacaggatggataaccgtaaaaggaaaataattgtattccaggaggcacaggatagtagccagaggcagcgtatcaagccactccaaattggtgaatctttttctgcaggtcaagaacagtcacaacagttgggcatgaatggtgagatcaactcagagactaatgcaagcaatgaagacaatgatgagcaagctactcaatcagtgtcatttcagcaggatcagtctcgagaagataacagtaatggaagggagcagcgggtgtgtttcaattgttataagccaggtcactttgtaagagagtgtccgaagccgaagcatcagcagccgcaagtcaacaacattgtcgtcacaggagccaatgcagtgccagttgcgtcttcaagagttgcgtcttcaagtgttacagctcagctaccagtttcaaagcagcatgaatttccgggcgtgacagcgacgacttccgaggcagctcgcgacgaggccgcgggcgcatcgcttgggcccactccctcgggcgacgctcaggacaagccaggtccgggggacatccctgagtccggcacgtccatcggtgggccgagccgcgcggcatcctcaccgaggcggctcttccccacgccttccgttgctccactgagcgcagaaccccttctgcaggccttggccgtcgcaaacaccacggtgttggacgggttaagtgcccaggtggaggccctgcaagcagagcgggcggagcttgacgccgcatgggcgcgtgtcgaagaggggcgacgctcggtggaggccatggtggaggtgggccgcaaggcacaccgccggcacgtctcagagctcgaagcccgtcggaaggtgctgggggagatcgccaaggaggtggaggaggagcggggggctgccctcatcgccaccaccgtgatgaacgaggcgcaggacaccctccgccttcaatacaggagctgggaggcggagctagggaaaaagctcgacgccgcccggatggtccttgacgctgccgctgcccgagaacggcgggcggcggagaccgaggtggcatcccggcggcgcgaagaagcccttgaggcccgtgccatggcgctggaagagcgtgcctgcgccgtggagagggacttggcggatcgcgaggccgccgttgctattcgggaggtcacactggcggtgcacgaagccgcctgtgccgaagaagagtccgcgctccgcctccgcgaggacgcgctcaccgagcgggagcgagctctcgaggaagccgaggccgcggcgcaacggctggcggacagcctgtccctccgcgaggctgcgcaagaggaacaagcgcgtcgcaatctggaaagtgcccgcgccgagagggccgcactgaaccagcgggccgctgaactcgaggcgcaggcaagggagctggatgcaagggcgcgtagcggcggggcggccacgggcgacagcgacttagccgcccgcctcgcagctgccgaacacaccatcgcggatctgcagggcgcgctggattcgtccaccggggaggtcgaggcccttcgcctagcaggcgagatagggcccagcatgcttcgcgacgccgtgtcccgtttagaccgcgccgggcggcaggcgggtctctggggcgggcggactgtgaagtacgccgccaaccagggaggcctcgcccagcgcctctcggagatggccgggactctccagcggctccccgaggagctcgaggggacgattaagtcatcctcgagggacctcgcccgaggagcggtggagctcgtactggcgagttaccaggccagggaccccgacttctccccatggacggcgctggacgagttccctcccgggaccgaggatggcgcgcgcgcgtag

SEQ ID NO: 15285 - DNA, 1509 bp, Oryza sativa
  Clone ID: TFbOSC401338j.C1.o7.fg
atgtcatggcagagggttggtgccctgctgctaggggctcagtcttgcctgcctgtcccgggggttccggccgtaggcgggattgggtcggtactcttgtctatggctaggatgggttggaaactatgtcacgtcttccgtctgtataccgtggtgatgaataacactggtaacaaaggctatgggaatgatggatccgatgactcaagaacccaagccaatgggaatgagagaagcatcaacgaaacctcaccagagctaatccaagttgtggttaaccaaaccaacatgttggcaacagcctttcaactattacagaattggaacaacccagcaagggcaaccaacgttcaagtgcctacagtccagcaacagtgcaagttatcagaatttctcaaaactgggcctccaacctttgccatggccgtcgatcctatggaagccagtgattggttgcgcacagtcgagaagaagctagggttgattcagtgcaccgaccaggagcgggttggcttcgcaactcatcagttggttggaccggcttcagagtggtgggatagctacgaagcatcacggccagaaggacataccatcacctggaacgagttttcatctgtattcaagagatcacatgttcccgcaggaatgatcacactaagaaaacgagagtttcgctacctgaagcaaggagatttgaccgtcacagagtacctgcatgagttctatcgtttggctcactatgcaccagaagatgtggaaacggatgaagacaaacaagagaagtttctccaggggttaaaagatgagcttgcagtgcaattactcctagaggattatgaagattttgagaaacttgtggacaaagccatgcaactcaaaagtgagcataatcggatgacgaactgcaagagaaggattgtcaacatcccagtatttccaggtggtagccaaagacagcgcactgagccacttcagatcaccggatcttctgttgtgcatcaagagttcctgccccaagaagatgaacgcaatgcagacaacaacactagcaatactaatgatgatgataccaccaacaaccatggttcatgccccattagtgaccactcgaataaagcgtgcaatgtcagtagcattcaccaagatgtcaacgatagtatcaatgttggaacccagaatgacaaccttagcaattttgacactgagaaagactccaatggtgatagcaactatggtaccactgatgccaatgttagcaaggatttccaaccaccgattccaactccaagtcagaatgatcgtcctcagacggatagctcagcaaagaagacgttgatttgctacaattgcaaagaaccagggcattactcgagggactgcctgcaaccaaggcaaaatcgacctccacattaccgccaatttacacgaagcagacatcccaatcgtattgtggtcactggagcaaatgcagtacctgttaagcctagcgctagtcagaagcaaccataa

SEQ ID NO: 15286 - DNA, 3210 bp, Oryza sativa
  Clone ID: TFbOSC401835j.C1.o9.fg
atggctggttttgccgatgcactgaggccggataaatttaccggtgtgtactttaagagatggcagatcagggtcactctgtggctgacagctatgaaatgcttctgggtgagtactggcaagcctatgggcgttcttaatgttgatcagcagaaagaattcgatgaggccactactctctttgtgggatgcattcttagcatgcttggcgatcgtctggtcgaggtgtatatgcatatgaccgacgctaaggagttgtggaatgcactgaatactaaattcggtgctactgatgctagcaatgatctgtatatcatggagcagtttcatgactacaagatggctgacaaccgttctgtagtcgaacaggctcatgagatacagaccatggctaaggaactcgaactccttaagtgtgtcttacccgacaaatttgtggccgggtgcattattgcgaaactacctccatcttggagaggtttcggtactgcactcaaacacaagacacaggaatactccgttgaggggttgatagcgtctcttgatgttaaggagaaatctcgggaaaaagatgccgcgtctaagggagatggtgggcagtccactgccaatgttgtgcacaaagcccagaacaagagcaaggggaaatacaaagctcagcaggccaccaacttcaagaagaagaacaacagcaacaatcctaatcaggatgagatgacttgctttgtgtgtggtcaacctggccatctggtcaggaagtgtccacaacgcaaggggatgaaggcacctgcagggcagacctctaagtctgctaatgtgaccattggcaacactggagatggaagcgggtatggggccaatgtacatgtttgtgctgacatatcattgttttcttcttatcaggtcgcgcggggttccaccgtcctattggggaatgggttacatgcttctgttcatggtgttggcacggtagatctgaagtttacttcgggaaagatcgtgcagctgaagaacgtgcagcatgtcccttctatcgacaggaatcttgttagtggctcccgtctgaccagagacggatttaagttggtttttgagtctaataaagtagtcgtgtctaaacatggatattttattggtaaagattatgagtgcagaggcctgttccgcttttccctttctgatttctacaataagtctatgaaccatatttgtggcagtgtgggtgatgaggctaatgctgctgaggagagaaacttggcacctctagaactcctacactcagatctctgtgaaatgaatagggtgttgacgaagggtggaaaacgatatttcatgatgttgattgatgatgctactagattttgctatgtgtacttgttgaaaacgaaagacgaggctctagactattttaaaatttataaggcagaagttgaaaatcaacttgacagaaagataaaaaggcttaggtctgatcgtggtggagagtttttcttgaacgagtttgacttattctgtgaggaacatggcatcatacatgagaggacgcctccctattctcccgagtctaatgggattgctgaaaggaagaaccgcacactgactgacttggtgaatgccatgttggacaccgcgggactgcctaaggcatggtggggggaggcattgttgacctcaaatcatgtgttaaacagagttcctaacagaaataaggacaaaacaccatatgagatatggattgggagaaaaccatcactttcttacttgcgcacatgggggtgcttggtgaaagtcaatgtaccaataacgaagaagcgcaaacttggacctaagactgtggactgtgtctttctgggatatgctcaccacagtattgcctatagatttttaatagttaaatctgagtcaatttcagaagcatacgcatctcctgatgcagactactggaaggaggctgtccgtagtgaaatggattccattatcgctaacgggacttgtgaggtgatagagcgactctataggtgtaaacctgtggggtgcaagtgggtgttcaagaagaagctcaggcctgacggtactattgaaaagtacaaggctcggcttgttgctaagggctatactcagaaagaaggcgaagatttctttgacacttactcacctgttgctagattgaccacaattcgtgtgctactttccctagtagcctcacatggtcttctcgttcatcaaatggacgttaagacagcttttcttaatggagagctagatgaggagatctatatggatcaacctgatgggtttgtagttgaagatcaagaaggcaaagtgtgcaaattgttgaagtctttgtatggtctgaaacaagctcctaagcaatggcatgagaaatttgacaaaacattaacatctgcaggctttgcagtcaatgaggcagataaatgtgtgtactatcgccatggtgggggtgagggagttattatgtgcttgtatgttgatgacatactgatatttgggacaaaccttgaggtgataaatgaggttaaatcattcttgtctcaaaattttgatatgaaggatttgggagtagctgatgttatcttaaacattaagctaattagtggtgagaacgggattacactcttgcagtcccattatgtggagaagatcttgaatcactttggctacattgatagtactatggaactggggcttcactattctgggtatcctgcggtactggagggatatagtgattctaactggatctctgatgtggatgagatcaaagccactagtggatatgtcttcacactgggtggtggtgctgtttcgtggaggtcttgcaaacagactattttgacgaggtcaaccatggaagcagagctgacggcactggatactgctactgttgaggcagaatggctgcatgatctattaatggatctacctattgttgaaaaaccagtgccagctatccttatgaactgtgacaatcaaacggtaattgtcaaagtgaatagttctaaggataatatgaaatcgtctagacatgtgaaaagacgattgaagtctgtcaggaaattaagaaactctggagttataacattggattacatccaaacagctagaaacctggcagatcccttcatgaagggactatcacgaaatgtgatagacaatgcatcgaaggagatgggtttgagactcgtgtga

SEQ ID NO: 15287 - DNA, 1584 bp, Oryza sativa
  Clone ID: TFbOSC401912j.C1.o1.fg
atggatgaagtcgggggtcgatggacattctccagggcaaatgaaggctacacgagctgcggcccggtagtcgagatgtcatggcacagggttggtgccctgctgctaggggctcagtcctgcctgcctgtcccggaggttccggccgtaggtgggattgggtcggtactcttgtgtatggctaggatgggttggaaactatgtcacgtcttccgtctgtataccgtggtgatggataacactggtaacaaaggctatgggaatgatggatccgatgactcaagaacccaagccaatgggaatgagagaagcatcaacgaaacctcaccagagctaatccaagttgtggttaaccaaaccaacatgttggcaacagcctttcaactattacagaattggaacaacccagcaggggcaaccaacgttcaagtacctacagtccagcaacagtgcaagttatcagaatttctcaaaactgggcctccaacctttgccatggccgtcgatcctatggaagccagtgattggttgcgcacaatcgagaagaagctagggttgattcagtgcaccgaccaggagcgggttggcttcgcaactcatcagttggttggaccggcttcagagtggtgggatagctacgaagcatcacggccagaaggacataccatcacctggaacgagttttcatctgtattcaagagatcacatgttcccgcaggaatgatcacactaagaaaacgagagtttcgctacctgaagcaaggagatttgaccgtcacagagtacctgcacgagttctatcgtttggctcactatgcaccagaagatgtggaaacggatgaagacaaacaagagaagtttctccaggggttaaaagatgagcttgcagtgcaactacttctagaggattatgaaaattttgagaaacttgtggacaaagccatgcaactcgaaagtgagcataatcggatgacgaactgcaagagaaggattgtcaacatcccagtatttccatgtggaaaccaaggacagcgcactgagccacttcagatcaccggatcttctgttgcgcatcaagagtttccgccccaagaagatggacacaatgcagacaacaacattagcaatactaatgatgatgatgttaccaccaacaaccatgcttcttgccccaatagtgaccactcgaatcaagcgtgcaatgtcaacatcattcaccaagatgtcgacgatagtatcaatgatggcacccaaaatgacaaccctagtaattgggactctgggaaagactccgatggtgatagcaactatggtaccactgatgccaatgttagcaaggagttccagccaccaattccaactccaagtcagaatgactgtccccagacggatagctcagcaaagaagacgttgatttgctacaattgcaaagaaccagggcattactcgagggactgcctgcaaccaaggcaaagtcgacctccacattaccgccaatttacacgaagcagacatcccaatcgtattgtggtcactggagcaaacgccgtacccgtgaggcctcgtgttaatcagaacccatag

SEQ ID NO: 15288 - DNA, 1935 bp, Oryza sativa
  Clone ID: TFbOSC401952j.C1.o2.fg
atgtacacctctgatcagagtaaatctattcgaatagccgagccctcggatatgggcaagcctagcaatgtacccaagtcagtgtttcaattcttaaaatttgctcaacaactaaaatgtggaatggttggcctgggttggcttgggacgagctgggacccagggtcgggttgccagttcggtctgaatcatcgtaggccttgggttaaggcaggcctgaagcgcctttgtaataatatggataatactggtaacaaaggctatgggaatgatggatccgatgactcaagaacccaagccaatgggaatgagagaagcaccaacgaaacctcaccagagctaatccaagttgtggttaaccaaaccaacatgttggcaacagcctttcaactattacagaattggagcagcccagcaggggcaaccaacgttcaagtgcctacagtccagcaacagtgcaagttatcagaatttctcaaaactgagcctccaatctttgccattgccgtcgatcctatggaagccagtgattggttgcgcacaatcgagaagaagctagggttgattcagtgcaccgaccaggagcgggttggcttcgcaactcatcagctggttggaccggcttcagagtggtgggatagctacgaggcatcacggccagaaggacataccatcacctggaacgagttttcctctgtattcaggagatcacatgttcccgcaggaatgatcacactaagaaaacgagaatttcgctacctgaagcaaggagatttgaccgtcacagagtacctgcacgagttctatcgtttggctcgctatgcaccagaagatgtggaaacggatgaagacaaacaagagaagtttctccaggggttaaaagatgagcttgcagtgcaactactcctagaggattatgaagattttgagaaacttgtggacaaagccatgcaactcgaaagtgagcataatcggatgacgaactgcaagagaaggattgtcaacatcccagtaattccatgtggtaaccaaagacagcgcactgagccacttcagatcaccggatcttctgttgtgcatcaagagttcctgccccaagaagacggacgcaatgcagacaacaacactagcaatactaatgatgatgataccaccaacaaccatggttcttgccccattagtgaccactcgaataaagcgtgcaatgtcagtagcattcaccaagatgtcaacgatagtatcaatgttggaacccagaatgacaaccttagcaattttgacactgagaaagactccaatggtgatagcaactatggtaccactgatgccaatgttagcaaggatttccaaccaccaattccaactccaagtcagaacgatcgtcctcagacggatagctcagcaaagaagacgttgatttgctacaattgcaaagaaccagggcattactcgagggactgcctgcaaccaaggcaaaatcgacctccacattaccgccaatttacacgaagcagacattccaattgtattgtggtcactggagcaaacgccgtacccgcaaagagtgaaatcttcaactcggtatcagatgctacacggagtgaaaagtgcaagcaccggttaccaggcaatgccatgacttgggaagatgatccaatgggaaagaacacatcaagtggtaacttgtctgaggttgactccgaagatatgaatcatgagaagttctggaacggaagcatcactgaactaccgcaacctagtctgagtcagccaaaaggtgcaccctggtccaagttaggtgaagagaagattccatccgcaacaggaggtcaagccaagcagttccgagtggtaaagttttgctggaagtttgtcaagacgcaacggaagaagtcagacaagaagagaagaccgcccaacctatcttcttgctag

SEQ ID NO: 15289 - DNA, 1617 bp, Oryza sativa
  Clone ID: TFbOSC401984j.C1.o8.fg
atgtcatggcagagggttggtgccctgctgctagggggctcagtcctgcctgcctgtcccgggtgtcccggccgtagggggattgggtcggtactcttgtttatggctaggatgggttgggaactatgtcacgtcttccgtccgtataccgtggtgatggataacactggtaacaaaggctatgggaatgatggatccgatgactcaagaacccaagccaatgggaatgagaaaagcatcaacgaaacctcaccagagctaatccaaattgtggttaaccaaaccaacatgttggcaacagcctttcaactattacagaatcggaacaacccagcaggggcaaccaacgttcaagtacctacagtccagcaacagtgcaagttatcagaatttctcaaaacggggcctccaacctttgccatggccgtcgatcctatggaagccagtgattggttgcgcacaatcgagaagaagctagggttgattcagtgcaccgaccaggagcgggttggcttcgcaactcatcagctggttggaccggcttcagagtggtgggatagctacgaagcatcacggccagaaggacataccatcacctggaacgagttttcatctgtattcaagagatcacatgttcccgcaggaatgatcacactaagaaaacgagagttccgctacctgaagcaaggagatttgaccgtcacagagtacctgcacgagttctatcgtttggctcactatgcaccagaagatgtggaaacggatgaagacaaacaagagaagtttctccaggggttaaaagatgagcttgcagtgcaactacttctagaggattatgaagattttgagaaacttgtggacaaagccatgcaactcgaaagtgagcataatcggatgacgaactgcaagagaaggattgtcaacatcccagtatttccaggtggtaaccaaagacagcgcactgagccacttcagatcaccggatcttctgttgcgcatcaagagtttccgccccaagaagatggacgcaatacagacaacaacactagcaatactaatgatgatgataccaccaacaaccatggttcttgccccattagtgaccactcgaataaagcgtgcaatgtcagtagcattcaccaagatgtcaacgatagtatcaatgttggaacccagaatgacaaccttagcaatttcgacactgagaaagactccaatggtgatagcaactatggtaccactgatgccaatgttagcaaggattcccaaccaccaattccaactccaagtcaaaatgatcgtccccagatggacagctcagtaaagaagacgttgatttgttacaactgcaaagaaccagggcattactcgagggactgcctgcaaccaaggcaaagtcgacctccacattaccgccaatttacacgaagcagacatcccaatcgtattgtggtcactggagcaaacgccgtacccgttgacgccaaagatatgaattatgagaagtctggaactgaagtcccatcttcaagtgccacaatccagtcgaagtcagctagaggtgcaaccagggaaaagtcaggtgaagagaagattccatctgcaacaggagattga

SEQ ID NO: 15290 - DNA, 1541 bp, Oryza sativa
  Clone ID: TFbOSC407179j.C1.o2.np
atggataatactggtaacaaaggctatgggaatgatggatccgatgactcaagaacccaagccaatgggaatgagagaagcaccaacgaaacctcaccagagctaatccaagttgtggttaaccaaaccaacatgttggcaacagcctttcaactattacagaattggaacaacccagcaggggcaaccaacgttcaagtgcctacagtccagcaacagtgcaagttatcagaatttctcaaaactgagcctccaacctttgccattgccgtcgatcctatggaagccagtgattggttgcgcacaatcgagaagaagctagggttgattcagtgcaccgaccaggagcgggttggcttcgcaactcatcagctggttggaccggcttcagagtggtgggatagctacgaggcatcacggccagaaggacataccatcacctggaacgagttttcctctgtattcaggagatcacatgttcccgcgggaatgatcacactaagaaaacgagagtttcgctacctgaagcaaggagatttgaccgtcacagagtacctgcacgagttctatcgtttggctcgctatgcaccagaagatgtggaaacggatgaagacaaacaagagaagtttctccaggggttaaaagatgaacttgcagtgcaactactcctagaggattatgaagattttgagaaacttgtggacaaagccatgcaactcgaaagtgagcataatcggatgacgaactgcaagagaaggattgtcaacatcccagtaattccatgtggtaaccaaagacagcgcactgagccacttcagatcaccggatcttctgttgtgcatcaagagttcctgccccaagaagacggacgcaatgcagacaacaacactagcaatactaatgatgatgataccaccaacaaccatggttcttgccccattagtgaccactcggataaagcgtgcaatgtcagtagcattcaccaagatgtcaacgatagtatcaatgttggaacccagaatgacaaccttagcaattttgacactgagaaagactccaatggtgatagcaattgtggtaccggtgatgccaatgttagcaaggatttccaaccaccaattccaactccaagtcggaatgatcgtccccagatggatagctcagcaaagaagacgttgatttgctacaattgcaaagaaccagggcattactcgagggactgcctgcaaccaaggcaaaatcgacctccacattaccgccaatttacacgaatcagacatcccaatcgtattgtggtcactggagcaaacgccgtacccgtttcaccgaagggcagcaagccaaaggacctcatcgtccccagaagcgtccgcaatccacattaaagaataccacctgttagaggttgactccgaagatatgaatcatgagaagttcggaaacggaagcatcactgaactaccgcaacctagtctgagtcagccaaaaggtgcaccctggtccaagtcaggtgaagagaagattccatccgcaacaggag

SEQ ID NO: 15291 - DNA, 612 bp, Oryza sativa
  Clone ID: TFbOSC413099j.C1.o8.hg
atgaagaactgtaagagaaggattgtcagcatcccagtattcccatgtggtaaccaaagacagcgcacggagccacttcagatcaccggatcttctgttgcgcatcaagagtttccgccccaagaagatggacacaatgcagacaacaacattagcaatactaatgatgatgataccaccaacaaccatgcttcttgccccattagtgaccactcaaatcaagcgtgcaatgtcaacatcattcaccaaggtgtcgacgatagtatcaatgatggcacccaaaatgacaaccctagcaattgtgactctaagaaagactccaatggtgatagcaactatggtaccactgatgccaatgttagcaaggatttccaaccaccaattccaactccaagtcagaatgatcgtccccagacggatagctcagcaaagaagacgttgatttgctacaattgcaaagaaccagggcattactcgagggactgcctgcaaccaaggcaaagtcgacctccacattaccgccaatttacacgaagcagacatcccaatcgtattgtggtcactggagcaaacgccgtacccgtgaggcctcgtgttaatcagaacccatag

SEQ ID NO: 15292 - DNA, 795 bp, Oryza sativa
  Clone ID: TFbOSC900009j.C1.o8.fg
atgcccaaaccgcctctctcgcctgaggaggaggctaagttcgaggctgcggattgcttgttctgtggagcattgatcagtgtgctcaccgataacatagtggacgtctatatgcacatgcctttggggaagaacatgtgggatgctcttgaggccaagttcggactttccgatgccggcagcgagctatatatcatggagcagttctatgactacaagatgatgctggcaaaggaacttgagaataacaactgcgagttgccggacaagtttgtggcggaaggcattattgccaaattgccaccttcttgttcggactttgctacttctctaaaacataaaagacaagggttcagtgttactgacctcattggctttttgggtgttgaggagaaggggagggcaaaggacaatcggggcaaagtgatcgagggaggttctaccgccaatttggtgcaaaagacgaaccctcatgcatcctacaacaacaagaagaaagtcaaacctgacgtcaaacccaaggctacaactaattttaagaagaaaggcaagggaaaggcaaagagcgactgctttgtgtgcggtaagcctgggcattgggtcaagaattgtcctgagcgtaaggacaagaagtctgcaaacatggttattagcgagggcggagaaacattggggtatggtgcgtgcttggcaacaatgactcaagtaggaccttaccctttgagtttttctctagggctgggtagcaagcttgttagtcgacagggctttcctaaccctggtgttcgcacatga

SEQ ID NO: 15293 - DNA, 1116 bp, Oryza sativa
  Clone ID: TFbOSC101565j.C1.o1.fg
atggtgaacactcgcgccagtggaagtgaaaacaataacaatgaagggaacccaactcttgctcaagttctggctcaacagactcagttaatgaatatgatgatacagcagatgcagaaccagcttaaccaagggaacaacaatgctccactgccgcagaacaagttagctgattttcttcttgtgaggccacctaccttttctagcactaccaacccagtggaagcaggtgattggttgcacactattgagaagaagttggaactgctccagtgcacagatcaggagaaagtcgtgttcgcttcacatcagttgcaaggacctgcatcagaatggtgggatcatttccggatgaacagagcagaaggacaaccaatcacttgggaagagtttactgaaggattcaagaaaacacacatacctgtaggagttgttgctttgaagaagcgtgagtttagggctttgaagcaaaaggatcataccgtggcagagtatcttcatgagttcaatcgtctggcacgttatgctccagaagatgtgcgcactgacgaggaaaggcaggagaagtttttggaaggtttgaaggatgaactgtcagttacgttaatctcccatgactatgtggattttcagcagttggttgacaaagcaattcgacttgaagacaagaagaataggatggataaccgtaaaaggaaaatgactgtattccaggaggcacaaggtagtagccagaggcagcgtatcaagccactccaaattggtgaatcttttcccgctggtccaggacagtcgcaacagttgaacatcggtggtgagatcaaattagagactaatgaaagcaaagaagttaacatcgagcaagctaatcagccggtgctagttcagcaaggtcagtctcaagagaataacagtagtggaagggagcagcaggtatgtttcaactgttacaagccaggccactttgcaagagagtgtccgaagccgaagcatcagcagccgcaaggtcaggttaacaacattgttgtcacaggagccaatgcagtgccagttgcgtcttcaagagttgtgtcttcaagtgttacaactcagccaccagtttcaaagcggcagtag

SEQ ID NO: 15294 - DNA, 1185 bp, Oryza sativa
  Clone ID: TFbOSC14497j.C1.o1.fg
gttgcttgcttaatcaacttgaacaatataatgaactacacacaccagatcagtggtaacctggttaagatggtgaacactcgcgccagtggaagtggaaacaataacaatgaagagaacccaacctttgctcaagtgctggctcaacagacccaattgatcaacctgttagtgcaacaaatgcagaaccagcaagggaacaacaatgtcaatcctccgccgccccagaacaagttagttgattttcttcgtgtgaagccacctaccttctctagcactaccaacccagtggaagcaggtgattggttgcacgctgttgagaagaagttggaattgctccagtgcacggatcaggagaaagttgttttcgcttcacatcagttgcaaggatctgcttcggaatggtgggatcatttccggatgaacagagcagaaggacaaccaatcacttgggcggagttcactgaagcattcaagaagacacatatacctgcaggtgttgttgctttgaagaagcgtgagttccgggcacttaagcaaaaggatcgtaccgtgacggaatatcttcatgagttcaatcgtctagctcgctatgctccagaagatgtgcgtactgacgaggaaaggcaggagaagttcttggaaggcttaaaggatgagctgtcagttatgttgatctctcatgactatgaggattttcaggagttggttgacaaagcaattcgactggaagacaagaagaacaggatggataaccgtaaaaggaaaatgactgttttccaggaggcacaaggtagtcgccagagacagcgtatcgagccactccaaattggtgaatctttttccgctggtcaaggacagtcgcaacagttgaacatcggtggtgagatcgaatcagagactaatgaaagcaatgaagtaaacatcgagcaagctaatcaaccggtgccagttcagcaggatcagtctcaagagaataacagtagtggaagggagcagcaggtatgtttcaactgttacaagccaggtcactttgcaagagagtgtccgaagtcaaagcatcagcagccgcaaggtcaggtcaacaacattgtcgtcacaggagccaatgcagtgccagttgcgtcttcaagagttgcgttctcaagggatacagctcagccaccagtttcaaagcagcagtag

SEQ ID NO: 15295 - DNA, 1116 bp, Oryza sativa
  Clone ID: TFbOSC14970j.C1.o1.fg
atggtgaacactcgcgccagtcgaagtggaaacaataacaatgaagggaacccaactcttgctcaagttctggctcaacagactcagttaatgaacatgatgatacagcagatgcagaaccagctcaaccaagggaacaacaatgctccaccgccgcagaacaagctagctgattttcttcgtgtgaggccacctaccttttctagcactaccaacccagtggaagcaggtgattggctacacgctattgagaagaagttggaattgctccagtgtacggatcaggagaaagttgttttcgcttcacatcagttgcaaggacctgcatcagaatggtgggatcatttccggatgaacagagcagaaggacaaccaatcacttgggcggagttcacggaagcattcaagaagacacacatacctgcaggtgttgttgctttgaagaagcgtgagttccgggcacttaagcaaaaggatcgtaccgtgacggaatatcttcatgagttcaatcgtctagctcgctatgctccagaagatgtgcgtactgacgaggaaaggcaggagaagtttttggaaggcttaaaggatgagctatcagttatgttgatctctcatgactatgaggattttcaggagttggttgacaaagcaattcgacttgaagacaagaagaacaggatggataaccgtaaaaggaaaatgactgttttccaggaggcacaaggtagtagccagaggcagcgtatcaagccactccaaattggtgaacctttttccgctggccaaggacaatcgcaacagttgaatatcggtggtgagatcaaatcagagactaatgaaagcaatgaagttaacatcaagcaagctaatcagccggtgccagttcagcaggatcagtctcaggagaataacagtagtggaaggaagcagcaggtatgtttcaactgttacaagccaggccactttgcaagagagtgtccgaagccgaagcatcagcagccgcaaggtcaggtcaacaacattgtcgtcacaggagccaatgcagtgccagttgcgtcttcaagagttgtgtcttcaagtgttgcagctcagccaccagtttcaaagcagcagtag

SEQ ID NO: 15296 - DNA, 1116 bp, Oryza sativa
  Clone ID: TFbOSC15152j.C1.o2.fg
atggtgaacactcgcgccagtggaagtggaaacaataacaatgaagagaacccaacctttgctcaagtgctggctcaacagacccaattgatcaacctgttagtgcaacaaatgcagaaccagcaagggaacaacaatgtcaatcctccgccgccccagaacaagttagttgattttcttcgtgtgaagccacctaccttctctagcactaccaacccagtggaagcaggtgattggttgcacgctgttgagaagaagttggaattgctccagtgcacggatcaggagaaagttgttttcgcttcacatcagttgcaaggatctgcttcggaatggtgggatcatttccggatgaacagagcagaaggacaaccaatcacttgggcggagttcactgaagcattcaagaagacacatatacctgcaggtgttgttgctttgaagaagcgtgagttccgggcacttaagcaaaaggatcgtaccgtgacggaatatcttcatgagttcaatcgtctagctcgctatgctccagaagatgtgcgtactgacgaggaaaggcaggagaagttcttggaaggcttaaaggatgagctgtcagttatgttgatctctcatgactatgaggattttcaggagttggttgacaaagcaattcgactggaagacaagaagaacaggatggataaccgtaaaaggaaaatgactgttttccaggaggcacaaggtagtcgccagagacagcgtatcgagccactccaaattggtgaatctttttccgctggtcaaggacagtcgcaacagttgaacatcggtggtgagatcgaatcagagactaatgaaagcaatgaagtaaacatcgagcaagctaatcaaccggtgccagttcagcaggatcagtctcaagagaataacagtagtggaagggagcagcaggtatgtttcaactgttacaagccaggtcactttgcaagagagtgtccgaagtcaaagcatcagcagccgcaaggtcaggtcaacaacattgtcgtcacaggagccaatgcagtgccagttgcgtcttcaagagttgcgttctcaagggatacagctcagccaccagtttcaaagcagcagtag

SEQ ID NO: 15297 - DNA, 1116 bp, Oryza sativa
  Clone ID: TFbOSC23005j.C1.o1.fg
atggtgaacactcgcgccagtggaagtggaaacaataacaatgaagagaacccaacccttgctcaagtgctggctcaacagacccaattgatcaacatgttagtgcaacaaatgcagaaccagcaagggaacaacaatgtcaatcctccgccgccgcagaacaagttagctgattttcttcgtgtgaggccgcctaccttctctagcactaccaacccagtggaagcaggtgattggttgcacgctgttgagaagaagttggaattgctccagtgcacggatcagaagaaagttgttttcgcttcacatcagttgcaaggatctgcttcagaatggtgggatcacatccggatgaacagagcagaaggacaaccaatcacttgggcggagttcactgaggcattcaagaagacacacatacctgcaggtgttgttgctttgaagaaacgtgagtttagggctttgaagcaaaaggatcataccgtggcagagtatcttcatgagttcaatcgtctagctcgctatgctccagaagatgtgcgtactgacgaggaaaggcaggagaagttcttggaaggcttaaaggatgagctgtcagttatgttgatctctcatgactatgaggattttcaggagttggttgacaaagcaattcgactggaagacaagaagaacaggatggacaatcgtaagagaggaaggattgttttccaggaggcacaggatagtagccagaggcagcgtatcaagccactccaaattggtgaatctttttctactggtcaaggacagtcgcaacagttgaacatcggtggtgagatcaaatcagagactaatgaaagcaatgaagttaacatcgagcaagctaatcagccggtgccagttcagcaggatcagtctcaagagaataacagtagtggaagggagcagcaggtatgtttcaactgttacaagccaggtcactttgcaagagagtgtccgaagccgaagcatcagcagccgcaaggtcagatcaacaacattgttgtcacaggagctaatgcagtgccagttgcgtcttcaagagttgcgtcttcaagtgttacagctcagccaccagtttcaaagcagcagtag

SEQ ID NO: 15298 - DNA, 1116 bp, Oryza sativa
  Clone ID: TFbOSC28072j.C1.o3.fg
atggtgaacactcgtgctaatggaagtggaaacaataacaatgaagggaacccaactcttgctcaagttctggctcaacagactcagttaatgaacatgatgatacagcagatgcagaaccagctcaaccaagggaacaacaatgctccaccgccgcagaacaagttaactgattttcttcgtgtgaggccacctaccttttctagcactaccaacccagtggaagcaggtgattggttgcacactattgagaagaagttggaactgctccagtgcacggatcaggagaaagttgttttcgcttcacatcagttgcaaggacctgcatcagaatggtgggatcatttccggatgaacaaagcagaaggacaaccaatcacttgggcggagttcacggaagcattcaagaagacacacatacctgcaggtgttgttgctttgaagaagcgtgagttccgggcacttaagcaaaaggatcgtaccgtgacggaatatcttcatgagttcaatcgtctagctcgctatgctccagaagatgtgcgtactgacgaggaaaggcaggagaagtttttggaaggcttaaaggatgagctatcagttatgttgatctctcatgactatgaggattttcaggagttggttgacaaagcaattcgacttgaagacaagaagaacaggatggataaccgtaaaaggagaatgactgtattccaggaggcacaaggtagtagccagaggcagtgtatcaagccactccaaattggtgaatcttcttccgctggtcaaggacagtcgcaacagttgaacatcggtggtgagatcaaatcagagactaatgaaagcaatgaagttaacatcgagcaagctaatcagccggtgccagttcagcaggatcagtctcaggagaataacagtagtggaaggaagcagcaggtatgtttcaactgttacaagccaggccactttgctagagagtgtccgaagccaaagcatcagcagccgcaaggtcaggtcaacaacattgttgtcacaggagccaatgcagtgccagttgcgtcttcaagagttgtgtcttcaagtgttacaactcagccaccagtttcaaggcagcagtag

SEQ ID NO: 15299 - DNA, 4300 bp, Oryza sativa
  Clone ID: TFbOSC29458j.C1.o6.np
atggtgaacactcgcgccagtggaagtggaaacaataacaatgaagggaacccaactcttgctcaaaacaagttagctgattttcttcgtgtgaggccacctaccttttctagcactaccaacccagtggaagcaggcgattggctacacgctattgagaagaagttggaactgctccagtgcacggatcaggagaaagttgttttcgcttcacatcagttgcaaggacctgcatcagaatggtgggatcatttccgaatgaacagagcagaaggacaaccaatcacttgggcggacttcacggaagcattcaagaagacacacatacctacaggagttgtttctttgaagaagcgtgagttcagggcattgaagcaaaaggatcaaaccgtggcagagtatcttcatgagttcaatcgtctggcacgttatgctccagaagatgtgcgtactgacgaggaaaggcaggagaagttcttggaaggtttaaaggatgaactgtcagttacgttgatctctcatgactatgctgattttcagcagttggttgacaaagcaattcgacttgaagacaagaagaacaggatggataaccgtaaaaggaaaatgactgttttccaggaggcacaaggtagtagccagaggcagcgtatcaagcaactccaaattggtgaatcttcttctgctggtcaaggacagtcgcaacagttgaatatcggtggtgagatcaaaacagagactaatgaaagcaatgaagttaacatcgagcaagctaatcagctggtgccagttcagcaggatcagtctcaagagaataacagtagtggacgggagcagcaggtatgtttcaactgttacaagccaggccactttgcaagagagtgtccgaagccgaagcatcagcggccgcaaggtcaggtcaacaacatgtcgtgtgctgcaatcaagatgattgctaaccatgtctaccacgcggacaagattgctaacaacattgtcgtcacaggagccaatgcagtgccagttgcgtcttcaagagttgtgtcttcaagtgttacaactcagccaccagtttcaaagcagcagtagttttctttaaagccttagaatgattatcggagttatggaataagatagactgcagtttgcctattccctttttctttctagctgttccgaatctcgggacgagattctttgtaaggggggtagtttgtcacatcctgattttcgtttcaggatttataaattatttaataaattaatagtagaatttatattaagtgttctttaatttacaagtgaagttaaatgtgggaaataaaatatcctaaatataaagcatggatggatttaatttttgttaaattctccatggttaattatactctctgaaattttctcggatttttcagagctcaattcctaaatgatacaaagaacagttcagtaattatttgatcattaatgatctaattatttttgttaagtgcttttcttgtttaaaatccttaaattataaattgttgtttaaaaggaataattagaaatgattttaaaagcctggaagagaagatctaattttaatttgctaaatctcaatataaaattgggctagataaaattttgttaaatactttgcttaattctataattcttagatttttctgggatttatttgagctaaggaagtatttttaataaatggaattgcatttcatgaataatttaaattgaaaaaggttttaaaagtcttcttttggctttgggccgaaagccggcccaaaacctctctttctctctccctccccggcccagtcggcccagtcggcccagtccgccgagccgctgctctcctctctctctcagccgctgacaggtgggccccacttgtcagggtcgtcgtcttcgtcgcgccgctgccgcccgaaacactagccgagccactccgccgccgctttccaattcggccgcgtctttccttctccggtcgaattgatagaggggaaatgatcctcgggatctcctctaccttttctcttttggaaacatcggctaatttgttttggaagttcgtggaatcgagttcgattcggatcggcctctttcctccgaaccccgaagtttccatctcgtcgccggccgccgtgggcctttgccgccgcctcctagtcgctttaaaaggctccccggtgtctcctctacccgtcgccaccttcgccttcgcctctcgtcgtccgtagcgccctagcgccatgagacctagcgccgccgtcgccgctgtcgctccagccgtgcgccgccgccgtttcagccgtcgtcgttgctcgggaaggtcgtcatcgtggtcgtcaagtcgccgccgtcctcgtccgctccttcgccgccgccgaagaccgccggagccccgtcgccgccgttgacccgatctccgccgccgcttcttcctcatcgccggcgccgtccgttgcccttccgccgttgttttggtcaccggtgagttcgccgcgtcgccctctacccgttggtgccctccgttcgcgtcgccgcgccgtcgttcgccggcgagcatgcgcgcccgagtcgccgccggtggtgacgtcatcgctgacgtcatcgtccccgtctcccgtgagccggtcgtggaccgatcgatctcggccgtccgttttggatagggttgatctcggccgttcgtttccgtgaactgaacttattcctttgttatggccaatttgcattgattattttattccttgataccttgggttattataacttgactagttgagctatatatattggatcagctagatattagatatgattgcttacccatgcttagaaacattagcacacaattgggataactaatgtttcactatcacttatggttatatttaatggtagctcacgatggtcaatcgtgattggttaattaattacttgccaactaaaacttgataatggtgggttgtgagcacatggttttgagagtcgtgctcatgacaattaaggaccggttcacgagctactattgtgaaacattaaccgtgccaaccacaagccagcgtgggcaacggctttatcttttgtataacatgattcattgcggagcaccagactgagaagtggcggagataagcccacgggggtcgctggggagtccatgccttgttttataagggggtgattatgatccaggaatggtgcactgtggtgagttgtgttgtgcaaagggtattgtcacagcctctattcgggtactttccagtatcgcgacacatggtagacatgatgttgaggccgtgtcttgtgggtacagtggtacacctctggccagagtaaaactattcgaatagccgtgcccgcggttatgggcgagttgagcaatgtttttcgtgattagtctcacacctctcacaataattatggatgttataactggtaataatttgcttagctcctggtttggaatggaaaattcctggtttggagattagatctgtacagccgggtatggttgttcaggatggtcgggcctgtgcagcatgggtgtgctgttcagtgttgattaaaatttctgattaactactctactgttttatttctcttaaatattttgctaaacgctgcttttgcaaatgagcctatattatgccatcctttggtatccttgtgcacttgcatatttgctgtgtggcttgctgagtatgtcatatgctcaccttgcaataatcaatcaacctcagttgaagaaaaaggatccagaaggagaagacgtttggcttataccccagttgagctgcctgtgggagtggagccggagcttcgctagattttattttccgctgcagttttcttcatggtgaggactacgcctcttcgaggagttcatcgttttcacaccaaaggaaaattggcaccgcgttttgtgggaccttataagattgtcagtagaagaggagaggttgcttatcagttggagttacctcaatctttggcaggagtccataatgtgttccatgtgtcgcaattgaagaagtgtttaagggtacctaccgaagaagctaatcttgaacagatagaagtccaagaggatctgacctatgttgagaaaccaatccgtattttggaaatagatgagagaagaaccagaaatcgagttatccgtttttgcaaagtccagtggagtaatcactcggaagaagaatcaacttgggaacgagaagatgaattgaagtcagctcatccgcatctgttcgccagttcttccgaatctcaaggacgagattctgtt

SEQ ID NO: 15300 - DNA, 1032 bp, Oryza sativa
  Clone ID: TFbOSC400483j.C1.o11.fg
atggtgaacactcgcgccagtggaagtggaaacaataacaatgaagggaacccaactcttgctcaagtcctggctcaacagactcagttaatgaacatgatgatacagcagatgcagaaccagctcaaccaagggaacaacaatgctccaccgccgcagaacaagttaactgattttcttcgtgtaaggccacctaccttttctagcactaccaacccagtagaagcaggtgattggctacacgctgttgagaagaagttggaactgctccagtgtacggatcaggagaaagttgttttcgcttcacatcagttgcaaggacctgcatcagaatggtgggatcatttccggatgaacagagcagaaggacaaccaatcacttgggaagagtttactgaaggattcaagaagacacacatacctgtaggagttgttgctttgaagaagcaagatgtgcgtactgacgaggaaaggcaggagaagttcttggaaggcttaaaggatgaactgtcagttacgttaatctcccatgactatgttgattttcagcagctggttgacaaagcaattcgacttgaagacaagaagaacaggatggataaccgtaaaaggaaaatgattgtattccaggaggcacaaggtagtagccagaggcagcgtatcaagccactccaaattggtgaatcttcttccgctggtcaaggacagtcgcaacagttgaatatcgctggtgagatcaaatcagagactaatgaaagcaatgaagttaacatcgagcaaataaatcagccgatgccagttcagcaggatcagtctcgggagaataacagtagtagaagggagcagcaggtatgtttcaactgttacaagccaggccactttgcaagagagtgtccgaagccgaagcatcagcagccgcaaggtcaggtcaacaacattgtcgtcacaggagccaatgcagtaccagttgtgtcttcaagagttgcatcttcaagtgttacagctcagccactagtttcaaagcggcagtag

SEQ ID NO: 15301 - DNA, 1116 bp, Oryza sativa
  Clone ID: TFbOSC400718j.C1.o68.fg
atggtgaacactcgcgccagtggaagtggaaacaataacaatgaagggaacccaactcttgctcaagttctggctcaacagactcagttaatgaacatgatgatacagcagatgcagaatcagctcaaccaagggaacaacaatgctccaccgccgcagaacaagttagctgattttcttcgtgtgaggccacctaccttttctagcactaccaacccagtggaagcaggtgattggctacacgctgttgagaagaagttggaactgctccagtgtacggatcaggagaaagttgttttcgcttcacatcagttgcaaggacctgcatcagaatggtgggatcatttccggatgaacagagcagaaggacaaccaatcacttgggcggacttcacggaagcattcgagaagacacacatacctacaggagttgtttctttgaagaagcgtgagttcagggcattgaagcaaagggatcataccgtggcagagtatcttcatgagttcaatcgtctggcacgttatgctccagaagatgtgcgtactgacgaggaaaggcaggagaagttcttggaaggcctgaaggatgaactgtcagttacgttgatctcccatgactatgttgattttcagcagctggttgataaagcaattcgacttgaagacaagaagaacaggatggataaccgtaaaaggaaaatgactgtattccaggaggcacaaggtagtagccagaggcagcgtatcaagccacttcaaattggtgaatctttttccactggtcaaggacagtcgcaaccattgaacatcggtggtgagatcaaatcaaagactaatgaaagcaatgaagttaacatcgagcaagctaatcagccggtgccagttcagcaggatcagtctcaagtgaataacagtagtggaagggagcagcaggtatgtttcaactgttacaagccaggccactttgcaagagagtgtccgaagccgaagcatcagcagccgcaaggtcaggtcaataacattgttgtcacaggagccaatgcagtgccagttgcgtcttcaagagttgtgtcttcaagtgttacaactcagccaccagtttcaaggcagcagtag

SEQ ID NO: 15302 - DNA, 1104 bp, Oryza sativa
  Clone ID: TFbOSC401076j.C1.o10.fg
atggtgaacactcgcgccagtggaagtggaaacaataacaatgaagggaacccaactcttgctcaagttctggctcaacagactcagttaatgaacatgatgatacagcagatgcagaaccagctcaaccaagggaacaacaatgctccaccgccgcagaacaagttaactgattttcttcgtgtgaggccacctaccttttctagcactaccaacccagtggaagcaggtgattggttgcacactattgagaagaagttggaactgctccagtgcacggatcaggagaaagttgttttcgcttcacatcagttgcaaggacctgcatcagaatggtgggatcatttccggatgaacagagcagaaggacacccaaagttcacggaggcattcaagaagacacacatacctgcaggagttgttgctttgaagaagcgtgagttccgggcacttaagcaaaaggatcgtaccgtgacggaatatcttcatgagttcaatcgtctagctcgctatgctccagaagatgtgcgtactgacgaggaaaggcaggagaagtttttggaaggcttaaaggatgagctatcagttacgttgatctctcatgactatgaggattttcaggagttggttgacaaagcaattcgacttgaagacaagaagaacaggatggataaccgtaaaaggagaatgactgtattccaggaggcacaaggtagtagccagaggcagtgtatcaagccactccaaattggtgaatctttttccgctggtcaaggacagtcgcaacagttgaacatcggtggtgagatcaaatcagagactaatgaaagcactgaagttaacatcgagcaagctaatcagccggtgccagttcagcaggatcagtctcaagagaataacagtagtggaagggagcagcaggtatgtttcaactgttacaagccaggccactttgcaagagagtgtccgaagccgaagcatccgcagccgcaaggtcaggtcaacaacattgttgtcataggagccaatgcagtgtcagttgcgtcttcaagagttgtgtcttcaagtgttacagctcagccaccagtttcaaggcagcagtag

SEQ ID NO: 15303 - DNA, 2211 bp, Oryza sativa
  Clone ID: TFbOSC401130j.C1.o19.np
gccctagtcgccgccgtcgttgccgtcggttcagccgcgccgcgccgccgttgcagtcgtcgtcgtcggtcgccgtcgccaccatcgggttcgccaagtcgtcgccgtccccgtccaccgcttcgccgccgccgaagaccgtcggagcgccgtcgccgtcgtcgacccgaagagcttcgccgcttcctcctcgtcgccgccgccgtccgttggtcttccgccgccgttttggtcaccggtgagttcgccgcgtcgtcctctacataagcccacgggggtcgctggggagtccatgccttgttttataagggggtgattatgatccaggaatggtgcgctgcggtggattgtgttatgcaaggggtactgtcacagcccctttccgaggtaccgtggtggtactgaggcacatggtgacatgatgtggggctgtgtcttgtgggtacagtgttgcatatttgctgtgtggcttgctgagtatgtcatatgctcaccttgcaataatcaatcaacctcagttgaagacaagttgcgaaggagaagacgtttggcttataccccagttgagctgcctgtgggagtggagccggagcttcgctagattttatttttccgctgcaattttcttcttggtgaggactaagtgcctcataagtaagtatttatcgttttagttaatttgatgaatctgtatattaaattgtcaatttgtgtacctcggctgattcctggacgaggattttatgcacaaataagttcggaaattactagtgaatttccgggcgtgacaagttggtatcagagccatctcgactgtaggataagccaaatggtcaaaccttaaggactaattttccgaaaacatgatgtgtgaaaattttcctttcttccttctctagaattctctataaatcattttatcatcctctcccctcctgctttcaacttgagtagttctaaaactagttgttgaaactagaagatgttaatgaggtctacttatggaggtcagtcaagtggatcgaggaagaaccgaagtgccaagtggtcaagatggaatgaagtttggatcctaccttagaacctatgccgccaaagtgtctttgaagaatagttagtagggtagaacgcttgttgcttgcttgtgtgtaggtatggttgcattcccatcattggagtagttcattgatgagtgtgtaactatactaggtaacccctctcctcctatctcctcctatctgcaatagatggtgaacactcgtgctaatggaagtggaaacaataataatgaagggaacccaactcttgctcaagttctggctcaacagactcagttaatgaacatgatgatacagcagatgcagaaccagctcaaccaagggaactacaatgctccaccgccgcagaacaagttaactgattttcttcgtgtgaggccacctaccttttctagcactaccaacccagtggaagcaggcgattggctgcacgctattgagaagaaagcagaaggacaaccaatcacttgggcggagttcacggaagcattcaagaagacacacatacctgcaggtgttgttgctttgaagaagcgtgagttccgggcacttaagcaaaaggatcgtaccgtgatggaatatcttcatgagttcaatcgtctagctcgctatgctccagaagatgtgcgtactgacgaggaaaggcaggagaagtttttggaaggcttaaaggatgagctatcagttatgttgatctctcatgactatgaggattttcaggagttggttgacaaagcaattcgacttgaagacaagaagaacaggatggataaccgtaaaaggagaatgactgtattccaggaggcacaaggtagtagccagaggcagtctaatgatgaacttaacatcgagcaggctaatcagctggtgccagttcagcaggatcagtctcaagtgaataacagtagtggaagggagcagcaggtatgtttcaactgttacaagccaggccactttgcaagagagtgtccgaagccgaagcatcagcagctgcaaggtcaggtcaacaacattgaagtgaaaactcccaaagcgaaagcgaagtcggcgactcatgaaattgattccatcgcgctcgttgataggaaactcgacgcaacccctacctggcgcgccaactgtcgaaacatgaattcggcaataataaaagggg

SEQ ID NO: 15304 - DNA, 1134 bp, Oryza sativa
  Clone ID: TFbOSC401143j.C1.o24.fg
atggtgaacactcgcgccagtggaagtggaaacaataataatgaagggaacccaactcttgctcaagttctggctcaacagactcagttaatgaacatgatgatacagcaaatgcagaaccagctcaaccaagggaacaacaatgctccaccgccgcagaacaagctagctgattttcttcgtgtgaggccacctaccttttctagcactactaacccagtggaagcaggtgattggttgcacactattgagaagaagttggaattgctccagtgcacggatcaggagaaagtcgtgttcgcttcacatcagttgcaaggacctgcatcagaatggtgggatcatttccggatgaacagagcagaaggacaaccaatcacatgggaagagtttaccgaaggattcaagaagacacacatacctgtaggagttgttgctttgaagaagcgtgagttcagggcattgaagcaaaaggatcataccgtggcagagtatcttcatgagttcaatcgtctggcacgttatgctccagaagatgtgcgtactgacgaggaaaggcaggagaagttcttggaaggcttaaaggatgaactgtcagttacgttgatctctcatgactatgctgattttcagcagttggttgacaaagcaattcgacttgaagacaagaagaacaggatggataaccgtaaaaggagaatgactgtattccaggaggcacaaggtagtagccagaggcagtgtatcaagccactccaaattggtgaaccttcttccgctggtcaaggacagtcgcaacagttgaacatcggtggtgagatcaaatcagagactaatgaaagcaataaagttaacatcgagcaagctaatcagccggtgccagttcagcaggatcagtctcaggagaataacagtagtggaagggagcagcaggtatgtttcaactgttacaagccaggccactttgcaagagagtgtccgaagccgaagcatcagcagccgcaaggtcaagtcaacaacattgtcgtcacaggagccaatgcagtgccagttgcgtcttcaagagttgcgtcttcaagtgttgcagctcagccaccagtttcaaagcggcagcagttttcattaaagccttag

SEQ ID NO: 15305 - DNA, 1197 bp, Oryza sativa
  Clone ID: TFbOSC401827j.C1.o24.fg
atggaattctttgcaaatcattttatcatcctctcccctcctgctttcaacttgagtagctctaagacattggaacttgaagacgccaatgaggtctacttatggagtggaaataataacaatgaagggaacccaactcttgctcaagttctggctcaacagactcagttaatgaatatgatgatacagcagatgcagaaccagctcaaccaagggaacaacaatgctccaccgccgcagaacaagttagctgattttcttcgtgtgaggccacctacattttctagcactaccaacccagtggaagcaggtgattggctgcacgctattgagaagaagttggaactgctccagtgcacggatcaggagaaagtcgttttcgcttcacatcagttgcaaggacctgcatcagaatggtgggatcatttccggatgaacagagcagaaggacaaccaatcacttgggcggagttcactgaagcattcaagaagacacacatacctgcaggtgttgttgctttgaagaagcgtgagttccgggcacttaagcaaaaggatcgtaccgtgacggaatatcttcatgagttcaatcgtctggcacgctatgctccagaagatgtgtgtactgacgaggaaaggcaagagaagttcttggaaggtctgaaggatgaactgtcagttacgttgatctctcatgactatgttgattttcagcagctggttgacaaagcaattcgacttgaagacaagaagaacaggatggataaccgtaaaaggaaaatgactgtattccaggaggcacaaggtagtagccagaggcagtgtatcaagccactccaaattggtgaatcttcttccgctggtcaaggacagtcgcagcagttgaacatcggtggtgagatcaaatcagagactaatgaaagcaaagaagttaacatcgagcaagctaatcagccggtgccagttcagcagggtcagtttcaagagaataacagtagtggaagggagcagcaggtatgtttcaactgttacaagccaggccactttgcaagagagtgtccgaagccgaagcatcagcagccgcaaggtcaggtcaacaacattgttgtcacaggagccaatgcagtgccagttgcgtcttcaagagtcgtgtcttcaagtgttacagctcagccaccagtttcaaagcggcagtag

SEQ ID NO: 15306 - DNA, 1116 bp, Oryza sativa
  Clone ID: TFbOSC408811j.C1.o16.fg
atggtgaacactcgcgccagtggaagtggaaacaataacaatgaagggaacccaattcttgctcaagttctggctcaacagactcagttaatgaacatgatgatacagcagatgcagaaccagctcaaccaagggaacaacaatgctccaccgccgcagaacaagttagctgattttcttcgtgtgaggccacctaccttttctagcactactaacccagtggaagcaggtgattggttgcacactattgagaagaagttggaactgctccagtgcacggatcaggagaaagttgttttcgcttcacatcagttgcaaggacctgcatcagaatggtgggatcattttcggatgaacagagcagaaggacaaccaatcacttgggtggagttcacggaagcattcaagaagacacacatacctgtaggagttgtttctttgaagaagcgtgagttcaggacattgaagcaaaaggatcataccgtggcagagtatcttcatgagttcaatcgtctggcacgttatgctccagaagatgtgcgtactgacgaagaaaggcaggagaagttcctggaaggcctgaaggatgaactgtcagttacattgatctcccatgactatgttgattttcagcagctggttgacaaagcaattcgacttgaagacaagaagaacaggatggataaccgtaaacggagaatgactgtattccaggaggcacaaggtagtagccagaggcagcatatcaggccactccaaattggtgaatcttcttccgctggtcaaggacagtcgcaacaattgaacatcgctggtgagatcaaatcagagactaatgaaagcaatgatgttaacatcgagcaagctaatcagccggtgccagttcagcaggaccagtctcaggagaataacactagtggaagggagcagcaggtatgtttcaactgttacaagccaggccactttgcaagagagtgtccgaagccgaagcgtcagcagccgcaaggtcaggtcaacaacattgtcgtcacaggagccaatgcagtgccagttgcgtcttcaagagttgcgtcttcaagtgttacagctcagccactagtttcaaagcagcagtag

SEQ ID NO: 15307 - DNA, 1116 bp, Oryza sativa
  Clone ID: TFbOSC411778j.C1.o1.fg
atggtgaacactcacgccaataaaagtggaaataataacaatgaagggaacccaactcttgctcaagttctggctcaacagactcagttaatgaacatgatggtacagcagatgcagaaccagctcaaccaagggaacaataatgctccaccgccgcagaacaagttaactgattttcttcgtgtgaagccacctaccttttctagcactaccaacccagtggaagcaggtgattggttgcacactattgagaagaagttggaactgctccagtgcacggatcaggagaaagttgttttcgcttcacatcagttgcaaggacctgcatcagaatggtgggatcatttccggatgaacagggcagaaagacaaccaatcacttgggcggagttcacggaggcattcaagaagacacacatacctgtaggagttgttgctttgaagaagggtgagtttagggcattgaagcaaaaggatcataccgtggcagagtatcttcgtgagttcaatcgtctggcacgttatgctccagaagatgtgcgtactgacgaggaaaggcaggagaagttcttggaaggcttaaaggatgaactgtcagttacgttgatctcccatgactatgttgattttcagcagctggttgacaaagcaattcgacttgaagacaagaagaacaggatggataaccgtaaaagaaaaatgactgtattccaggaggcacaaggtagtagccagagacagcgtatcaagccactccaaattggtgaaccttcttccgctggtcaaggacagtcgcaacagttgaatatcggtggtgagatcaaatcagagactaatgaaagcaatgaagttaacatcgagcaggctaatcagccggtgccagttcagcaggatcagtctcaagtgaataacagtagtagaagggagcagcaggtatgtttcaactgttacaagccaggccactttgctagagagtgtccgaagccgaagcatcagcagccgcaaggtcaggtcaacaacattgttgtcacaggagccaatgcagtgccagttgcgtcttcaagagtcgtgtcttcaagtgttacagctcagccaccagtttcaaagcggcagtag

SEQ ID NO: 15308 - DNA, 2640 bp, Oryza sativa
  Clone ID: TFbOSC4124j.C1.o4.np
gtgcagccgctgccggctgccctcgtcgcctcctcgccggccccggtcgtcgtcgtcgtcatcctctcgtcgttcccggttgtcgtggcgttcgtccgtccgtcaagccattctcgttcgtcgtcctcgttccgtcaagtgccgcagccccgtcatcgtcttcgtcctcgcctccgcgtcgccaagcattgcgccggccgcgtctcgccttcgtccaaggatcgacgccgaagtcgtcccctcgcctttcgtctccgtcattcccggccgtctccgccgcgcccgttcgtcgttgtcgttcccacgcctcgttgcatggtggtaaggatccctctccctcgctgccccgtcctcgtcctttcggtgtcgcccgtgcctgttgtgcggttgtcggccccgagctctggacagagccgagccgcccgtgctgtgccctgtgcagtcgccgcttcctccgttaaatctcgcctccccgttgctcctttttccaatttagttgaggggaaatattcctcttatcctcctctatctttacccccaaaaaatcggagctaatcgttgagtatcttatccaaatcaaactcgttttcgagtttatctccaaaaccgagtttttgatttcccggatcgatttcttgcgggaggagtccgatctcttcaatccaaggctataaataggaccccctagtcctcctctttcgtttgccccctctcccgtggtctcccgtgcctcgtagcgctgccgccacgtgctccaccccgccgtcgtcgccggccgagctccatccgcgtcgcgccgccgcctccgtcgtcgccgccggtcgccgtcaccgccgtaaggtgcgccgaggtgtggagaagcccggcctcctgtcccccttcgtcgccggccaccggagctccaccgccggcgaggtccgagccgccgccgccgttcacctcgtcgccggtcaccgtcggtcgtcgtttggctcgagggtaagtaccggtaataatttgtttagctcctggtttggagttagatctgtacagccgggtatggttgttcagaatggttgggcctgtgcaacatgggtgtgttgtttagtgttgattaaaattttggagctgaagccatcgctagatcgttattccgctgctgttttcttttcttttgtaagtatgtaacgttattattaagatggatttttatattaaattgtcagtttgtgtacctcggctgattcttggacgaggattttatgcacaaattagttcggaaattactagtgaatttccgggcgtgacaagttggtatcagagccatctcgactgtaggataagccaaatagtcaaaccttaaggactaattttccggaaacatgatttgtgaaaatttctcctttcttccttatctagaattcttcacaaatcgttttgtcgttctctcctcttttccctctttcaacttgagtagttgttaaatttgatggagaaactcgaagacgtcgatgttgtcaacttctgcaagtcaagtggatcgaggaataagaagatgatagttgaatcaaagtgttcagctgtcaagatagagtgaagtttggaacctagcttagaacctatgccgccaaagtgtctttgaagaatagttagtagggttgaacgtttgttgtttgctttgtgtgtaggtatggttgcattcccatcattggagtagttcatcaaaggaacaacaatgtcaatcctccgccgccgcagaacaagttagctgattttcttcgtgtgaggccgcctaccttctctatcactaccaacccagtggaagcaggtgattggctgcacgctgttgagaagaagttggaattgctccagtgcacggatcaggagaaagttgttttcgcttcacatcagttgcaaggacctgcatcagaatggtgggatcatttccggatgaacagagcagaaggacaaccaatcacttgggcggagttcactgaggcattcaagaagacacacatacctgcaggtgttgttgctttgaagaagcgtgagttccgggcacttaagcaaaaggatcgtaccgtgacggaatatcttcatgagttcaatcgtctagctcgctatgctccagaagatgtgcgtactgacgaggaaaggcaagagaagttcttggaaggcttaaaggatgaggtgtcagttatgttgatctctcatgactatgaggattttcaggggttggttgacaaagcaattcgactggaagacaagaagaacaggatggacaatcgtaagagaggaaggattgttttccaggagacacagggtagtagccagaggcagcgtatcaagcccaatgaagtaaacatcgagcaagctaatcagccggtgctagttcagcaggatcagtctcaggagaataacagtaatggaagggggcagcaggtatgtttcaactgttacaagccaggccactttgcaagagagtgtccgaagtcaaagcatcagcagccgcagggtcagatcaacaacattgtcgtcacaggagccaatgcgtcatcttccagctctggacagagccgagccgcccgtgctgtgccctgtgcagccgccgctttctccgtaaatctcgcctccccgttgctcctttttcatttagttgag

SEQ ID NO: 15309 - DNA, 1116 bp, Oryza sativa
  Clone ID: TFbOSC415853j.C1.o8.fg
atggtgaacactcgcgccagtggaagtggaaacaataacaatgaagggaacccaactcttgctcaagttctggctcaacagactcagttaatgaatatgatgatacagcagatgcagaaccagcttaaccaagggaacaacaatgctccaccgccgcagaacaagttagctgattttcttcgtgtgaggccacctaccttttctagcactactaacccagtggaagcaggagattggctgcacgctattgagaagaagttggaattgctccagtgcacggatcaggagaaagttgttttcgcttcacatcagttgcaaggacctgcatccgaatggtgggatcatttccggatgaacagagcagaaggacaaccaatcacttgggcggagttcacggaagcattcaagaagacacacatacctgttggagttgttgcttcgaagaagcgtgagttcagggcattgaagcaaaaggatcataccgtggcagagtatcttcatgagttcaatcgtctggcacgttatgctccagaagatgtgcgtactgacgaggaaaggcaggagaagttcttggaaggcctgaaggatgaactgtcagttacgttgatctctcatgactatgctgattttcagcagttggttgacaaagcaattcgacttgaagacaagaagaacaggatggataaccgtaaaaggaaaatgactgttttccaggaggcacaaggtagtagccagaggcagcgtatcaagccactccaaattggtgaacctttttccgctggtcaaggacattcgcaacagttgaacatcggtggtgagatcaaatcagagactaatgaaagcaaagaagttaacatcgagcaagcaaatcagccggtgccagttcagcaggatcagtctcaagtgaataacagtagtggaagggagcagcaggtatgtttcaactgttacaagccaggccactttgcaagagagtgtccgaagccgaagcatcagcagccgcaaggtcaggtcaacaacattgttgtcacaggagccaatgcagtgccagttgcgtcttcaagagttgtgtcttcaagtgttacaactcagccaccagtttcaaagaagcagtag

SEQ ID NO: 15310 - DNA, 2355 bp, Oryza sativa
  Clone ID: TFbOSC408811j.C1.o3.fg
atggcttccctcctcacgctcccctccctctccctctccaaccctagcgcctccgccgccgccgcgggagccggagcggcgccgtctctgcgcctccgcgccgccttccgctgctgggcgctgcggcgcgcgggcggcggccggtgggcggccgcgggggccatcgcgtcgcccaactcggtgctcagcgagcacgcgttcaagcggctgcagctcagcgacgaggaggaggaggaggaggagggggcctacgggagtgacgaggagggggtcgaggcggtgggtggcggggagggggacgaggacgagctcgccattgccaggctcggcctgcccgagcagctcgtatccacgctcgagaagcgcgggattacccacctgttccccatccaggtttcggtattaggcggagacagcgagggaattggtgttagtgtaggatttgttggggggatgagttcgtggacagttagggctgtattgattccagctcttgacggccgtgacctgattgctagagcaaagacaggaaccgggaagacgctagccttcggcattcccatgatcaagcaattaatggaggaggatgatggacggagtgtgaggcgaggtcgtattcctcgtgttttggttctagcacctactagggagttagccaagcaagttgagaaggaaataaaagaatcagcacccaagctcagtacagtctgtgtttatggaggtgtctcatataatgtccagcagaacgcactctcccgtggtgttgatgttgttgtaggaacacctggtcgcattattgatttgataaatggcggaagtcttcagttgggagaagttaagtacttggtccttgatgaggctgaccaaatgcttgcagttgggtttgaggaggatgtggaaacgatattacaacagctaccagctgagaggcaaagcatgctcttctctgccaccatgcctggttgggtgaagaaattatctaggcgatacttgaacaatcctttgacaattgacttggtcggcgatcaagatgaaaaacttgctgaaggaatcaaactttatgctatcccgctcacatctacatcgaagcgcactgttcttagtgatctcattacggtgtatgcaaagggtgggaaaaccattgtgttcaccaagacgaaaagggatgcagacgaggtatcattagcactgacaaacagtattgcttcggaggcactgcatggtgatatttcacagcatcagcgtgagaggacactaaatggttttcgtcaagggaaatttactgttctcgtagcaaccgatgttgctgcccgtggtcttgatataccgaatgttgatttgattatccattatgaattgcccaatgatccagagacttttgttcatcgttctggacgcactggccgagctgggaaagcaggaactgcaatcttgatgttcacaaacagccagagaaggacagttagatcacttgagcgtgatgttggatgcagatttgacttcataagtcctccagcaattgaggatgtgctggagtcctctgctgaacatgtcatagctactttaagaggtgtgcacacggagtcgattcagtacttcattccagcagctgaaagactgcaagaagaattaggacctaatgctcttgcttctgcattggcacatctgagtggattttctcagccaccctcttcacgttctcttatcagtcatgagcagggatgggtgactttgcaactaactagagatccaggatatggaagggggttcttttctcctagatctgttactggctttctgtctgatgtttcttcagctgctgctgatgaagttggcaaaattttccttacagcagatgagaaggttcaaggtgcagttttcgatttacctgaggagattgcgagggatttgcttagtatggaactgcccccaggaaacaccataaccaaagtgacaaagctacctgcattacaggatgatggtcctgctactgatagttatggccgattctcaaactcggaccggggtttcaggaacagacggtccaggggtggtggctcaagaggcgggcggggtggttgggactctgatggtgaagacagatttcgccgtggtggcaggagcttcagatctgacaatgatagttggtcagatgatgactttggtggcgggagaagatcgaaccgttcgtcatcctttggtggccgcgggtcatcttacggcagtcgtagctcgtcatcctttggtggccgctcatcatcttttgggtctagggacagcagcaggagcttcagtggtgcttgcttcaactgtggcgaaagcgggcaccgagcatcagactgcccaaacaagtag

SEQ ID NO: 15311 - DNA, 1767 bp, Oryza sativa
  Clone ID: TFbOSC401920j.C1.o6.fg
atgcccctcggtgagctccgccgcctcccttttcgcctcctccgctcgttttcgccgctccccggccgccccctcgctcgttgggccgacgccgccatcaccgttgtagtggtcgtccttcccgcgtcgggatttaatacgcaaaatagtctggaaatttgggttaaatttctgggcgtgacaaagtggtatcagagccaactcgactttgttaaaccgtggaggataaaccgtcagcttcgtgtctgttcggaagtcaagtcaagcatcaagcttcatgcagcaaagagcgggaagcagatggtcagtgtgaggggcaatttcaacggatcaggatcccgtcagtttcatggatcaactcagctcaattctataagcttcccacgtcaacctctcaaagatcagccacaatcccaagtcatggctaatcagactcagacagtggaagagttgttacagcagatgcgacgtcggtaccagatctatctgatgcagcagatgcaacggcaatgtcaggagccgcgtcaagtccaccagccacaaatgcaagtccaggtgccagcccggaacctgaatcagagtcaggagttcccaatatcggcacctaagacccctgtcaaaatgatgtccagatccccgaagataacttcagccaactcaccgtcggaccaaaggaaaataagtgctacctgttatgactgtggtgagcaaggtcattatgtaaggaactgtccatggaaggtgtttgccaggtcacctgaaaaagacgagaagcagtgcccagggagtaaccaagctccaagtcagtctaccgacaagaaggatggtactttgcagcgcaactctggagcgaataggacagtgatatggaagatggataatggtaggaccatgatcatcaccggttcagaatttactcctgaagacgcagcaaggatacccaagcgtcggagaggaagaaataccttccgaggagcgcgtcagctaacccgtcatctcataaagtacggtccacccagacccgaagatgatgaatcaggagaacggttttctgctgatgacaatgacgacaacgatgatgataatgatgacaatgatgatgcgacccttgacagtttcagggaaagagagttgaagtgcaaagcatgtgctagatgtgggatagtcggacatactgctagtttatgcctccccacatgtcgctgtggtgaatacacccattactcagatgcatgccctttgaggaaggtcacatgtttcttgtgtgaaggaacagatcatgtgcctaaggactgtcagttgaacgcggtcctagctatgaccaagaaagaacaaggggcaaccgtgcaacccattcgtcaaccaatggtggtcgacaacaacagtctcaacccttctactctttcaccaaccacagctccagtggaagccaaccttggaagaagcaacgtcgccagggatgttcatgaatcactatgtgttccagtttcagctgccaaagtgcataatcagaagcctgcaccccgagacccagcaagtcgattctgtcgcaactgtcgtaagccaggacatcgtttcagtgattgtcctcttccaagagcagcaaaggcagttcgtcgtgattcccaagttaccagcactgcccatgacaccaatcgacacctgaatgtgcaacctccgcctcaacggattatcgtcaagggcaccgtcaaaggtcacattgttccaccggccatcgtttcaagcctacagcaccagcaccagtag

SEQ ID NO: 15312 - DNA, 2745 bp, Oryza sativa
  Clone ID: TFbOSC404332j.C1.o20.fg
atggcccagcgctggcgctcgagggcgcggcgcgacccggacgtggacgacgaggaaggctcgcccccggagcggcggcgcaggggggctcgaagcggcagcgacgacgaggaggcgggcaacgaggacctcagcctcgagatcgtcgcgcgggcggcgcggcggcggcggcggcgcgaggccagcgccgggttcgcggccgacgccttctcgtccggggacgagatcgacgaggatgccgtggtggagctcggcgaggcggatcccagcagcaggaagcggcgcaaggagaagaagaagcggcgcaaggagaagaggaagcagcggaagggggcgccgcccgagggctcgccctcgaccgccgccgccgacaaggagtctcaagttgctgggacccaggaggggcaaactggcacagcacaatcagtgctcactgaagatgggcctgatgtccctttatctgacaatattgttttacggaagcttcttcgcataccaagatactttgatcctggtgaaactttattggaaacatgctttaattgtggtgaggagggtcatgtagctgtgaactgtccaatggaaaagcggaagaggccttgttttgtttgtgggttgtttggacacaattcaaagcagtgcacgcaggttggtctccctagctccaaggcattattgcttggtgacttggataggttccagacttccagttcattaatcacacatatttacttgcccctgccaatgcttcttgcctgtgtggcatggcctgccaatttcaggaatcaaacatttgttaatcatttttgtagggtcaagactgtttcatctgcaaaaaaggaggtcatattgcgaaagactgccctgaaaagcacaataggaatactcaacagtctactttttgtttacgatgtggagaatcaggtcatgatatgtttggatgtgccaatgattatccacgcgatgatgttaagaaaggtcatctatgttgcgccgacttctctgatatttgtccaaaagaagttagttgttataattgtgcccaacctggtcatactggtttgggatgtgccaagcaacgtagggaagctagtaccgcggcaactccaactttgtgttacaaatgtggcgaggaaggccacttcgcacgtgggtgcacaaagaacaccaagtcggaaaaaaggcaaaggcaagaaagattttggcactagatcagctcctcatgatgctcgcaagacaagtaaaaggaaaagccccttatttgaggaaagaaggaactcatctcattttaagtccaaagctaggggtggttggattgcagacgatgcggatgaccagccatacaagaagtgcaaacccaatgtgtgggcttctccatctacccctaagaagcaatacaataaccatcagttctcttctggtggtgactactcaactcctcagtcttcaagatggcagaaacacggtttcgcatcgccgagcgcaacttactcaccaaacacaaggaagcatagcttttcatcgtcgagattcgccagcaacactcatgtccgcctacatgggcaacctactctggagctctttgctgcatcgaatcttacctctcccaacgatggctcgcagtgtagcctcatcgcgtcggagaccgaggagatgtgtgttagtggctgcatcattgagcttgagctctacggcctcctcgcgttggaggccgaggagagacacgccagcggtcatcgagtaggcgaggtgggactaaaaggagagcttactagctcagtggcttcatcgtatgggcctcgaaactcggcaagcgaaagggccgcagcccatacgtgtggtcttcggctcttcgctgctgcagacgattttgaaattgattggttgtttgaatcttctaatcgcttacgatttgtctcatcgctacgatacgatgccccgccgccgcgaaccctccgcctccgcagccacacgaccgcagcgacggtggcgcaggggctctcccgccgcgccgtgcaacctgccgacggcgtgttccgggaggaggctgccggtgatcgtgccgttccacgggggcgcgttcgcgaggggcgcggccgacagcgacgccatcgtggtttcatcgcgctctgggcatccacggccgcgccgtccccggcgccatcggctgttggccccaccccggctgctgcggcggcggagctcctccgccgggtcgcggcgcccggggtcgacccgtgcccggcgctgcggccggtgggcggtggcgcggcggagaccgtggcgtcggtgctccggaggagggggaagggcgatgatgatgatggcggcgtggaggccgtcgaggcggccgtccgggtgctcgcggtgctcgccacgtcggactgcatcgaggaggagaacaggaggcgcgtcgtcgccgcgctcgccgcggggggcgccgcgccgtcggtggcggcgtcgctggcgcgcgtgatgcggagcgggagcgggctcgaggcccgcgtcgacgcggcgaggctggtggagtcgctgctccgggacggcggcgaggatgatgaagtgcggcgggatgggcggcgcggaggcggcggtgtccgtgctgtgggcggtgtgccaccggtacagggaccggcgcgcggcggaggcggcggcggcgtccaagggcgggctgacgaagctgctcctgccgatgcagagcgggtgctcgccggcggcgaggcagatggcctcggagttccttaa

SEQ ID NO: 15313 - DNA, 1494 bp, Oryza sativa
  Clone ID: TFbOSC10946j.C1.o3.fg
atggagatggatgaagtcgggggtcgatggacattctctaggacaaatgaaggctacacgagctgcggcccggtagtcgagatgtcatggcacagggttggtgccctgctgctaggggctcagtcctgcctgcctgtcccgggggttccggccgtaggtgggattgggtcggtactcttgtctatggctaggatgggttggaaactatgtcacagcttccgtctgtataccgtggtgatgtttaacagagaaaaaggaaagaatgtcagcgggtatgactcaagtaactcaagttttcaactcaatctgccactggcctcaagagagttaaccagggcacacccttggtccattccaagcatgctgcttagttcacagctaccattggttggaagtcaagaccaaaatcagtatgtgtttgatcgagcctttgccacccaggtcaatgagcttccaatgccagaagagcaggttcccttttgtcatgattgtagagagcaaggacactatgccctgaattgtccatgggtatatgtcaaagaagccccttcccttggtttagcagggcggacatcgctaaaccagcctcctcacaccaagtcaagcttgcagcctagtgtgcaaagtagagagctcaacggagagaatccattgaatcccgggaaatgctttcctcctagcctctcgtaccacgtggggtcacatactaagcaagccaaaggcaagaagagtaagaatcagaagagaaaagcaccgatgcgaactgaagaagaagtacgtaagatgactattaccagcaccgaatggcctccagcagggataactattcctagacgtcaaagaggaaataccttccgaggtgcacgacagttgacccagcacctcctaagccgtggtggcagagtatctgatagtgaagggtcagatcaagtctcctcggatgaagaagatgagtctccccgacatctcggcgaggaagagatggaatccaaagcatgcccccgttgtggagaaattggacacgttgctagcatgtgtctcacactctgccctcattgtgaggaagaccatccaccaggtgaatgtcccacccgcaaggtcacatgttttctgtgcgaaggtacaaaccatgtgcccaaggattgccaactcagtgtgttgttgaccaagaccgcagaaatccaacgaacaaccctacgattgtctcatcagctagtcagctccaacagcaacatcgacgatatcatccacagcaccaatgctcctcccgctgcacctgactctgcaataaatcatagcgataataccttcagcaccaaccattctctgcaccgacagcctcaacaaagaattgtcatcgatggaagaagttgtgtctctccccgacctactccaggccgagccaagggcaatcaacctccggagggcgataccaagcagaagaccgttattcgcctcaaccagcaaccagaaggaaacttctcctgtgaatga

SEQ ID NO: 15314 - DNA, 1101 bp, Oryza sativa
  Clone ID: TFbOSC13029j.C1.o1.fg
atggtgaacactcatgctagtggaagtggaaacaataacaatgaagagaacccaacccttgctcaagttctggctcaacagactcagttaataaacatgatgatgcagcagatgcagaaccatctcaaccaagggaacaacaatgctccaccgccccagaacaagttagctgatttcctttgtgtgaagccgcctaccttttctagcactatcaacctagtggaagcaggtgattggctacacactattgagaagaagttggaattgctccagtgcacagatcaagagaaagttgtgttcgcttcacatcagttgcatggatatgcttcagaatggtgggatcacttccggatgaacagagcagaaggacaaccaatcacttgggaagagtttaccgaaggattgaagaagacacacatacctgcaggagttgttgctttgaagaagcgtgagttcaggacattgaagcaaaaggatcgtaccgtgactaagtttctttatgagttcaaccgtctagcacgttatgctccagaagatgtctgtactgacgaggaaaggcaggagaagatcttggaaggcctgaaggatgaactgtcagttacgttgatctctcatgactatgctgattttcatgagctggttgacaaagcaattcaactggaagataagaagaacaggatggacaaccgtaagagaagaatgactgttttccaggaggcacagggcagtagccagaggcagcatatcaagccatcccaagttggtgaatcaagtctaacatctcaagaacaatcgcaacagttgaacatcggtggtgagatcaattcagagactaatgcaagcaatgaagttaacatcaagcaagctactctatcggagccagttcagcaggatcagtctcaagaaaataacagtagtggaagggagcagcaagtatgtttcaactgttatgagccaggtcacttcgcaagaaagtgtccgaagccgaagcatcagcagccgcaaggtcaagtcaacaacattgtcgtcacaggagccaatgcagtgccagttgcgtcctcaagtgttacagctcagccaccagtttcaaagcagcagtag

SEQ ID NO: 15315 - DNA, 1413 bp, Oryza sativa
  Clone ID: TFbOSC17330j.C1.o2.fg
atgtcatggcacaggaccggtgtcctgctgttaggggctcagtcctgcctacctgtcccgggggttccgggcgtaggtggggttgggtcggtactcttttctatggctaggatgggttggaaactatgtcacgtcttccgtccgtataccgtggtgatgtttaacagagaaaaaggaaagaatgtcagcgggtatgactcaagtaactcaagttttcaactcaatctgccactggcctcaagagagttaaccagggcacacccttggtccattccaagcatgctgcttagttcacagctaccattggttggaagtcaagaccaaaatcagtatgtgtttgatcgagcctttgccacccaggtcaatgagcttccaatgccagaagagcaggttcccttttgtcatgattgtagagagcaaggacactatgccctgaattgtccatgggtatatgtcaaagaagccccttcccttggtttagcagggcggacatcgctaaaccagcctcctcacaccaagtcaagcttgcagcctagtgtgcaaagtagagagctcaacggagagaatccattgaatcccgggaaatgctttcctcctagcctctcgtaccacgtggggtcacatactaagcaagccaaaggcaagaagagtaagaatcagaagagaaaagcaccgatgcgaactgaagaagaagtacgtaagatgactattaccagcaccgaatggcctccagcagggataactattcctagacgtcaaagaggaaataccttccgaggtgcacgacagttgacccagcacctcctaagccgtggtggcagagtatctgatagtgaagggtcagatcaagtctcctcggatgaagaagatgagtctccccgacatctcggcgaggaagagatggaatccaaagcatgcccccgttgtggagaaattggacacgttgctagcatgtgtctcacactctgccctcattgtgaggaagaccatccaccaggtgaatgtcccacccgcaaggtcacatgttttctgtgcgaaggtacaaaccatgtgcccaaggattgccaactcagtgtgttgttgaccaagaccgcagaaatccaacgaacaaccctacgattgtctcatcagctagtcagctccaacagcaacatcgacgatatcatccacagcaccaatgctcctcccgctgcacctgactctgcaataaatcatagcgataataccttcagcaccaaccattctctgcaccgacagcctcaacaaagaattgtcatcgatggaagaagttgtgtctctccccgacctactccaggccgagccaagggcaatcaacctccggagggcgataccaagcagaagaccgttattcgcctcaaccagcaaccagaaggaaacttctcctgtgaatga

SEQ ID NO: 15316 - DNA, 6474 bp, Oryza sativa
  Clone ID: TFbOSC29926j.C1.o1.fg
atgtcagacttagggggaaagaacggagaaaatggaaatgaagatggagcgagcagcaaggaaactccatcacccaagggagctactataccttttggttacaggaaacataccattccccctcacaactttgtctccgtgccttccgggcgtgctcctcaatttgatgggacacattacgccgcttggaagcacaagatgaagttgcatctaatctctttgtatctaagtatttggaaagttgtttgtaaaggtgttgatgtaccccatgatgacatggagctcacttcggagcaagagcaactcatccaccgcaatgctcaagcttccaatgcaattctctccgccttgagtccggaggagttcaacaaggttgatgggcttgaggaggccaaggagatatgggatactttgcaattggctcatgagggatcacccgccgttcgtgaggccaagattgacttattggaaggaaggcttggaagatttgtgatggatgacaaggagacaccacaagagaagtatgataggacgatgattcttgtcaacaagattaaaggacttgggagtgaggacatgacaaatcattttgtgctcaagagacttctccgtgcacttggtccaagaaatcccactcttgtatcaatgatacgggaaaggaaagacttcaagagactcaccccaagtgacattcttggaagaattgtgtctcatgagatgcaagaagaggaagctcgtgaaagattcaagcactttcttcgcaacagtggctatggcaaagggaggaaggatgatgacaagggaaagaggcaatcaaagagggcttgcttcaattgtggcgaatatggccacttcgtagccaattgtcccaagtcaaatgaagctaaggctaagggaggcaagaagaagccagagcatgctcatgtggcggaggcacacatggcggaggtgttttactccggagatgaagaagatcccgaggtcaagcccaagcccaagccgaaagacaaggttgaaggagaaggtggtgttgctaccgtcgccttcaagtcatcttcttcaagcaagaagcgtctcttcaacaacttgagtgatgacgacgacgacttctaccactactcttgtttcatggcccaaggccgcaaggtgatgactcaaaagcgctctcacacctctcttgatgttgattctagtgatgaggaaagtgataatgaattagatgatgtgcttaagagctttagaaaacccgctatgcaacatttggctaagttaatgagagctttggatagtaaagaacaatcgctcgaaaggcaagaagaattacttattcttgagaagaaaagaaaccttgccttagaggagagcctagctaaagaatgtgctaaaaatgaacaactggctaatgagcttaatttggctaatggttctctagctagccttagtgatgtcaatgaaactcttcaagagaagtttgctagtttagacaaaagtcataaagatcttgaagttcaatttgacactctttggaatagcacttctcaaccaaatgtggtttctaattcttccaacccatctacaagcaatggttgtgctaggtgttacaatattgatttgaactctcatactactaatgttgatgctatgcaagctcttaagaaagagaatgaaaggttgggcacattggtgaaatatggatgcatgaagacataccattcaaaagatgccctttacaagacaatcaatcatcttaacatggatggacacgggctcgggttttctggtggaagtcctgtgtctaagcgtgtgatggcatactcctccggtggctcaagttgggttgtggacagtggctgcaccaatcatatgacgggagagaggagtatgtttacaagtcttgatgagggggctggaagtcgtgaaaatattgtctttggagatgatggtaaaggaaaggtaatggatctcggtaagattgccatttccaagaatcaatctctatctaatgtcctccttgtcaattcattaagagtgaatccggaggcatgcttgattgctaaatcctctatgggttggctatggcaccgtaggctagcccatgttggaatgaggaatttggcatctcttctaaaaggggaacacattcttggtctatataatgtttcttttgagaaagattgtgtgtgtagtgcttgccaagccgggaagcaagttgggagtccacatcctataaaaaacatcatgactacaacaagaccactcgagcttcttcatatggatttatttgggcccgtggcctacataagcattggaggtaacaagtatggtttcgtcattgttgatgatttttcacgcttcacttgggtgtactttctccatgacaaaagcgaagatcaagatgtcttcaagcgcttcgcaaagcaagcccaaaacctctacgatctcactatcaagagggtgcaaagcgacaatggaggagaattcaagaacactcaaatggaggaatttcttgatgaagaaggaatcaagcacgagttctctgccccctatgatcctccccaaaacggcattgttgagaggaagaaccgaaccctcattgaagccacaagggcaatgcttgatgagtacaagacttcgaatgtcttttgggcggaagccgtgagtaccgcatgtcatgccatcaaccgcttgtacctccacaagatcctaaagaaaacctcatatgagctcttgagtggtaagaagcctaatgtttcatattttcgtgtctttgggagcaaatgttttattttaagtaagaggcctcgctcatctaagttttcacctaaggtggatgagggattcttacttagctatgaatctaatgcacatgcctattgtgtcttcaacaaaacctctggtattgttgaagtcactagggatgtgacatttgatgaatctaatggctcccaaggagagcaagttgttgtacatgttgtagggggtgtggatccaaatcaagctattggtactaaggctattggagacatacgaccagtcgagacgcaggatgaccaagaagatagggatcaacctccgtcaccggcatccaacagccctacaagtgttgtgtctgctgagtcggaaattccgggtcctattgaccggaacctccggacatctctaggcccggaagttccgggttctatagtccggaacctttggatcagtggcagtgaagacatgccaacggcacaagtggatgggatcgatgctgagggcactttagagcattctgatcaggctcaggtccccccagtgcaccatccaaggatacatcacactgtccaaagagaacatcctgttgacaacatacttggtgacataagaaaaggggtaactactcgctctcgtatcacaagtttttgtcaacacttctcgtttgtctcttctttggaaccaaccagggtggaagatgtgcttggtgatccggattgggtgatggctatgcaagaggagttgaataacttcactcgcaatcaagtatggactttggtggagagacccaagcaaaatgttatcgccaccaagtggatctttcgcaacaagcaagatgaacatggggtggttgtaaggaacaaagcccggttattccaaatggatgtcaagagtgcctttctcaatggacctatctcggagttagtctatgtggagcaaccaccggggttcgaggatccaaagttgccaaaccatgtgtacaagctccacaaggcgctctatgggctcaaacaagcccctagagcttggtatgaatgtctccgagattttcttttgaaaaatggttttgaaattgggaaggcggatacaactatcttcacaaaaaaatttaagagtgattcattcatttgccaaatttatgtcgatgacataatatttggttctacgaatgcctctttttgtgaagaatttagtagtatcatgactaaaaggttcgagatgtctatgatgggtgagttgaccttctttcttgggctacaagtgaagcaagcacaagagggcaccttcatctctcaaaccaagtacgtgaaagacatactcaagaagtttgggatggaggatgccaaacctatcaagacgcccatgcctactaatggacacctagacctcgaccataatggtaaatgtgtagaccaaaaggtatatcgctccatgataggatctttgctttacttatgtgcatctcgtctcgacatcatgcttagtgtttgcatgtgtgcccgttttcaagcggagcctaaagagtgccatttgattgccgtcaagagaattctaagatatttagttcacactcctaatcttggcttgtggtatcctaagggttgtggctttgagcttttgggctattccgattcggattatgccgggtgtaaggttgatagaaaaagtacaaccgggacttgtcaattccttgggtggtcccttgtttcttggtcctctaagaagcaaaattccattgccttatcaactgccgaagccgaatatgttgccgccgattcttgttgtgcccaactcctttggatgagacaaaccctaaaagactttggctacaacttcaccaagatcccactcctatgtgataatgagagtgccatcaaaatagccaacaatcccgtccaacactcaagaaccaagcacatagacattcgccaccacttcttgagagatcatgagactaaaggagacatatgccttacccatgtgacaaccgaaagtcaattagccgacattttcaccaagcctttagatgagaaaagattttgcgagctgaggagtgagctcaatatcttagactctcgtaacattaggctggaagttccggtcaccccagtccggaacttccgggggtcggggggtataaatacccagggggagcctgagcctgtagtcattatgcctcgtgagaagagacaaaagctttctcaagatattcctgctgactcgagccccccgattccgatccattccaggagggctggtagcattgtcattcgtgatgcaccccgctctccctccccaactgcatctgagtcagatgatggtggcaatgaggatgagccaggttctgaaagcaatcctttgaggctgtacaagacaagggctgttgatcctgatcctaaacgcccaagagtgaactatctgaagaatctactcaagtgtggaaaggacagaatggttagtcctgatactctgccagctgactctcaggatgacagattcaggaccttggtgcaggttgattggtataactctgtgatcatgggaagatctcatccagtggtagagatgaagtggctagactggaagtacatgtcctcaaagaacaacatagtcttcaatgaggtacgcaaggtgtgtgagcacaagcacgcggcagatttgttggccttgcagtattcctggaatgaggaagtgattggacagttctactccactgctttctttggcaccaccaagaaggggcttgattttgtgaagtggaccattcaggggcagcagtatagggtttctatggcacaatttgttgcagctttggggttagatgatgatgacctgagtcgtccacatatctttgtagaggatgctctgtcaccgaccagcactacctttatgtatgagaaggatgctcccaaggattgtttggggactactcgagggttgcatccatattatagagtgctatactctatcttcaggtggtctttgctccccaaagtgggagatgctacagctcttccaggtaggcatgcgctcctcctcagtcgcatgcgctacaacaagcccgatttcagcatcatgaagcttatctggagtgagatctatgagacagtgtgtgagccaaagaggggttgcatctatgctccttatatcatgaagatgattgaggccaagactgggatttgttatttcaaggacaatcaatacaagcctttccgtccacatgctcccactacttcagctactcctaccaccagagtgacaagtgcttccacctcagctgctccttctttctctgctgcacctcagcgttctgagtcttcttctcccataaagaaggctctcaaggctatcttttgcatgtgtgccaagacagctaagaaggtaaagaagatagagaggcgtcaaaaggaagattggattgcagtaggcaaggatgtctctgacatttctgatgatgaggagtttgttgatccttttgctgcttatgagactgctcaagacattggtagtggtgagggtccctctggcacttctcgtttcttcaatgaggagtcctgtcactccgaggagagcagtgatgatgaggagtcagatgcccctaccgagaatgttcctacagatcccgatgaggcagtggacgccgccgggcaagacatcgactctcctcactccggcgacactgagatcattccttctgatggcgatattgatgaggcttga

SEQ ID NO: 15317 - DNA, 4278 bp, Oryza sativa
  Clone ID: TFbOSC400458j.C1.o45.fg
atgtcatacacaccgcctggccgtcgtggtggcggtggcggcggggggagcggcaacggccgcggtggcgcaagcggcagcggcggggggaatggcgcagacggcgcattacttccgctcgtgtctcaggggagagacgcatcgcacaccgctcgcctcccagtcctctcgaggacgaactacccggattgggcgctcctgatgcgcgtcaacctgcaggcacaggggctgtggacggcgatcgatcccggctacgcggagtttcgtgaagatcgggcggctctctcggcaatccttcaggcggtgccgcgtgagatgttgcgcgggctggcaaagcatgacacggcgaaggcggcgtgggacgccatcaagaccatgcgggtcggcgtcgaccgtgtgcgtgaggcgaaggagcagggcttccgtcgtcaatttgagtcgatgcgattcaaggagagggagacgccggaggagtttgcgatgcggctcactgctgtcgtcgcagacattcgcgacatgggtggagtcatggaagatgaacacgtcaacaagaagctgctgcgcgttgttcccaagaagtataagccggtggctatctctctcgagcagctgctcgatgtgaagaccatggcgctggaggagctagttgggcggctgtcaacagtggattcttacagcgatgatgaggagggaagcaatggcggcaaattgtacctcacggaggaacaatggcaggcacgtgtgaagcagcgggagcaggagggctctggcaacagcggcaataagggccgcggcgcgcccggcgcgcagaatcaccgaggcaagcccggtgggtcaccaaagggcaaagaggcggccactggtgcgaacagcagccgcgacatctcaagggtaaagtgcttcaattgtgatgaatttggtcactatgcaaggcagtgccgcaagccacgtcgccaacgccggggagaggcgaacctggtgcaagccgccgaggaagaaccgacgttgcttatggcacatgtcgtaggggtgtcacttgctggcgaggcgacactcggacgaacacctagtggacaggaggtacacctcacggagaagaaggtgatcctggaccacgaggatggtggagaggaggaggtgacaggagattggtttctggataccggcgccaccaaccacatgactggagtgcgttcggcgttcgccgagctcgacaccggcgttgttgggacggtgaagtttggcgacggctctgtgattgaaatccaggggcgcgggaccgtggtgttccgatgcaagaatggtgatcaccggtctctcgacgcggtgtactacatcccgaagctgcgcaagaacatcatcagcgtcggccgtctcgacgcgcgcggctacgacgcacatatctggggcggggtctgcacactccgtgatcccaatggtcttctcctcgcaaaggtaaaacgagacataaattatctctacatactcaagctgcatattgcaaatccagtctgcatggcggcgagcggtggcgacacggcatggcggtggcatgcgcgtttcggacacttgaacttccagtcactccggaggctggcccaggggaacatggtccgcgggcttccgaccattgatcacactgatcaactgtgcgacggttgtctcgcgggcaagcaacgacgactcccgttcccggaggaggccaagtttagagcacaggaggcgctcgaactggtgcacggcgacttgtgtgggccgatcacgcctgcgaccccaggcggcaggaagtatttcctgctcctcgtcgacgatatgagccggcatatgtggatacggctcctctccggcaagcatgaagcggcgacggcgatcaaacagttccaagccggcgttgagctggagtccgggcgaaagctgcgggctctgaggacagatcgtgggggggaatttacctccgtggagttcatggactactgcaccgatcgcgggatgcggcgagagctcactgctccttactccccgcagcaaaacagagtcgtggagcggcgcaatcagaccgtcgtcgcggcggcgcgctccatgctcaaggcggctgggctgccggcgcggttctggggggaggctgttgtggcggcggtgtacgttctgaatcgctcgccaacgaaggcgctggatggtgtgaccccatatgaggcgtggcatgggcgacgtccctcggtcgaacaccttagggtgtttggctgtgtcggctacgtcaagacggtgaagccgaacctgcgcaagcttgacgatcgaggtacgaggatggtctttattggctatgaacaggggtcgaaggcataccgcatgtatgatcctgtggcgcagcgcgtctgcgtgtcgcgggatgtcgtttttgatgagacggcgacatgggcgtggcgtgatcctgaggatgcggcgactgaagaagaagagttcacggtggatttctttgtgagccctgtggcgccctctgttgctgatgcgggcgagcagacaggaacgccggtgcaggcaggcgtgtctccggtgtcgacgggcgttctgtcctcaccaccgcgagcgccaaatggggagttttgcacaccaccaacttcagtgacgccagaaacagatggaggccctgttaggtatcgccgagtgcaagacattctctccactactgaacctgttttggatttcgactacagtgatcagtgtttgattgctactgaagaaccaacaagctttgtggaagcagagaagcatgaatgctggaggagggcaatggtggaagaattgagatcagttgaggaaaatcagacttggtcacttgctgagttgccggcagggcacaaagccattgggcttaagtgggtctataaattgaagaaggatccatctggtgcgattgtgaagcacaaggcaagactagttgccaaaggttatgtgcagcagcagggtgttgacttcgatgaagtgtttgcacctgtggcaagaatggagacagtgagattgttggttgcactagctgcacagaaagggtgggagatacaccacatggatgtgaagtctgcattcttgaatggagagcttgaggaagaagtttatgtagtgcaacctcctggatttgatgacaagaccaatgcaagcaaggttttgaaactgagaaaggctttgtatgggttgaggcaggctcctagggcttggaatgccaagttggacaacacactgctgtctttgaagttcaataaatctgcaactgaaagtgctgtttatgtgaggggagttggggactcaaagctgatagtgggagtgtatgtggatgatcttattatcactgggtctcagaaaaaggagattgatgcattcaagttgcagatgaagcagaggtttaacatgagtgatttgggttttctgagctactatttgggaatggaagttgttcagaaaggagaagggatttttctgtcacaaagtgcctatgcaggaaaaattctggagaaaacgggcatggagggctgcaatcccactcaagtacccatggaggcaaggctcaagctgagtaaagaaggcactggagaatgtgttgatccaacagagtatagaagtatagttggcagcttgaggtacttggtaaacactagacctgatctggcatattctgttggttatgtcagtagattcatggaaaaaccaacaagtgaacattgggcagcagtcaagcatatactgagatacatctcagggactatcaagacaggttgctggtatggaagagaagaagttggaaatgcaaagttggttgggttcagtgatagtgatatggcaggtgatcttgatgatagaaagagcaccacaggtgtattgttcaggtatggtggaagcctgatcagttggcaatctcagaagcaaaaagttgttgctctatcatcatgtgaggcagagtacatagctgccactactgctgcctgtcaaggtatttggctgagtcggctgattgctgagctgcttgatgcagaacccggccaaacaacacttatgattgacaacaagtcagcgattaatctttgcaagaaccctgtattccatgacagaagcaaacatattgatacccgctaccattttatcagggagtgtgtggagaagaagcaaattgcagtggagtatgtctgttctgaagatcagcttgctgatttgttaactaagcctgtcggacgagttcgtttcaaggaattgcgaaggaagatgggtttggataggacacttcaagattag

SEQ ID NO: 15318 - DNA, 4635 bp, Oryza sativa
  Clone ID: TFbOSC401327j.C1.o24.fg
atggccacctgcatcaatggcggcgagctgcaagttcgggtcgtgagccggcgactcgtgcaggcctccgacgagtccctccggccgcacgtcctcgccgtctccaacctcgacctcctcccgcagtccatccaggtctccatgatctgcatctaccccaacccacccacctccgccggcggcttccacgacgtcgtcgcggcgttcgccgccggcttgccgtcgttgctcaaccacttcttcccgctcgccgaccgcatcgccgtcaacccttgctccggcctccccgagatccactgctacaaccaaggcgcggagctcgtcgtcggcgaggccgacgtggctctcgctagcctggactacggtagggtcggggagtcgatccagaagatcctgctgccgtacgccggcgacgtggcgctgtcggtgcagtactggaacgatccggcgatgtcatacacaccgcctggccgtcgtggtggcggtggcggcggggggagcggcaacggccgcggcggcgcaagcggcagcggcggggggaatggagcagacggcgcattacttccgctcgtgtctcaggggagagacgcatcgcacaccgctcgcctcccagtcctctcgaggacaaactacccggattgggcgctcctgatgcgcgtcaacctgcaggcgcaggggctgtggacggcgatcgatcccggctacgcggagtttcgtgaagattgggcggctctctcggcaatccttcaggcggtgccgcgtgagatgttgcgcgggctggcaaagcatgacacggcgaaggcggcgtgggacgccatcaagaccatgcgggtcggcgttgaccgtgtgcgtgaggcgaaggagcagggcttccgtcgtcaatttgagtcgatgcgattcaaggagagggagacgccggaggagtttgcgatgcggctcactgccgtcgtcgcggacattcgcgacatgggtggagtcatggaagatgaacacgtcaacaagaagctgctgcgcgttgttcccaagaagtataagccggtggctatctctctcgagcagctgctcgatgtgaagaccatggcgctggaggagctagttgggcggctgtcaacagtggattcttacagcgatgatgaggagggaagcgatggcggaaaattgtacctcacggaggaacaatggcaggcacgtgtgaagcagcgggagcaggagggctccggcaacagcggcaataagggccgcggcgcgcccggcacgcagaatcaccgaggcaagcccggtgggtcgccaaagggcaaagaggcggccactggtgcgaacagcagccgcgacatctcgagggtaaagtgcttcaattgtgatgaatttggtcactatgcaaggcagtgccgcaagccacgacgccaacgccggggagaggcgaacctggtgcaagccgccgaggaagaaccgacgttgcttatggcacatgtcgtaggggtgtcacttgctggcgaggcgacactcggacgaacacctggtggacaggaggtacacctcacggagaagaaggtgatcctggaccacgaggatggtggtgaggaggaggtgacaagagattggtttctggataccggcgccaccaaccacatgactggagtgcgttcggcgttcgccgagctcgacaccggcgttgttgggacggtgaagtttggcgacggctctgtgattgaaatccaggggcgcgggaccgtggtgttccgatgcaagaatggtgatcatcggtctctcgacacggtgtactacatcccgaagctgcgcaagaacatcatcagtgtcggccgtctcgacgcgcgcggctacgacgcacatatctggggcggggtctgcacactccgtgatcccgatggtcttctcctcgcaaaggtaaaacgagacataaattatctctatatactcaagctgcatattgcaaatccagtctgcatggcggcgagcggtggcgacacggcatggcggtggcatgcgcgtttcggacacttgaacttccagtcgctccggaggctggcccaggggaacatggtccgcgggcttccgatcattgatcacactgatcaactgtgcgacggttgtctcgcgggcaagcaacgacgactcccgttcccggaggaggccaagtttagagcacaggaggcgctcgaactggtgcacggcgacttgtgtgggccgatcacgcctgcgaccccaggcggcaggaagtatttcctgctcctcgtcgacgatatgagccggcatatgtggatacggctcctctccggcaagcatgaagcggcgacggcgatcaagcagttccaagtcggcgttgagctggagtccgggcgaaagctgcgggctctgaggacagatcgtgggggggaatttacctccgtggagttcatggactactgcgccgatcatgggatgaggcgagagctcactgctccttactcccctcagcagaacggagtcgtggagcggcggaatcagaccgtggttgcggcggcgcgctccatgcttaaggcggctgggatgccggcgtgcttctggggggaggcggttgtggcggcggtgtatgtgctgaaccggtcgccgacgaaggcattgaatggcgtgaccccccatgaggcgtggcatgggcgacgtccctcggtcgaacacttgagggtgtttggctgtgtaggctacgtcaagacggtgaagccgaacctgcgcaagctcgacgatcgaggtacgaggatggtgtttattggctatgaacaggggtcgaaggcgtatcgcatgtatgaccctgtggtgcggcgcgtttgcgtgtcgcgtgatgtcgtcttcgacgaggcggcgacatgggcgtggcgtgatcctgagacagaggcgactgaagaggaggaattcacggtggatttctttgtgaatcccgtggactctgttgttgccgacttgggcgaacaggctagcacgcctgtgcagggaggcacgtacccggcgtcgacggccactccgccctcaccaccggaagtgccggcgggggtggagttttgctcaccaccaaactctgtcacgccagggacaaatgaaggccctatcaggtatcgccgagtgcaggatatcctatctgctactgaacctgtccttgattttgattatagcgaccaatgcttgctggcaagtgaggaaccaatgagtcttgcagaagctgaacaacagttgtgttggaggcaggcaatgcaagaggagctaaagtccattgaagacaatcagacttggagctttgctgagctccctgttggacataaagcaattgggttaaagtgggtctataaggtgaaaaaggatccatcaggagttgtggtgaaacacaaagcaaggttggtagcaaagggatatgtgcaacaacaaggaattgattttgaggaagtgtttgccccagtggctagaatggaaactgtgaggctcctgattgcagtagctgcaaacaaaggatgggagattcatcacatggatgtgaagtctgctttcctgaatggtgatttggaagaggaagtttatgttgtgcagccacctggttttattgagaaaggaaaagaaggccaggtgttgaggctcaagaaagctttgtatgggctaaagcaggctccccgagcatggaatgcaaaactgcacaacactttgatttctctgaatttcatcaagtctgaaactgagagtgcagtgtatgaggagatgaagaagaaatttcgcatgagtgacttaggtctgctgagttactatctgggaatggaggttgtccaaaaggatgatggagtgtttctgtcacaaactgcttatgcagcaaaaatcctagaaaagacaggaatggaaggctgcaattctactcaagttcccatggaagctaggttgaaactgaagagggagagtggaggggaaggagttgattcaaccatgtatagaagcactgtgggaagtctcaggtatttggtgaacacaaggccagatcttgcttactctgtcgggtatgtgagcagatttatggagaaaccaacttctgaacattgggcagcagtgaagcatattctgagatacattgcaggtactcttgatgttggctgctggtttgggagaagggaaaagggtgaactcagattgattgggttcagtgacagtgatatggctggggatttggatgataggaagagcaccacaggtgtactgtatatgctgggagacagtttgatcagctggcaatctcagaaacaaaaggtggtagctttgtcgtcatgtgaagctgagtatattgctgctactactggtgcttgtcaagggatttggctcaataggctattggcagaattacttggagaggaccctggccaaactgtgatgaaagttgataacaaatcagcaatcaatctctgcaagaatccggtactccatgatcgaagtaagcacattgacactcgatttcattttatcagggagtgtgtggagaagaagcaaatcgctgtggagtatgtgcgaacagaagatcagcttgcagatatactgactaagcctgttggacgagttcggtttcttgaactccggaagaagatgggtttggagcaggcacatcaagattag

SEQ ID NO: 15319 - DNA, 4281 bp, Oryza sativa
  Clone ID: TFbOSC401947j.C1.o42.fg
atgtcatacacaccgcctggccgtcgtggtggcggtggcggcggggggagcggcaacggccgcggcggcgcaagcggcagcggcggggggaatggagcagacggcgcattacttccgctcgtgtctcaggggagagacgcatcgcacaccgctcgcctcccagtcctctcgaggacaaactacccggattgggcgctcctgatgcgcgtcaacctgcaggcgcaggggctgtggacggcgatcgatcccggctacgcggagtttcgtgaagatcgggcggctctctcggcaatccttcaggcggtgccgcgtgagatgttgcgcgggctggcaaagcatgacacggcgaaggcggcgtgggacgccatcaagaccatgcgggtcggcgttgaccgtgtgcgtgaggcgaaggagaagggcttccgtcgtcaatttgagtcgatgcgattcaaggagagggagacgccggaggagtttgcgatgcggctcactgccgtcgtcgcggacattcgcgacatgggtggagtcatggaagatgaacacgtcaacaagaagctgctgcgcgttgttcccaagaagtataagccggtggctatctctctcgagcagctgctcgatgtgaagaccatggcgctggaggagctagttgggcggctgtcaacagtggattcttacagcgatgatgaggagggaagcgatggcggaaaattgtacctcacggaggaacaatggcaggcacgtgtgaagcagcgggagcaggagggctccggcaacagcggcaataagggccgcggcgcgcccggcacgcagaatcaccgaggcaagcccggtgggtcgccaaagggcaaagaggcggccactggtgcgaacagcagccgcgacatctcgagggtaaagtgcttcaattgtgatgaatttggtcactatgcaaggcagtgccgcaagccacgacgccaacgccggggagaggcgaacctggtgcaagccgccgaggaagaaccgacgttgcttatggcacatgtcgtaggggtgtcacttgctggcgaggcgacactcggacgaacacctggtggacaggaggtacacctcacggagaagaaggtgatcctggaccacgaggatggtggtgaggaggaggtgacaagagattggtttctggataccggcgccaccaaccacatgactggagtgcgttcggcgttcgccgagctcgacaccggcgttgttgggacggtgaagtttggcgacggctctgtgattgaaatccaggggcgcgggaccgtggtgttccgatgcaagaatagtgatcatcggtctctcgacacggtgtactacatcccgaagctgcgcaagaacatcatcagtgtcggccgtctcgacgcgcgcggctacgacgcacatatctggggcggggtctgcacactccgtgatcccgatggtcttctcctcgcaaaggtaaaacgagacataaattatctctatatactcaagctgcatattgcaaatccagtctgcatggcggcgagcggtggcgacatggcatggcggtggcatgcgcgtttcggacacttgaacttccagtcgctccggaggctggcccaggggaacatggtccgcgggcttccgatcattgatcacactgatcaactgtgcgacggttgtctcgcgggcaagcaacgacgactcccgttcccggaggaggccaagtttagagcacaggaggcgctcgaactggtgcacggcgacttgtgtgggccgatcacgcctgcgaccccaggcggcaggaagtatttcctgctcctcgtcgacgatatgagccggcatatgtggatacggctcctctccggcaagcatgaagcggcgacggcgatcaagcagttccaagtcggcgttgagctggagtccgggcgaaagctgcgggctctgaggacagatcgtgggggggaatttacctccgtggagttcatggactactgcgccgatcatgggatgaggcgagagctcactgctccttactcccctcagcagaacggagtcgtggagcggcggaatcagaccgtggttgcggcggcgcgctccatgcttaaggcggctgggatgccggcgtgcttctggggggaggcggttgtggcggcggtgtatgtgctgaaccggtcgccgacgaaggcattgaatggcgtgaccccccatgaggcgtggcatgggcgacgtccctcggtcgaacacttgagggtgtttggctgtgtaggctacgtcaagacggtgaagccgaacctgcgcaagctcgacgatcgaggtacgaggatggtgtttattggctatgaacaggggtcgaaggcgtatcgcatgtatgaccctgtggcgcggcgcgtttgcgtgtcgcgtgatgtcgtcttcgacgaggcggcgacatgggcgtggcgtgatcctgagacagaggcgactgaagaggaggaattcacggtggatttctttgtgaatcccgtggactctgttgttgccgacttgggcgaacaggctagcacgcctgtgcagggaggcacgtacccggcgtcgacggccactccgccctcaccaccggaagtgccggcgggggtggagttttgctcaccaccaaactctgtcacgccagggacaaatgaaggccctatcaggtatcgccgagtgcaggatatcctatctgctactgaacctgtccttgattttgattatagcgaccaatgcttgctggcaagtgaggaaccaatgagtcttgcagaagctgaacaacagttgtgttggaggcaggcaatgcaagaggagctaaagtccattgaagacaatcagacttggagctttgctgagctccctgttggacataaagcaattgggttaaagtgggtctataaggtgaaaaaggatccatcaggagttgtggtgaaacacaaagcaaggttggtagcaaagggatatgtgcaacaacaaggaattgattttgaggaagtgtttgccccagtggctagaatggaaactgtgaggctcctgattgcagtagctgcaaacaaaggatgggagattcatcacatggatgtgaagtctgctttcctgaatggtgatttggaagaggaagtttatgttgtgcagccacctggttttattgagaaaggaaaagaaggccaggtgttgaggctcaagaaagctttgtatgggctaaagcaggctccccgagcatggaatgcaaaactgcacaacactttgatttctctgaatttcatcaagtctgaaactgagagtgcagtgtatgtgagaggaacaggaagctcaaggttgatagtgggagtgtatgtggatgatctgattatcagtggggctcaagcaagtgaaattgattttttcaaggaggagatgaagaagaaatttcgcatgagtgacttaggtctgctgagttactatctgggaatggaggttgtccaaaaggatgatggagtgtttctgtcacaaactgcttatgcagcaaaaatcctagaaaagacaggaatggaaggctgcaattctactcaagttcccatggaagctaggttgaaactgaagagggagagtggaggggaaggagttgattcaaccatgtatagaagcactgtgggaagtctcaggtatttggtgaacacaaggccagatcttgcttactctgtcgggtatgtgagcagatttatggagaaaccaacttctgaacattgggcagcagtgaagcatattctgagatacattgcaggtactcttgatgttggctgctggtttgggagaagggaaaagggtgaactcagattgattgggttcagtgacagtgatatggctggggatttggatgataggaagagcaccacaggtgtactgtatatgctgggagacagtttgatcagctggcaatctcagaaacaaaaggtggtagctttgtcgtcatgtgaagctgagtatattgctgctactactggtgcttgtcaagggatttggctcaataggctattggcagaattacttggagaggaccctggccaaactgtgatgaaagttgataacaaatcagcaatcaatctctgcaagaatccggtactccatgatcgaagtaagcacattgacactcgatttcattttatcagggagtgtgtggagaagaagcaaatcgctgtggagtatgtgcgaacagaagatcagcttgcagatatactgactaagcctgttggacgagttcggtttcttgaactccggaagaagatgggtttggagcaggcacatcaagattag

SEQ ID NO: 15320 - DNA, 6309 bp, Oryza sativa
  Clone ID: TFbOSC408405j.C1.o8.fg
atgtcagacttagggggaaagaacggagaaaatggaaatgaagatggagcgagcagcaaggaaactccatcacccaagggagctactataccttttggttacaggaaacataccattccccctcacaactttgtctccgtgccttccgggcgtgctcctcaatttgatgggacacattacgccgcttggaagcacaagatgaagttgcatctaatctctttgtatctaagtatttggaaagttgtttgtaaaggtgttgatgtaccccatgatgacatggagctcacttcggagcaagagcaactcatccaccgcaatgctcaagcttccaatgcaattctctccgccttgagtccggaggagttcaacaaggttgatgggcttgaggaggccaaggagatatgggatactttgcaattggctcatgagggatcacccgccgttcgtgaggccaagattgacttattggaaggaaggcttggaagatttgtgatggatgacaaggagacaccacaagagaagtatgataggacgatgattcttgtcaacaagattaaaggacttgggagtgaggacatgacaaatcattttgtgctcaagagacttctccgtgcacttggtccaagaaatcccactcttgtatcaatgatacgggaaaggaaagacttcaagagactcaccccaagtgacattcttggaagaattgtgtctcatgagatgcaagaagaggaagctcgtgaaagattcaagcactttcttcgcaacagtggctatggcaaagggaggaaggatgatgacaagggaaagaggcaatcaaagagggcttgcttcaattgtggcgaatatggccacttcgtagccaattgtcccaagtcaaatgaagctaaggctaagggaggcaagaagaagccagagcatgctcatgtggcggaggcacacatggcggaggtgttttactccggagatgaagaagatcccgaggtcaagcccaagcccaagccgaaagacaaggttgaaggagaaggtggtgttgctaccgtcgccttcaagtcatcttcttcaagcaagaagcgtctcttcaacaacttgagtgatgacgacgacgacttctaccactactcttgtttcatggcccaaggccgcaaggtgatgactcaaaagcgctctcacacctctcttgatgttgattctagtgatgaggaaagtgataatgaattagatgatgtgcttaagagctttagaaaacccgctatgcaacatttggctaagttaatgagagctttggatagtaaagaacaatcgctcgaaaggcaagaagaattacttattcttgagaagaaaagaaaccttgccttagaggagagcctagctaaagaatgtgctaaaaatgaacaactggctaatgagcttaatttggctaatggttctctagctagccttagtgatgtcaatgaaactcttcaagagaagtttgctagtttagacaaaagtcataaagatcttgaagttcaatttgacactctttggaatagcacttctcaaccaaatgtggtttctaattcttccaacccatctacaagcaatggttgtgctaggtgttacaatattgatttgaactctcatactactaatgttgatgctatgcaagctcttaagaaagagaatgaaaggttgggcacattggtgaaatatggatgcatgaagacataccattcaaaagatgccctttacaagacaatcaatcatcttaacatggatggacacgggctcgggttttctggtggaagtcctgtgtctaagcgtgtgatggcatactcctccggtggctcaagttgggttgtggacagtggctgcaccaatcatatgacgggagagaggagtatgtttacaagtcttgatgagggggctggaagtcgtgaaaatattgtctttggagatgatggtaaaggaaaggtaatggatctcggtaagattgccatttccaagaatcaatctctatctaatgtcctccttgtcaattcattaagagtgaatccggaggcatgcttgattgctaaatcctctatgggttggctatggcaccgtaggctagcccatgttggaatgaggaatttggcatctcttctaaaaggggaacacattcttggtctatataatgtttcttttgagaaagattgtgtgtgtagtgcttgccaagccgggaagcaagttgggagtccacatcctataaaaaacatcatgactacaacaagaccactcgagcttcttcatatggatttatttgggcccgtggcctacataagcattggaggtaacaagtatggtttcgtcattgttgatgatttttcacgcttcacttgggtgtactttctccatgacaaaagcgaagatcaagatgtcttcaagcgcttcgcaaagcaagcccaaaacctctacgatctcactatcaagagggtgcaaagcgacaatggaggagaattcaagaacactcaaatggaggaatttcttgatgaagaaggaatcaagcacgagttctctgccccctatgatcctccccaaaacggcattgttgagaggaagaaccgaaccctcattgaagccacaagggcaatgcttgatgagtacaagacttcgaatgtcttttgggcggaagccgtgagtaccgcatgtcatgccatcaaccgcttgtacctccacaagatcctaaagaaaacctcatatgagctcttgagtggtaagaagcctaatgtttcatattttcgtgtctttgggagcaaatgttttattttaagtaagaggcctcgctcatctaagttttcacctaaggtggatgagggattcttacttagctatgaatctaatgcacatgcctattgtgtcttcaacaaaacctctggtattgttgaagtcactagggatgtgacatttgatgaatctaatggctcccaaggagagcaagttgttgtacatgttgtagggggtgtggatccaaatcaagctattggtactaaggctattggagacatacgaccagtcgagacgcaggatgaccaagaagatagggatcaacctccgtcaccggcatccaacagccctacaagtgttgtgtctgctgagtcggaaattccgggtcctattgaccggaacctccggacatctctaggcccggaagttccgggttctatagtccggaacctttggatcagtggcagtgaagacatgccaacggcacaagtggatgggatcgatgctgagggcactttagagcattctgatcaggctcaggtccccccagtgcaccatccaaggatacatcacactgtccaaagagaacatcctgttgacaacatacttggtgacataagaaaaggggtaactactcgctctcgtatcacaagtttttgtcaacacttctcgtttgtctcttctttggaaccaaccagggtggaagatgtgcttggtgatccggattgggtgatggctatgcaagaggagttgaataacttcactcgcaatcaagtatggactttggtggagagacccaagcaaaatgttatcgccaccaagtggatctttcgcaacaagcaagatgaacatggggtggttgtaaggaacaaagcccggttattccaaatggatgtcaagagtgcctttctcaatggacctatctcggagttagtctatgtggagcaaccaccggggttcgaggatccaaagttgccaaaccatgtgtacaagctccacaaggcgctctacgggctcaaacaagcccctagagcttgtagtatcatgactaaaaggttcgagatgtctatgatgggcgagttgaccttcttcctcgggctacaagtgaagcaagcactagagggcaccttcatctctcaaaccaagtacgtgaaagacatactcaagaagtttgggatggaggatgccaaacctatcaagacgcccatgcctactaatggacacctagacctcgaccataatggtaaatgtgtagaccaaaaggtatatcgctccatgataggatctttgctttacttatgtgcatctcgtctcgacatcatgcttagtgtttgcatgtgtgcccgttttcaagcggagcctaaagagtgccatttgattgccgtcaagagaattctaagatatttagttcacactcctaatcttggcttgtggtatcctaagggttgtggctttgagcttttgggctattccgattcggattatgccgggtgtaaggttgatagaaaaagtacaaccgggacttgtcaattccttgggtggtcccttgtttcttggtcctctaagaagcaaaattccattgccttatcaactgccgaagccgaatatgttgccgccgattcttgttgtgcccaactcctttggatgagacaaaccctaaaagactttggctacaacttcaccaagatcccactcctatgtgataatgagagtgccatcaaaatagccaacaatcccgtccaacactcaagaaccaagcacatagacattcgccaccacttcttgagagatcatgagactaaaggagacatatgccttacccatgtgacaaccgaaagtcaattagccgacattttcaccaagcctttagatgagaaaagattttgcgagctgaggagtgagctcaatatcttagactctcgtaacattaggctggaagttccggtcaccccagtccggaacttccgggggtcggggggtataaatacccagggggagcctgagcctgtagtcattatgcctcgtgagaagagacaaaagctttctcaagatattcctgctgactcgagccccccgattccgatccattccaggagggctggtagcattgtcattcgtgatgcaccccgctctccctccccaactgcatctgagtcagatgatggtggcaatgaggatgagccaggttctgaaagcaatcctttgaggctgtacaagacaagggctgttgatcctgatcctaaacgcccaagagtgaactatctgaagaatctactcaagtgtggaaaggacagaatggttagtcctgatactctgccagctgactctcaggatgacagattcaggaccttggtgcaggttgattggtataactctgtgatcatgggaagatctcatccagtggtagagatgaagtggctagactggaagtacatgtcctcaaagaacaacatagtcttcaatgaggtacgcaaggtgtgtgagcacaagcacgcggcagatttgttggccttgcagtattcctggaatgaggaagtgattggacagttctactccactgctttctttggcaccaccaagaaggggcttgattttgtgaagtggaccattcaggggcagcagtatagggtttctatggcacaatttgttgcagctttggggttagatgatgatgacctgagtcgtccacatatctttgtagaggatgctctgtcaccgaccagcactacctttatgtatgagaaggatgctcccaaggattgtttggggactactcgagggttgcatccatattatagagtgctatactctatcttcaggtggtctttgctccccaaagtgggagatgctacagctcttccaggtaggcatgcgctcctcctcagtcgcatgcgctacaacaagcccgatttcagcatcatgaagcttatctggagtgagatctatgagacagtgtgtgagccaaagaggggttgcatctatgctccttatatcatgaagatgattgaggccaagactgggatttgttatttcaaggacaatcaatacaagcctttccgtccacatgctcccactacttcagctactcctaccaccagagtgacaagtgcttccacctcagctgctccttctttctctgctgcacctcagcgttctgagtcttcttctcccataaagaaggctctcaaggctatcttttgcatgtgtgccaagacagctaagaaggtaaagaagatagagaggcgtcaaaaggaagattggattgcagtaggcaaggatgtctctgacatttctgatgatgaggagtttgttgatccttttgctgcttatgagactgctcaagacattggtagtggtgagggtccctctggcacttctcgtttcttcaatgaggagtcctgtcactccgaggagagcagtgatgatgaggagtcagatgcccctaccgagaatgttcctacagatcccgatgaggcagtggacgccgccgggcaagacatcgactctcctcactccggcgacactgagatcattccttctgatggcgatattgatgaggcttga

SEQ ID NO: 15321 - DNA, 1443 bp, Oryza sativa
  Clone ID: TFbOSC900201j.C1.o3.fg
atggcacagggctggtgtcctgctgctagggggctcaatcctgcctgcctgtcccgggggttccggccatgtgccttttgtatcatgtttgttcggtgtaccccggcttttcctgggacggggattaatacactagcattcgggaaaagaataagtgaaacaaacaacacatcaacaagaagagttagttcctttaaggtcctgtccctagttctgatgtttaacagagaaaaaggaaagaatgtcagcgggtatgcctccagtaactcaagttttcaactcaatccaccactagcctcaagagagttaacaagggcacacccttggtccattccaagcatgctgcttagttcacagcgaccattggttggaagtcgagaccaaaatcagtatgtgtttgatcgagcatttgccacccaggtcaatgagcttccaatgccagaagagcatgtccccttttgtcatgattgtagagaacaaggacactatgcccttaattgtccatgggtatatgccaaagaagccccttcctttggtttagcagggcagacatcgctaaaccagcctcctcgcaccaagtcaagcttgcagcctagtgtacaaagaagagagcccattagagagaatccattgaatcccggaaaatgctttcctcctagcctttcgtaccacgtggggtcacgtactaagcaagccaaaggcaagaagagtaagaatcagaagagaaaagcaccgatgcgaactgaagaagaagtacgtaagatgactattaccagcaccgaatggcctccagcagggataactattcctagacgtcaaagaggaaataccttccgaggtgcacgacagttgacccagcacctcctaagccatggcggcagagtatctgatagtgaagggtcagatcaagtctcctcggattatgaagatgagtctctccgacatctcggcgaggaagagatggaatcaaaagcatgcccccgttgtggagaaattggacacgttgctagcatgtgtctcacactttgccctcattgtgaggaagaccatccaccaggtggatgtcccacccgcaaggtcacatgttttctatgcgaaggtacaaaccatgtgcccaaggattgccaactcagtgtgttgttgaccaagactgcagaaatccaacgaacaaccctacgattgtctcatcagctagtcagctccaacatcaacatcgacgatatcatccccagcaccaatgctcctcctgctgcacctgactctgcagtaaatcatagcaataataccttcaacaccaaccattctctgcaccgacggcctcagcaaagaattgtcgtcgatggaagaagttgtgtctctccccgacctactccaggccgagcgaagggcaatcaatctcaggagtgcgataccaagcagaagaccgttatctgcttcaaatag

SEQ ID NO: 15322 - DNA, 1832 bp, Oryza sativa
  Clone ID: TFbOSC401021j.C1.o3.np
gagcgtacaaattgatcagtatgtgcgtggtgcacgatatgcggacgtgggaggtttttgtttttaagatattcacgataccctcggccccatgtcaccgacacgaagaatacaagaaacgcaagtctaaccatcaatgaaattcttcccgaggcgcacctcgccctcgctacggtcaacccatgcaataccaccagtcggtcactcaggctaactgccagccaggctacgcccctcgtcctcagatgaaccgtccggcacctcggccacagcagcgtgcccctagtggcactactgcgccaaacagtgttacctctttcaagtcaccgcagggaccgtcagcagttcagtgtttccggtgcaaccagatgggtcactatgccagagagtgccctcagaatcctaccaacaccaactccgggcatgctaatggcagcactgccagaactcctactccagcggcagctcagtctcgtcctagctctcaggcaagtggacaaggttctcgtgcttccaacagctttggtcgaggccgagtgaaccacattcaagctgagaccgctcaggatgctccagacattgtgatgggtatgttctctgtcaactccatacccgcaatagttctatttgattcaggagcttctcattctttcatatcacaagcttttgtgaaaagaaatggttggaaaacccaaaatttacgtgtacctatgatagtacattcccctgggaggaatataagggcaactcaaatatgcccggaagttaaccttagaactgaggaagttgacttcctagccaaaccgatagtcctagactcgcaaaacttggacatcatcctagggatggattggttagctaagcacaaaggacagatagattgtgccgaaaagtccatcaccttgcaaggacctggaggaaagcaagtccgctttacctctaacacccctaccgcaagtcggtctatcctaacctgtttacaagtcacctccttggagtcggtgcccgtagtctgtgaatatcccgacgtattcccagaagaattaacgagtatgccaccagaccgagagattgagttcgcgatagaactggcaccaggcaccgcaccaattgcaaaaagaccctaccaaatggcagctaatgagttagcagaggtcaaaagacaaatcgaagaattggagagtaaaggttatgtgcgacctagctcatccccttggggagccccagtgcttctggttaaaaagaaggatggctctgagagaatggtaatcgactgtagagccctgaatgaagtaactataaataacaagtacccattgccacggattgacgatttgttcgatcaactaaaaggagcaagagttttctccaaaattgacttgagattaggttaccaccaactggaaatcagatctgaagatatcccgaagaccactttctcaacgcgttatggtctatatgagttcacagtgatgtccttcggactcaccaatgctccagcattcttcatgaacttaatgaacaaaatcttcatggaatacctggaccaatttgtcgtggtgttcatcgatgacatcctgatatactccaagaatgaggaagaacatgctgaacacctgaggctgataatggaaaagctcagggatcatcaactactcgctaaattctcaaaatgcgaattctggttagaccgagtagcatttcttggacacatgatctcctccaacggtgtcgaagtagatcccagcaaggttaaggctgtacttgcttggaacccgcccaagaatgtgtcagagatccgcagcttccttggcttagctggatattatcga

SEQ ID NO: 15323 - DNA, 3645 bp, Oryza sativa
  Clone ID: TFbOSC900048j.C1.o16.fg
atgcaataccaccagtcggtcactcaggctaactgccagccaggctacgcccctcgtcctcagatgaaccgtccggcacctcggccacagcagcgtgcccctagtggcactactgcgccaaacagtgttacctctttcaagtcaccgcagggaccgtcagcagttcagtgtttccggtgcaaccagatgggtcactatgccagagagtgccctcagaatcctaccaacaccaactccgggcatgctaatggcagcactgccagaactcctactccagcggcagctcagtctcgtcctagctctcaggcaagtggacaaggttctcgtgcttccaacagctttggtcgaggccgagtgaaccacattcaagctgagaccgctcaggatgctccagacattgtgatgggtatgttctctgtcaactccatacccgcaatagttctatttgattcaggagcttctcattctttcatatcacaagcttttgtgaaaagaaatggttggaaaacccaaaatttacgtgtacctatgatagtacattcccctgggaggaatataagggcaactcaaatatgcccggaagttaaccttagaactgaggaagttgacttcctagccaaaccgatagtcctagactcgcaaaacttggacatcatcctacggatggattggttagctaagcacaaaggacagatagattgtgccgaaaagtccatcaccttgcaaggacctggaggaaagcaagtccgctttacctctaacacccctaccgcaagtcggtctatcctaacctgtttacaagtcacctccttggagtcggtgcccgtagtctgtgaatatcccgacgtattcccagaagaattaacgagtatgccaccagaccgagagattgagttcgcgatagaactggcaccaggcaccgcaccaattgcaaaaagaccctaccaaatggcagctaatgagttagcagaggtcaaaagacaaatcgaagaattggagagtaaaggttatgtgcgacctagctcatccccttggggagccccagtgcttctggttaaaaagaaggatggctctgagagaatggtaatcgactgtagagccctgaatgaagtaactataaataacaagtacccattgccacggattgacgatttgttcgatcaactaaaaggagcaagagttttctccaaaattgacttgagattaggttaccaccaactggaaatcagatctgaagatatcccgaagaccactttctcaacgcgttatggtctatatgagttcacagtgatgtccttcggactcaccaatgctccagcattcttcatgaacttaatgaacaaaatcttcatggaatacctggaccaatttgtcgtggtgttcatcgatgacatcctgatatactccaagaatgaggaagaacatgctgaacacctgaggctgataatggaaaagctcagggatcatcaactactcgctaaattctcaaaatgcgaattctggttagaccgagtagcatttcttggacacatgatctcctccaacggtgtcgaagtagatcccagcaaggttaaggctgtacttgcttggaacccgcccaagaatgtgtcagagatccgcagcttccttggcttagctggatattatcgaagattcattgaaggattctctaagctagccagacctatgaccgagctattaaagaaggaaaagaaatttcaatggtctgcagcatgtgaaggcagctttcaagaaatgaagaaaaggttgaccactgccccagttctcaccttgccagatatccgaaaagattttgagatcttctgtgatgcatcaagacaaggcttaggatgtgtcctaatgcaagaacgaaaggttgtggcctatgcatccaggcagctcaggcctcatgaagtcaactatcccacccatgatctcgagttggcagccgtggttcatgctcttaagatctggaggcactatttaatcgggaacagatgtgaagtatacaccgatcacaaaagtcttaagtacatcttcactcagactgagttaaatatgaggcagagaagatggttggaactaatcaaggattacgatcttggaattcattatcaccccggtaaagccaacgtggtcgctgatgcgctaagtcgcaaggcctattgcaatgtagctcaaatacggcctgaccaagatcgcctgtgcagagaattggagaagttgaggctgaccgtggtacagtcaggtgtccctgccagcttgacagtacagcctaccctagagtcgcaaatccgggaagctcagaaagacgacgaagggataaaagagttaataaaaagaatacaggagaagaaagacaccaatttctccatagacgatcaaggcacagtttggtgcggtccacgcatctgtgtaccggccaagaaggaattaagagatctcatcctaaaggaagctcatgagtccgcctactccattcatccaggaagtacgaagatgtaccaagatatcaaggcatacttctggtgggctggaatgaagcgagatgtcacagaatacgtagccttgtgtgacatttgccaaagagtcaaggcagagcatcagaggccagctggtctgctacagcccctaccaattcccgagtggaaatgggaagaaatcggaatggatctcatcaccggtttgccaagaacccctagcgggtacgactccatctgggtaatcgtggatcgactcacgaaatcagctcatttcgtggcagtgaaaactacctttgatggaaagaaactagcagaactctacatgacccatgtcgtatgtagattcggctgtcccaagaagatcgtgtcagaccgaggcactcagttcacctcaaggttctggaaacagttgcatgaagctctcggaaccgatctaaattttagtacagcttaccatccgcagaccgatggtcagacagaaagagtaaaccaaatcctagaagacatgctacgtgcgtgtgccctggatttcgaaggcacttgggatcgttgtttgccgtatgctgagttctcatacaacaacagttaccaggccagtattcagatgtcgccgaatgaggcaatgttcggaagaaagtgccacacccccttgtgctggaatgaggtaggcgaagcgctggtattcggtcctgacatactcaaggcagcaaaagaacaagttaagctgatccgagaacgtttaaagacagcacagaaccgccaaaagaattacgctgacaatcggaggcgtgaccttgagttcggaaaaggagatcatgtgtacctgcgggtatcacctctccgtggtatgaggaggtttgggatgtccggcaagttagcaccccgctacatcggcccctacctcataaccgccagacgtggcgaagtggcttatcagcttgagttacctgaagaagagcaagtttccctgggtaatatcgagctggaaaagaatctgacctacaaggaaagactgatcaaggttcttgaagaggcagaacgtcagactcgaaggaagaccatcaagttctacaaagtccaatggagcaaccattctgaagatgaggcaacctgggagcgagaagatcttctccgcgccgagttcccggagctgctcccttag

SEQ ID NO: 15324 - DNA, 1149 bp, Oryza sativa
  Clone ID: TFbOSC415688j.C1.o7.fg
atggcctccaccaggaatgacaaaacgtcagagaagaaataccttccgaggtgcaccacagttgacagagcacctttagctaatggaggtagagtgtctgatagtgaagattcagatcaagtctcctcagatgatgaagatgaaatggaacgtaaggcatgctctcgttgtggagaaatcggtcatgttgccagctcgtgtgccactacatgcgttcattgtgaggaagaccatccacccgacaggtgtccaacgagcaggatcacttgtttcttttgtgaaggaactgatcatgtatcaaaagattgtcaattcagttttctgctgacgaaaaagatggctaaccaactcgccagttccaacggagagaagcatcaaggcaacaccaatcctcgccaagattacagtttcagcctaaatccagtgccaggacagaggaatcaaaatgagaaaagaaaatgccgagtccgggaagatatctgttgcttcaattgtcaaggaatgggtcatttcgccgacaagtgcccaaaaccgagaaacgtagctgccagcacgtcagtccacgcaactccctgcaatcagaagcttgctcctcagcgaattgtcatccatgcatcccgaagcagtcctatagcccgcgttgcaacagctccaactccagcgagtgcattaccacaaggtgtcaatgctcaatttcagccccagccatcagttgacaagacagaggtcagtatcggcattgtacctttggacgttccagcacagcagccaagaaatcaagtacaagatgaagaacccgagccaccaaccattctctgcaccgacagcctcagcaaagaattgtcgtcgatggaagaagttgtgtctctccccgacctactccaggccgagcaaagggcaatcaacctccggagggcgataccaagcagaagaccgtcatccgcttcaaacagcaatcagaaggaagcttctcctatgaatgatagcaatatgcagtcctatcacatcatcacagaaccaatcaaggatgatgcagtcactagaacaatgccagctatatctctccagaatcaaaatgagcagccacgcttgtggttttcagttcgctacttatcattgtgtaatcgaaagtttgcagcaatcatgtaa

SEQ ID NO: 15325 - DNA, 1260 bp, Oryza sativa
  Clone ID: TFbOSC411239j.C1.o1.fg
atggctgacaatgagaaaggcaataaggtcagaagtcaggacatcggtacctcaagctcccgagtgaatgaagcaccagacaccagttgtgtgacactggtccaacacctgattaaccagaaccgattgcttatagagatactacagcagcatcaaacgccaattctgaacctgagtcagatacaacctcaagtgcagttggaggcagtcccagcactcacaccacaagtcagcatgccgccagcatcccgaaggacccatggtgaagtgccacatgttgactcaaaagaagcaagtatcatttgttttatgtgtgatgagcacgggcactatgcaagggagtgtcctcagcagaaaagaaaaacaccaatgcgaaccgaagatgaagtccgtaagatgatcattaccagcacagaatggcctccactaggaatgacaaaacgtcaaagaagaaataccttccgaggtgcaccacagttgacagagcatcttttagctaatggaggtagagtgtctgatagtgaagattcagatcaagtctcctcagatgatgaagatgaaatggaacgtaaggcatgctctcgttgtggagaaatcggtcatgttgccagctcgtgtgccactacatgcgttcattgtgaggaagaccatccacccgacaggtgtccaacgagcaggatcacttgtttcttttgtgaaggaactgatcatgtaccaaaagattgtcaattcagttttctgctgatgaagaagatggccaaccaacccgccagttccaacggagagaagcatcaaggcaacacaaatcctcgccaagattacagtttcctcctaactccagtgccaggacagaggaatcaaaatgagaaaagaaaatgccgagtccgggaagatatttgttgcttcaattgtcaaggaatgggtcatttcgccgacaagtgcccaaaaccgagaaacatagctgccggcacgtcagtccacgcaactccctgcaatcagaagcttgctcctcagcgaattgtcatccatgcatcccgaagcagtcctatagcccgcgttgcaacagctccaactccagcgagtgcattaccacaaggtgtcaacgctcaatttcagccccagccatcagttgacaagacagaggccagtatcggcattgtacctttggatgttccagcacagcagccaaggaatcaagtacaagatgaagaacctgagcgtgagaaagttattgtctgttacaactgtagtacctgttaa

SEQ ID NO: 15326 - DNA, 1017 bp, Oryza sativa
  Clone ID: TFbOSC421348j.C1.o2.fg
atgtctcggtatgttgaccctaatgaccgttacgaaccacgtggtcgtaacagcaggttgtatgtgggccatatttctctacgtacaagggcagaggatcttgagaacctgttcagcagatatgggagggtgcgatttgtggatctgaagaatgaatatggctttgttgagtttagtgatccccgggatgcaaatgatgcgaggcttgatcttgatggccgaaagtatgatgggagtgacatcattgttcagtttgcaagaggggtcgaacgtggtcttggaggttctcgtggatataaagccagacccgcacatggttctgaccactgcttcaactgtgggatggaggggcactggcaccgtaactgcactgctggtgactggacaaataggtgctatggctgtggagagaggggtcatatattaagggaatgcaagaacagccccaaggatctcaagcaagagagaggctactcaaggtcccgttcacctcgtcgcagaaggagcccaagctatggcaagagtggacccccttctcattggggtagccatggtgctgatcgtgaggaaaggcttcattcaagaagggatggccgcggttacagccgcagccctcggcgccatgattcgccttccaatcagagaaaccacagccctaggcgctatgctttaccctccaatgagagatatgatggcactaggcgctacgcctcgccttcttatgggagagaccgcagtcccgggggcaatgctttgccagccaatgggagaagccacaacctcacatcagatggcatgaacccttcaccaagggagagagatgatcagaatgggagccacaggagaggtgacaacgattacctgcccagtaagagagatgatcagaatgggagctacaggagaggtgacagcgattacctctccagggagagagatgattacctgtccagggggagagatgatcagaatgggagccacaggagaggtgacagcgattacctgtcccgcgaccgttga

SEQ ID NO: 15327 - DNA, 918 bp, Oryza sativa
  Clone ID: TFbOSC401685j.C1.o63.fg
atgcctcgctatgatgaccgtgatcgctacgatgaccgttacggcggcaacacgaggctgtacgtaggtcgtctttcctcgcgcacccggacccgggaccttgaagaccttttcggcagatatgggagagtgcgatatgtggatatgaagcacgagtttgcatttgttgaatttagtgatgctcgggatgctgatgaggcaaggtacaacctggatggtcgggactttgatggaagccgcatgattgttgagtttgctaaaggggttccacgtggccctggaggatcacgtgaatatatgggcagaggaccaccacctggttctggccgctgctttaactgtgggattgatgggcactgggcccgtgactgcaaagctggagactggaaaaacagatgctatcggcgtggaagaagctactcaagatccccatcccctcgtcgtgggaggagccgtggtaggagctacagcaggagccgtagcaggagctacagccgctcccagtctccaaggagggatagccgtaatgaaaggagatcaaggagccctcgtgacagtcggagccctaggggaagcccccgtgacagtcgcagccctagggggagcccccgtgacagtcgcagccctaaggggagccctcgcgacacccagagccctaggggaagccctcgtgatagccgcagccctaggagaagtgcttcaccacccaacgggaggaaccgcagccctacccctaatgccagcaggagtcctgcaccaagggacagcaggagcccaatgagagctgacagccgtagccctgctgaccatgagcgccgtgacatgagtacagctgccaatggccggagcccaagccccagggattatgaagacaatggcaatcatcgggcctcgcctagaggaagcgcatccccttga

SEQ ID NO: 15328 - DNA, 207 bp, Oryza sativa
  unsure (1)..(207): unsure at all n locations
  Clone ID: TFbOSC900030j.C1.o15.fg
atggcagggatgttgatggaaagccgcattcttgtggagtttgctaaaggagttccacgtggtgctgntggtggttcacgtgaatatatggggagaggacctcctccaggaacaggtcgctgttttaactgtgggattgatggtcactgggcaagagactgcaaggntggtgactggcatgatgcgtacgccgcgcaccccgcatga

SEQ ID NO: 15329 - DNA, 1053 bp, Oryza sativa
  Clone ID: TFbOSC401054j.C1.o14.fg
atgccgcttagttcacagctaccattggttggaagtcaagaccaaaatcagtatgtgtttgatcgagcatttgccacccaggtcaatgagcttccaatgccagaagaggatgtccccttttgtcacgattgtagggaaccaggacactatgccctgaattgtccatgggtatatgccaaagaaaccccttcctttggtttagcagggcagacatcgctaaaccagcctcctcacaccaagacaagcttgcagcctagtgtgcaaagtagagagcccaatggagagaatccatggaatcccgggaattgctttcctcctagcctttcgtaccacgtggggtcacgtactaagcaagccaaaggcaagaagagtaagaatcagaagagaaaagcgccgatgcgaactgaagaagaagtacgtaagatggctattagcagcaccgaatggcctcccgcagggataactattcccagacgtcaaagaggaaataccttccgaggtgcccgacagttgacccagcaccttctaagccatggtggcagagtatctgatagtgaagggtcagatcaagtctcctcgaatgatgaagatgagtctccccgacatctcggtgaggaagagatggaatcaaaagcatgcacccgttgtggagaaattggacacgttgctagcatgtgtctcacactctgcactcattgtgaagaagaccatccaccaggggagtgtcccacccgcaaggtcacatgttttctgtgcgaaggaatgggtcatttcgccgacaagtgccccagaccgagaaacatagctgccagcacgtcagtccacgcaactccttgcaatcagaagcttgctcctcagcgaattgtcatccatgcatcccgaagcagtcctatagaccgcgttgcaacagctccaactctagcgagtgcattaccacaaggtgtcaatgctcaatttcagccccagccatcagttgacaagacagaggccagtatcggcattgtacctttggatgttccagcacagcagccaaagaaatcaagtacaagatga

SEQ ID NO: 15330 - DNA, 1434 bp, Oryza sativa
  Clone ID: TFbOSC26158j.C1.o1.fg
atggctgacaatgagaaaggcaataaggtcagaagtcaggacattggtacctcaaactcccgagtgaatgaagcaccagacaccagttgtgtggcagtggtccaacacctgattaaccagaacaaattgcttatagagatactacagcagcatcggatgccaattttgaacccgagtcagatgcaacctcaagtgcagttggaggcagtccaagcactcacaccacaagtcagcgcaccgccaacatcccagaaggcccctcatgccatgccacatgttgacccaaaagaagcaagtatcatctgttttatgtgtgatgagcaagggcactacgcaaggaactgtcctcagcagaaaagaaaagcaccaatgcgaaccgaagatgaagtccgtaagatgatcattaccagcacagaatggcctccaccaggaatgacaaaacatcagagaagaaattccttccgaggtgcacaacagttgacagagcatcttttagctaatggaggtagagtgtctgatagtgaagattcagatcaagtctcctcagatgatgaaggtgcgaagcctccccaaggttttaaccagaataaaatagaacttaaggcatgctctcgttgtggagaaatcggtcatgttgccagctcgtgtgcctctatatgcgttcattgtgaggaagaccatccacccgacaggtgtccaacgagcaggatcacttgtttcttttgtgaaggaactgatcatgtaccaaaagattgtcgattcagttttctgctgacgaagaagatggccaaccaacccgccagttccaacggagagaagcatcaaggaaacacaaatcctcgccaagattccagtttcagcctaactccagtgccaggacagaggaatcaaaatgagaaaagaaaatgccgagtccgggaagatatctgttgcttcaattgtcaaggaatgggtcatttcgccgacaagtgcccaaaaccgagaaacgtagctgccagcacgtcagtccacgcaaacccccgcaatcagaagcttgctcctcaacgaattgtcatccatgcatcccgaagcagtccgatagcccgcgttgcaacagctccaactccaatgagtgcactaccacaaggtgtcaatgctcaatttcagccccagccaccagctgacaagacagaggccagtatctgcgttgtacctttggaagttccaatacagcagctgagaaatcaagtacaagatgaagaacccgagtgtaagaaagttattgtttgttacaactgcaatgaagaagggcattactccaaaaactgtccccaaccaaggcaaaatcgacctccacattaccgccaatttacacgaagcagacattccaatcgtattgtggtcactggagcaaacgctgtacccgtgaggcctcgtgttaatcagaacccatag

SEQ ID NO: 15331 - DNA, 1995 bp, Oryza sativa
  Clone ID: TFbOSC405314j.C1.o1.np
atggatgaagtcgttgcgacgatggatatctctgaggcaaatgaaggctacgcgagctgcggctcggtaatcgagatgtctaggcaaatgaagactacacgggtcggtgcccgggctcaaccctggcctgcctgtcccgggataccggccgtaggcagggttgggtcggtacttttgttcacggctaggatgggtgaagggttatgtcacatctttacgacgggttccaaggccatggaatgcggagtaaagatgtgtcttgtgggttggcctgggttggcttgggacgagctggaacccaggtcgggttgccagtttggtctgaatcatcgtaggccttgggttaaggcagtactagatggtcaggtcagtgaagaagaggacatcgtcagttgtttgccgaagctccagaagactgcaggatctgctagtgaagtggaggaagcagtgaagccagctgtgaagcaggacaaaagacttagatctgttaaggtcctatccttagtttctaatctgtctctcccctttgttttccctctctccctctccaaacctttgcaacagatggctgacaatgagaaaggcaataaggtcagaagtcaggacattggtacctcaaactcccgagtgaatgaagcaccagacaccagttgtgtggcagtggtccaacacctgattaaccagaacaaattgcttatagagatactacagcagcatcggatgccaattttgaacccgagtcagatgcaacctcaagtgcagttggaggcagtccaagcactcacaccacaagtcagcgcaccgccaacatcccagaaggcccctcatgccatgccacatgttgacccaaaagaagcaagtatcatctgttttatgtgtgatgagcaagggcactacgcaaggaactgtcctcagcagaaaagaaaagcaccaatgcgaaccgaagatgaagtccgtaagatgatcattaccagcacagaatggcctccaccaggaatgacaaaacatcagagaagaaattccttccgaggtgcacaacagttgacagagcatcttttagctaatggaggtagagtgtctgatagtgaagattcagatcaagtctcctcagatgatgaaggtgcgaagcctccccaaggttttaaccagaataaaatagaacttaaggcatgctctcgttgtggagaaatcggtcatgttgccagctcgtgtgcctctatatgcgttcattgtgaggaagaccatccacccgacaggtgtccaacgagcaggatcacttgtttcttttgtgaaggaactgatcatgtaccaaaagattgtcgattcagttttctgctgacgaagaagatggccaaccaacccgccagttccaacggagagaagcatcaaggaaacacaaatcctcgccaagattccagtttcagcctaactccagtgccaggacagaggaatcaaaatgagaaaagaaaatgccgagtccgggaagatatctgttgcttcaattgtcaaggaatgggtcatttcgccgacaagtgcccaaaaccgagaaacgtagctgccagcacgtcagtccacgcaaacccccgcaatcagaagcttgctcctcaacgaattgtcatccatgcatcccgaagcagtccgatagcccgcgttgcaacagctccaactccaatgagtgcactaccacaaggtgtcaatgctcaatttcagccccagccaccagctgacaagacagaggccagtatctgcgttgtacctttggaagttccaatacagcagctgagaaatcaagtacaagatgaagaacccgagtgtaagaaagttattgtttgttacaactgcaatgaagaagggcattactccaaaaactgtccccaaccaaggcaaaatcgacctccacattaccgccaatttacacgaagcagacattccaatcgtattgtggtcactggagcaaacgctgtacccgtgaggcctcgtgttaatcagaaccca

SEQ ID NO: 15332 - DNA, 5406 bp, Oryza sativa
  Clone ID: TFbOSC400710j.C1.o4.fg
atggagggagtaccagctgctggagccaatgcttccaggtcgccacaacaccgcggccgccgtcactcgttatcgccaacaccacggcgaggacgaggtcgaggcgctgctgttcgagaggttgttgtgcagcggactgtcagggaggttggcggcgctgctgctttccccaccctcacgcgaaccaactacaccgagtggtcgctgctgatgaaggtgatgctgcaagcccgtggcctttgggacgcggtggagcatggtgaatgcgatgagcaagaagacaggatggcaatggaggccatcctacgcgctgtccccagcgagatgatctcgctgctcgccaccaaggactccgcgaaggacgcctgggatgccatcaaagtgatgcgcgtcggcgtggaccgcgtgaggaaggcgaaggcgcaacagctgcaccgggagtatgaatccatctcgttccatgatggtgaatcgatcgacgacttcgccctacggctcacaagcctagtgtctcagcttgggacattaggagaacgaatcgaggagcagaacgtcatcgagaagttcttgcgcgtcgtcccagagcgattttcccaaatcgctgtgtcgattgagaccctgttggatctctcgacactcaccatcgaggatgtcactgggcgtctcaaggagcagtggctcgcacggcagaaggagcgacaaaaaggggagcgatcctccaagcagtcgcaaggtggagctcgtcagcgacctcgctcccatcgcaagaaaagaggttttggtggcggcgtaggaggcgagaaagggaacaccaatcgggacacggcaccaaacagatgccacaattgtggccgtcttggccattgggccaaggactgtcgccagcccaagaaagaagccgctcacctagcccaaggtgatgacgatgacgacgtcctgctgctttcgcgggcatgcgagcttgaagatgacgatgccactttgttgatggcccacgcttgcgagctcaatgatggccccatcatcgcgccatctcctgtctccctcgttgaaccgcgagtgcaggtgagcctaggagccacggacgctgaggacaaggaggcgtggtaccttgacacaggagccaccaaccacatgacaggccgtggtgacgtctttgctgagctcgatcgaagcgtcaccggcaccgtcaaatttggagacagctccatcgtagacatcaagggtgccggtaacgtcatcttcaccggcaagaatggcgagcacaaggttctcagtggcgtctactacattccgcgcctcaagagctcaatcatcagcatcggtcagcttgatgaaagcgggacgcgtgtgctggtcgaggacggcatcatgcgtatctgggaccgccgccgccgtcttcttgccaagatcaagcggggacgaagccgtctatacgtcctccgtctcgaggttgctaggccgatttgcttggctacgcgacacgatgatgttgcctggcgctggcacgagcgcttcgggcacatccacttcggctcgctagagaagatgggccgacaagagctcgtgcgtggcctgcctcgactggagcatgtcgagcagctttgcgacacgtgtgtcatcaccaagcatcggcgcgctgcctttccaaaggcagccaagtaccgcgctcaggagccgctagatctcgtccatggcgacatctgtggccctatcacgccggcaacgccaggtggccggcgttacttcttgctgctggtcgacgatgccacacgatacatgtgggtggcgctcctagcagccaagagcaatgcacctgacgccatcaagagaattcagatggcagccaagactcactgtgggcgcaagctgtgtgtatttcgcacggacaacggcggcgagttcacgtcgcttgagttcgccacctactgcactgatgagggtatccaacgtcatttcttcgcgccctacgccccacaacaaaatggcgtggtcgagcggcggaatcagacagtggtgtccatggcgcgcgcccttctcaaacagaagggaatgcctgcggagttttggggggaggctgtcagcacggctgtcttcctcctcaatcatgcaccaaccaaaagcctcactggcaagacgccgtatgaagcttggcacggcaagaagccgatggtcagcttcctacgtaccttcgggtgcctggcgtacgtgaaggagctaaacgatgtgcgcaagctcgacgaccgcagcacacccggcgtcttcattggctatgaagaaggggtgaaggcatatcgtgtcctggatccaaggacacggcgtgtacgtctcgcccgtgatgtcatctttgacgagagccgcgggtgggactggacggcagcaagcagcacagatgctcgaccgagcagcgatttcgccatcgagtaccatgttgagaagaccactgggcatcctatccctagtgtggggggaggcgtggtgaccccatcagcatccccaacgccactacaagagacttcaccagcaacccctgccacaccagcaccaagtcctagcgttgccccaacagagttcgtgtcacctccctcacacgacgaggagaggatcgacgcggcgcactccaacacccctgtccgctaccgcacagtcgacaacttgatcggggagaatgccccggcaccagggattgcacaacgggaactcgaggaggcgtctttgctcctcgctggacctggtgagccatgctcgtttgcagaggcggagggtgatgatgcatggcgagcagccatgcgtgaagagatggacgcggtgaatcgcaatgggatttgggagcttgttgatctcccacatggccatcgcccaattggactcaaatgggtctataaattgaagaagaacgaggccggaaaggtggtcaagcacaaagctcgtctcgtcgccaggggatttgtccagcaacctgggattgattttgacgaggtgtttgcgcccgtcgcgcgcatggagtcaattcgtctcctgcttgcggtcgccgcccaaaaagggtggcacgtccatcacatggacgtgaagtctgcctttctcaatggagatttggcagaggaggtgtatgtgaagcagccccctggttttgtcgtcgccggagaagaagacaaggtcctccgcctgcgcaaggctctttatggcctgcggcaggcgccaagagcctggaatgcgaagcttgattgtactctgaaggagctcggtttcgaccaaagcaagcatgagcacgccatgtaccgacgaaacaatggtggctctgctctactcgtcggggtctatgtagatgaccttgtgatcaccgggccatcgacaagagcaattgaacaattcaaggaagaaatgaaggcaaagtttcagatgagtgatcttggcttgctctctttctaccttggaattgaggtgaagcaaggagatgatggaatctccctgaaccaggggcgctatgctcagcgcattgtggagtcggctggcctcaaggactgcaacccttgcgccactccaatggaagaaaggctcaagctgagccgtgatagcacggcacctcccgttgatgcaacaaaatatcgacggctggttggtagccttcgctatcttgtgcacacacggccagacctagcatttgctgttgggttcgtgagtcgcttcatggagcggccaactgaggagcacatggtggccgtgaagcgcattctacgctatgtcgctggcacgatggagtacggacttcattacaaaagggagaaagaggagcagcggctgattggttacagcgacagcgacctcgccggcgacattgatacaaggagaagcacaagtggcatgttgtttttccttggttcaagcttggtgagttggcaatccatcaagcagagagtggtggctttatcttcctgtgaagcagaatatgttgcagccaccaatgctgccacacaaggaatctggttggctcgattgctcggcgaacttcttgggaagcaacctaaagcgatcgagctaaaggtggacagcaagtctgccttggcgctggcaaagaaccctgtcttccatgagcgcagcaagcatattgatttgcgctatcacttcatcagaagctgcttggaggaaggaagcatcagcgccagcttcatcaccaccatggaccagctcgctgacattctaacgaaggcattggggcgagttcgattccatgagcttgttgcaaggattggagtgatactgaaccgtcaggttgtgaaatctgattcagcaactattaagattccagaactggactttgagatccctccagaagctcaacgtggatcactttcaacagtggaagggattattatgcgagctgtggatgagctgcaggcacttcaagatgaaagaaagaaagtggatcctcaaaaggccgaagctattgataaatttttagcaaaattgagatctcttggattaggagaagctgctttcacctttgttcttgatgatcctgctggaaatagcttcattgaaaaccagaatgcaccttcatcagatcctttgttatctgtgagattctatgaaaggatgcgtgagcaacaggcagcacttggttttcttgttgaaccatccacagaagaacctggggatcagcctgttaatcatgcttcaactgtggaagggaactctgaggtgttgcaggagccccacggttcggttggagctgttgcaggtcgccgtgctatagctcaaggaaaccctgatgaagttgctgcagcgctgtgcagatattcagcaccagaagagtgtctggtctttgacctttggttagaaatcccatattttcgtgaggttattgttatggcaacaacatgcgacatgtgcggctatcgcaactcagagttgaagcctggtggtgaaatcccagccaaaggaaagaaaattacactacgtgtgcagaacggaaaagatcttacacgtgatgtcataaagtcagattcagctggcgtaaaagtacctgaactcgagttggagctagcaagtggaacattgggtggtattgttacaacagttgaaggtttaattgtgaaaatatgcgaggctctgcagagagtgcatggattccatttgggtgatagcacactggaatggaaaaagaagaaatgggaggatttcaacgatagattatccaagcttctaagtttacaagagccttggactttaattatcgatgatggattggcagcttcatttgttgctccagctaccgattctttagaagatgacaaccagctaaccattgaggagtatgtgaggagctgggagcagaatgaggagcttggcttgaatgacatggacacatcgtctgctgacgccgcctacaacaccaccaacccataa

SEQ ID NO: 15333 - DNA, 4353 bp, Oryza sativa
  Clone ID: TFbOSC401728j.C1.o22.fg
atggagggagtaccagctgctggagccaatgcttccaggtcgccacaacaccgcggccgccatcactcgttatcgccaacaccacggcgaggacgaggtcgaggcgctgctgttcgagaggttgttgtgcagcggactgtcagggaggttggcggcgctgctgctttccccaccctcacgcgaaccaactacaccgagtggtcgctgctgatgaaggtgatgctgcaagcccgtggcctttgggacgcggtggagcatggtgaatgcgatgagcaagaagacaggatggcaatggaggccatcctacgcgctgtccccagcgagatgatctcgctgctcgccaccaaggactccgcgaaggacgcctgggatgccatcaaagtgatgcgcgtcggcgtggaccgcgtgaggaaggcgaaggcgcaacagctgcaccgggagtatgaatccatctcgttccatgatggtgaatcgatcgacgacttcgccctacggctcacaagcctagtgtctcagcttgggacattaggagaacgaatcgaggagcagaacgtcatcgagaagttcttgcgcgtcgtcccagagcgattttcccaaatcgctgtgtcgattgagaccctgttggatctctcgacactcaccatcgaggacgtcactgggcgtctcaaggtggcggaggaacggcgaccagctccaacgtcgacgactactccagccggaggccagcttctcctcacggaggagcagtggctcgcacggcagaaggagcgacaaaaaggggagcgatcctccaagcagtcgcaaggtggagctcgtcagcgacctcgctcccatcgcaagaaaagaggttttggtggcggcgtaggaggcgagaaagggaacaccaatcgggacacggcaccaaacagatgccacaattgtggccgtcttggccattgggccaaggactgtcgccagcccaagaaagaagccgctcacctagcccaaggtgatgacgatgacgacgtcctgctgctttcgcgggcatgcgagcttgaagatgacgatgccactttgttgatggcccacgcttgcgagctcaatgatggccccatcatcgcgccatctcctgtctccctcgttgaaccgcgagtgcaggtgagcctaggagccacggacgctgaggacaaggaggcgtggtaccttgacacaggagccaccaaccacatgacgggccgtggtgacgtctttgctgagctcgatcgaagcatcaccggcaccgtcaaatttggagacagctccatcgtagacatcaagggtgccggtaacgtcatcttcaccggcaagaatggcgagcacaaggttctcagtggcgtctactacattccgcgcctcaagagctcaatcatcagcatcggtcagcttgatgaaagcgggacgcgtgtgctggtcgaggacggcatcatgcgtatctgggaccgccgccgccgccgccgtcttcttgccaagatcaagcggggacgaagccgtctatacgtcctccgcctcgaggttgctaggccgatttgcttggctacgcgacacgatgatgttgcctggcgctggcacgagcgcttcgggcacatccacttcggctcgctagagaagatgggccgacaagagctcgtgcgtggcctgcctcgactggagcatgtcgagcagctttgcgacacgtgtgtcatcaccaagcatcggcgcgctgcctttccaaaggcagccaagtaccgcgctcaggagccgctagatctcgtccatggcgacatctgtggccctatcacgccggcaacgccaagtggccggcgttacttcttgctgctggtcgacgatgccacacgatacatgtgggtggcgctcctagcagccaagagcaatgcacctgacgccatcaagaaaattcagatggcagccgagactcactgtgggcgcaagctgtgtgtatttcgcacggacaacggcggcgagttcacgtcgcttgagttcgccacctactgcactgatgagggtatccaacgtcatttctccgcgccctacgccccacaacaaaatggcgtggtcgagcggcggaatcagacagtggtgtccatggcgcgcgcccttctcaaacagaggggaatgcctgcggagttttggggggaggctgtcagcacggctgtcttcctcctcaatcgtgcaccaaccaaaagcctcactggcaagacgccgtatgaagcttggcacggcaagaagccgatggtcagcttcctacgtaccttcgggtgcctggcgtacgtgaaggagctaaacgatgtgcgcaagctcgacgaccgcagcacacccggcgtcttcattggctatgaagaaggggtgaaggcatatcgtgtcctggatccaaggacacggcgtgtacgtctcgcccgtgatgtcatctttgacgagagccgtgggtgggactggacggcagcaagcggcatagatgctcgaccgagcagcgatttcgccatcgagtaccatgttgagaagaccactgggcatcctatccctagtgtggggggaggcgtggtgaccccatcagcatccccaacgccactacaagagacttcaccagcaacccctgccacaccagcaccaagtcctagcgttgccccaacagagttcgtgtcacctccctcacacgacgaggagaggatcgacgcggcgcactccaacacccctgtccgctaccgcacagttgacaacttgatcggggagaatgccccggcaccagggattgcaaaacgggaactcgaggaggcgtctttgctcctcgctggacctggtgagccatgctcgtttgcagaggcggagggtgatgatgcatggcgagcagccatgcgtgaagagatggacgcggtgaatcgcaatgggatttgggagcttgttgatctcccacatggccatcgcccaattggactcaaatgggtctataaattgaagaagaacgaggccggaaaggtggtcaagcacaaagctcgtctcgtcgccaggggatttgtccagcaacctgggattgattttgacgaggtgtttgcgcccgtcgcgcgcatggagtcaattcgtctcctgcttgcggtcgccgcccaaaaagggtggcacgtccatcacatggacgtgaagtctgcctttctcaatggagatttggcagaggaggtgtatgtgaagcagccccctggttttgtcgtcgccggagaagaagacaaggtcctccgcctgcgcaaggctctttatggcctgcggcaggcgccaagagcctggaatgcgaagcttgattgtactctgaaggagctcggtttcgaccaaagcaagcatgagcacgccatgtaccgacgaaacaatggtggctctgctctactcgtcggggtctatgtagatgaccttgtgatcaccgggccatcgacaagagcaattgaacaattcaaggaagaaatgaaggcaaagtttcagatgagtgatcttggcttgctctctttctaccttggaattgaggtgaagcaaggagatgatggaatctccctgaaccaggggcgctatgctcagcgcattgtggagtcggctggcctcaaggactgcaacccttgcgccactccaatggaagaaaggctcaagctgagccgtgatagcacggcacctcccgttgatgcaacaaaatatcgacggctggttggtagccttcgctatcttgtgcacacacggccagacctagcatttgctgttgggttcgtgagtcgcttcatggagcggccaactgaggagcacatggtggccgtgaagcgcattctacgctatgtcgctggcacgatggagtacggacttcattacaaaagggagaaagaggagcagcggctgattggttacagcgacagcgacctcgccggcgacattgatacaaggagaagcacaagtggcatgttgtttttccttggttcaagcttggtgagttggcaatccatcaagcagagagtggtggctttatcttcctgtgaagcagaatatgttgcagccaccaatgctgccacacaaggaatctggttggctcgattgctcggcgaacttcttgggaagcaacctaaagcgatcgagctaaaggtggacagcaagtctgccttggcgctggcaaagaaccctgtcttccatgagcgcagcaagcatattgatttgcgctatcacttcatcagaagctgcttggaggaaggaagcatcagcgccagcttcatcaccaccatggaccagctcgctgacattctaacgaaggcattggggcgagttcgattccatgagcttgttgcaaggattggagtggtcaagattagttcagaatag

SEQ ID NO: 15334 - DNA, 2256 bp, Oryza sativa
  Clone ID: TFbOSC401048j.C1.o45.np
acacctcccaactctaagctatcaattgaggctccccgtggaccggcattgtcagtacctcattctcccggtggagctgatatggacttggcagatatagctcaaagcttggctccaataaagaccacaatagcgccgccgccgccgcggattccgccgcatcccgccgtccccgcgcgcattaaagagggggaaattattccccgcgtttccctcccccgtttcccccgatttcccctctctctctccctcggatccgtccggattcatcccgtaatcctcgccggcgacatctatggagcccgagatccccgcgcccgtttccttcctctccggccgcgttctccccctctcggtgctatataattgctccccgagctccgctcttccgtttcccgccgctcgccgctcgctctcgccgtcggatccgtgctcgcgccgtgctcctctctctccgccgtcgccgccgaccttcggttcgccgccgacgtcgctccggtcctccgcccgactcggcgacacctccatccgcttcgccgtatcgccgtcgacctcgtccgcgcctccgtttcgctcgccgaccgtcggagcgccgccgtcatcgtcatcccgagccgcgccgccgcgtttctccactccgttcgtcgtctccgccgtcctcgtgtctcggggtgagccgtggaccgtcccttccgtttccccctcctctccgctctctcgggcgctgctccgccgcgccgatggtcgccggcggtgaccatcggggcgcgggcgcgccgctcccgtcggccgtgccggcgaggccgccttcgggcgcgccctcgcggctgccaggtgggcccggccgtcagccgcccgcgcccgcgggtgcggctgacgcgcgggacccacggcgccgaccgccgccagccgcgtgcgcccggtccaccgtggaccgagaggctgacgcgtgggccccacttcccgtggacccgggcaaatgaaggctacacgagctgcggcccgatggctgacaatgagaaaggcaataaggtcagaagtcaggacattggtacctcaagctcccgagtggatgaagcaccagacaccagttgtgtgacactggtccaacacctgattaaccagaaccgattgcttatagagatactacagcagcatcagacgccaattctgaacctgagtcaaacacaacctcaagtgcagttggaggcagtccaagcactcacaccacaagtcagcatgccgccagcatcccgaaggacccatggtgacgtgccacatgttgacccaaaaggagcaagtaacatttgctttatgtgtgatgagcaagggcactatgcaagggagcgtcctcagcagaaaagaaaaacaccaatgcgaaccgaagatgaagtccgtaagatgatcattactagcacagagtggcctccaccaggaatgaccagacgtcagagaagaaataccttccgaggtgcaccacagttgacagagcatcttttagctaatggaggtagagtgtctgatagtgaagattcagatcaagtctcctcagatgatgaagatgaaatggaacgtaaggcatgctctcgttgtggagaaatcggtcatgtcgccagctcgtgtgccactatatgcgttcattgcgaggaagaccatccacccgacaggtgtccaacgagcaggatcacttgtttcttttgtgaaggaactgatcatgtaccaaaagattgtcaattcagttttctgctgacgaagaagatggctaaccaacccgccagttccaacggagagaagcatcaaggcaacaccaatcctcgccaagattacagtttcagcctaactccagtgccaggacagaggaatcaaaatgagaaaagaaaatgccgagtccgggaagatatctgttgcttcaattgtcaaggaatgggtcatttcgccgacaagtgcccaaaaccgagaaacatagctgccggcacgtcagtccacgcagctccctgcaatcagaagcttgctcctcagcgaattgtcatccatgcatcccaaagcagtcctatggctcgcgttgcaacagctccaactccagcgagtgcattaccacaaggtgtcaatgctcactttcagccccagcaaagaattgtcgtcgatggaagaagttgtgtctctccccgacctactccaggccaagcaaagggcgataccaagcagaagaccgtcatccgcttcaaccagcaatcagaaggaagcttctcctgtgaa

SEQ ID NO: 15335 - DNA, 1254 bp, Oryza sativa
  Clone ID: TFbOSC401054j.C1.o18.fg
atggctgacaatgagaaaggcaataaggtcagaagtcaggacattggtacctcaagctcccgagtggatgaagcaccagacaccagttgtgtgacactggtccaacacctgattaaccagaaccgattgcttatagagatactacagcagcatcagacgccaattctgaacctgagtcaaacacaacctcaagtgcagttggaggcagtccaagcactcacaccacaagtcagcatgccgccagcatcccgaaggacccatggtgacgtgccacatgttgacccaaaaggagcaagtaacatttgctttatgtgtgatgagcaagggcactatgcaagggagcgtcctcagcagaaaagaaaaacaccaatgcgaaccgaagatgaagtccgtaagatgatcattactagcacagagtggcctccaccaggaatgaccagacgtcagagaagaaataccttccgaggtgcaccacagttgacagagcatcttttagctaatggaggtagagtgtctgatagtgaagattcagatcaagtctcctcagatgatgaagatgaaatggaacgtaaggcatgctctcgttgtggagaaatcggtcatgtcgccagctcgtgtgccactatgtgcgttcattgcgaggaagaccatccacccgacaggtgtccaacgagcaggatcacttgtttcttttgtgaaggaactgatcatgtaccaaaagattgtcaattcagttttctgctgacgaagaagatggctaaccaacccgccagttccaacggagagaagcatcaaggcaacaccaatcctcgccaagattacagtttcagcctaactccagtgccaggacagaggaatcaaaatgagaaaagaaaatgccgagtccgggaagatatctgttgcttcaattgtcaaggaatgggtcatttcgccgacaagtgcccaaaaccgagaaacatagctgccggcacgtcagtccacgcagctccctgcaatcagaagcttgctcctcagcgaattgtcatccatgcatcccaaagcagtcctatggctcgcgttgcaacagctccaactccagcgagtgcattaccacaaggtgtcaatgctcactttcagccccagcaaagaattgtcgtcgatggaagaagttgtgtctctccccgacctactccaggccaagcaaagggcgataccaagcagaagaccgtcatccgcttcaaccagcaatcagaaggaagcttctcctgtgaatga

SEQ ID NO: 15336 - DNA, 1818 bp, Oryza sativa
  Clone ID: TFbOSC900056j.C1.o3.fg
atggctgacaatgagaaaggcaataaggtcagaagtcaggacattggtacctcaagctcccgagtgaatgaagcaccagacaccagttgtgtgacactggtccaacacctgattaaccagaaccgattgcttatagagatactacagcagcatcagacgccaattctgaacctgagtcaaatacaacctcaagtgcagttggaggcagtccaagcactcacaccacaagtcagcatgccgccagcatcccgaaggacccatggtgacgtgccacatgttgacccaaaagaagcaagtaacatttgctttatgtgtgatgagcaagggcactatgcaagggagcgtcctcagcagaaaagaaaaacaccaatgcgaaccgaagatgaagtccgtaagatgatcattaccagcacagaatggcctccaccaggaatgacaagacgtcagagaagaaataccttccgaggtgcaccacagttgacagagcatcttttagctaatggaggtagagtgtctgatagtgaagattcagatcaagtctcctcagatgatgaagatgaaatggaacgtaaggcatgctctcgttgtggagaaatcggtcatgtcgccagctcgtgtgccactatatgcgttcattgtgaggaagaccatccacccgacaggtgtccaacgagcaggatcacttgtttcttttgtgaaggaactgatcatgtaccaaaagattgtcaattcagttttctgctgacgaagaagatggctaaccaacccgccagttccaacggagagaagcctcaaggcaacaccaatcctcgccaagattacagtctcagcttaaaaccagtgccaggacagaggaatcaaaatgagaaaagaaaatgccgagtccgggaagatatctgttgcttcaattgtcaaggaatgggtcatttcgccgacaagtgcccaaaaccgagaaacatagctgccagcacgtcagtccacgcaactccctgcaatcggaagcttgctcctcagcgaattgacatccatgcatcccgaagcagtcctatagcccgcgttgcaacagctccaactccagcgagtgcattaccacaaggtgtcaatgctcaatttcagccccagccatcagttgacaagacagaggccagtatcggcattgtacctttggatgttccagcacagcagccaagaaatcaagtacaggatgaagaacccaagccactaaccattctctgcaccgacagcctcagcaaagaattgtcgtcgatgaaagaagttgtgtctctccccgacctactccaggccaagcaaagggcaatcaatctcaggagggcgataccaagcagaagaccgtcatccgcttcaaacagcaatcaaaaggaagcttctcctgtgaatgatagcattatgcagtcctatcacatcatcacagaaccaatcaaggatgcagtcactagaacaatgcccgctatatctctccagaatcaaaatgagcagccacgcttgtggttttcagttcgctacctatcattgtgcagtcgaaagtttgcagcaatcactggtaacttgtctgaggttgactccgaagatatgaatcatgagaagttctggaacggaagcatcactgaactaccgcaacctagtctgagtcagccaaaaggtgcaccctggtccaagtcaggtgaagagaagattccatccgcaacaggaggtcaagccaagcagttccgagtggtaaagttttgctggaagtttgtcaagacgcaacggaagaagtcagacaagaagagaagaccgcccaacctatcttcttgctag

SEQ ID NO: 15337 - DNA, 3156 bp, Oryza sativa
  Clone ID: TFbOSC11569j.C1.o3.fg
atgcgtaaggagaaaataccgcatcaggcgccattcgccattcaggctgcgcaactgttgggaagggcgatcggtgcgggcctcttcgctattacgccagctggcgaaagggggatgtgctgcaaggcgattaagttgggtaacgccagggttttcccagtcacgacgtttgaaccacctgtctctcctgaggagaaggttaagttcgaggctttggattgcctgttccgtggagcattgatcagtgtactcgctgacaatatagtggacgtgtatatgcacataccttcaaggaaggacatgtggaatgcacttgaggccaagttcggagtttccgacgccggcagcgagctgtatgtcatggagcagttctatgactacaagatggtcgatgaccgttctgtagtggaacaagctcatgagattcagatgctggctaaggagcttgagaacaacaagtgtgagttgccggacaagtttggggcgggtggcattattgccaaattgccaccttcttggtcagactttgccacttctctaaggcacaagagacaagagttccgtgtttctgatctcattggctctttgggtgttgaggagaaggcgagggcaaaggacaaccggggcaaaaaggttgagggaggttctagtgccaatatggtacagaagaagaacactcatgcatcccacaatagcaagaaagtcaagtctgatgtcaaacctaaggctagaaccaattttaagaagaaaggcaagggaaaggcaaagggagactgctttgtgtgtggcaagtctgggcattgggccgaggactgtcctgagcgcaaagacaggaagtctgccaacatggtcattagtgagggcggaggaacatcggggtacggtaaaattttacctacagttctctctgtttttcattcacctgattggtggattgatactggtgctaatattcatgtcgggagaggttcctccttgttgatgggaaacgggtcacttgctaatattcatgtatgggttgttcatggtgttggtacggtcgatctgaagtttacttcgggaaagaccgtgcagctgaagaacgtgcagcatgtcccttcaataaagaagaatctagttagcggctctctactgtgtagagaaggttttagacttgtgtttgaatccaataaatgtgtcgtatctaaatatggaacttttattggaaaaggttatgacagcggaggcttgttccacttttctttggatgacatgcgtaataataataatgttgtgaaccatattagcgagaatgatgagtccaatgtgtggcattcgcgaccctgtcatgtgaattttggttgtatgacacgcttggctaacatgagtttaattccaaaattcactttggtcaaaggttccaagtgccatacttgtgttcaatcgaaacaacctcgcaagcctcacaaggcatctgaggcgagagatttggcacctctagaacttcttcattccaatctgtgcgaaatgaatggcgtgttgactaaagggggaaagaaatatttcatgacactgatagatgattgcactagattttgttatgtgtatctattgaaaacaaaggatgaagcattgcattattttaagacatataaagctaaggtagaaaaccaacttgaaaggaaaatcaaacggttgaggtctgatagaggtggagagtatttttccaatgagtttacatctttttgcgaagagtttggaattattcatgagaggacacctccctattcaccccaatcaaatggggtaaccgaaagaaagaaccgtactctaactgaaatggtgaatgccatgttagacactgcgagactttcccaggaatggtggggtgaggcagttttgactgcttgtcatgtcctaaataaaatcccaatgaagcataaggaagtaacaccattcgaggaatgggaaagaaagagattaaatctctcatacctacgaacatggggctgtttggccaaggtaaatgtacctatagccaaaaagcgtaaacttggaccgaatactgttgattgtgtgttccttggttatgctattcacagcgtgggttatagattcttagtagtaaactctgaagtacccgacatgcgagttggtacaattattgagtccagagatgctacattctttgagaatgaatttcccatgaaaaatacacctagcacttctaatcatgaaactgtcataccccataagcactttgcaccgatagaacacaatgatcaaacgcctgagggaaatcctgaggaggataatattgtagatactcgtaagagtaagagacaaagggttgcaaaatcctttggagatgactacattgtatacctcgtggatgacactccaagaaccatagaaaaggcatattcatctcctgacgctgactactggaaggaagcaaaaaagcttagacctgatggtacaattgaaaagtacaagacaaggcttgtggccagggttatacccaaaaagaaggcgaggatttttttcgacacctacttaccagttgcccgtttgatcacgattcgagtactacttgttcgagcagcctctcatggtcttctcgtccatcagatggacgttaagacagctttcctaaacggtgagctggaggaggagatctatatggatcaacaagacaggtatgtactagaaggtcaggtgggaatggtgtgtaaactgttgaaatccttgtatggccttaagcaagcacctaagcaatggcatgagaagtttgacaccacacttacatctactggctttgttgtgaacgaagctgacaaatgtgtgtactatcgctatggtgggggagaaggagtgatcttgtgtttatatgtcgatgacatattgatctttgggatcagcctcaatgtgattgaggaggtcaaggactttctgtccaagagctttgaaatgaaggatttgggagatgctgatgttattcttaacattaagctactgagaggagatgagggtgggattgcacaatcccactatgtggacaaagttttaagtcgctttggctatagtgactacaagccagctcctactccttatgatcccagcatgctattaaggaaaaaccgaagaatagcaagggatcaactgagatactcctaa

SEQ ID NO: 15338 - DNA, 1413 bp, Oryza sativa
  Clone ID: TFbOSC28694j.C1.o1.fg
atgtcatggcacagggccggtgtcctgctgctgggggctcagtcctgcctacctatcccaggggttccggccgtaggtggggttgggtcggtactcttgtttatggctaggatgggttgggaactatgtcacgtcttccgtccgtataccgtggtgatgtttaacagagaaaaaggaaagaatgtcagcgggtatgccccaagtaactcaagttttcaactcgatcaaccactggcctcaagagagttaaccagggcacacccttggtccattccaagcatgctgcttagttcacagctaccattggttggaagtcaagaccaaaatcagtatatgtttgatcgagcatttgccacccatgtcaatgagcttccaatgccagaagaggatgtccccttttgtcatgattgtagagaacaaggacactatgccctgaattgtccatgggtatatgccaaagaagccccttcctttggtttaacagggcagacatcgctaaaccagcctcctcgcaccaagtcaagcttgcagcctattgtgcaaagtagagagcccaatggagagaatccattgaatcccgggaaatgctttcctcctagcctttcgtaccacgtggggtcacgtactaagcaagccaaaggcaagaagagtaagaatcagaagagaaaagcgccgatgcgaactgaaggagaagtatgtaagatggctattagcagcaccgaatggcctcccgcagggataactattcctagacgtcaaagaggaaataccttccgaggtgcacgacagttgacccagcacctcctaagccatggcggcagagtatctgatagtgaagggtcagatcaagtctcctcggattatgaagatgagtctctccgacatctcggcgaggaagagatggaatcaaaagcatgcccccgttgtggagaaattggacacgttgctagcatgtgtttcacactctgccctcattgtgaggaagaccatccaccaggtgaatgtcccacccgcaaggtcacatgttttctgtgcgaaggtacaaaccatgtgcccaaggattgccaactcagtgtgttgttgaccaagaccgcagaaatccaacgaacaaccctacgattgtctcgtcagttagtcagctccaacagcaacatcgacgatatcatccacagcaccaatgctcctcttgctgcacctgactctgcaataaatcatagcaataataccttcagcaccaaccattctctgcaccgacggcctcagcaaagaattgtcgtcgatggaagaagttgtgtctctccccgacctactccaggccgagcgaagggcaatcaacctcaggaggatgataccaagcagaagaccgttattcgcttcaaccagcaatcagaaggaagcttctcctgtgaatga

SEQ ID NO: 15339 - DNA, 2226 bp, Oryza sativa
  Clone ID: TFbOSC400381j.C1.o11.fg
atgcggcccggacgacggtggggatacaggcgcgtcgcggtcgcattggcggtgtgcgtccacgcggcggtgcttctctcggccgtcgtctacttgtcctccgtcctctctgcagctgggcctggggctagctcctcgtccctgcaggaaacggagatgatgagactgaccgccaagctggagcagatcatcgggcggccaccgcacaaccgcgctcacctccccagtcacgccttcgccccaagcaagtcaggcctcgccactgctatccaagcccttgactggggaacggatgccgaggaggatgaggacgacgtcattgctccggagctacaccaacgttcagcggagacattcaatccgcaaaccgccaaagcacgcaaagcagcttctccatctccggcgtccaaggctttccatcaggaaatcaatgcccgaagccaggaagaggagctcgacattactgcagagagaggagagggacagagcgccattacgccccctccggaaaaggcacaagaggaagatgcagagaagaaggccagagaaaaagcaacattaaagtcgataatagtagccccggcaagagctacaagcaagtctcaaatcgaggcagaagaacaagatctttcatcaaaatggcaagcggtaaaaccaaagttttggtggcggaagcgccaaaatccttcttcatcaacctctcaggtcgtcttcaatcgcccagctacctccttcaatccactaaatctcagagaaaagttcaaggagatcttgcacggcaagtgcttccgctgcttcgcttcagatcaccaggcagcagcttgcagggatcccatccgctgctatacttgtagacgcagtggacacatctccttccgctgcccaaacaaatcaaagcaacccattcactcccgcctcaccttccccaagcaagccccctccattcaatcccgactcatcttcccaccacttcccagcaagaaccaacagcaaccaacaacaacccgccctggttcggttttccatcgtttgcacaaaccagcggtgaccatggatcacatacctggtctgccgaatcaacggccggcagtcggctatgcaacggtgccgatgacggagctcatgcagcacgagctggagcgccttcactatcatggcgcactcatctcggctgaggtcgagggacaggagacgtcccccagggaggtggcgcgtgcactgacccagcaggttgggatccccatctcggacctgcgagtcacgcgccatcacccggaagatttcttcgtcttcttcgatttcccagaggggcaggccgcggcagcgcggagaggcttcatcactctggatggaggaaggttcaccatcacgccatggagcgccgacaggcatgtgcaccacccgaactggtggtttcgtgtgcggctctgcctggagggattgccgcagtacgcatggaatagggcgggattggagggcgtcatggtgctctccaccttcttcccgccgggagctgggcgtgtcacctccggcatcacaccgccgcttccggacgagatcgcgctgccgccgagggggaggctgccgcatgtcatagtccatctggacgagatggaggactggactccaggaccgccccgctcgccttctttcggggtgagcggactgccctcctcggacttgtctgattcgggaggcccgatacccacggtgcgcaccttccagtggtacctgggctgcgccgacggaacccagcctcctcggcgacgggcggcagcgaggcggggatgcagggcaccgccacagagaagagaagacccggaggatgatgaggatgatgacgggcggcggcgccacgctgaggatattccaccacgccgccgctcgctgcgcgatgtcatcattggaaggggccggtcggttgagtcgcgggcggcggaaggggtgcgacaccggagccgcacgccgcatccttccggccgccagcgagcgcacggcgatggccgccaaggccgctcacagaccaggcacagctcccgatgctcctgccgctacagatcccgtcgcacgcgctccccaagctccttgactcctcgcgatcaggatggcacgggcgatgcaggctgcgcgacaaccaaggtggtcgctgtcagtggccaggctgatggcgaccagcagtgtagcgcccgttccgtcgtggcgcctagcgggaaaactatctcttaa

SEQ ID NO: 15340 - DNA, 1494 bp, Oryza sativa
  Clone ID: TFbOSC401054j.C1.o53.fg
atggaggtggatgaagtcgggggtcgatggacattctccagggcaaatgaaggctacacgagctgcggcccggtagtcgagatgtcatggcagagggttggtgccctgctgctagggggctcagtcctgcctgcctgtcccgggtgtcccggccgtagggggattgggtcggtactcttgtttatggctaggatgggttgggaactatgtcacgtcttccgtccgtataccgtggtgatgtttaacagagaaaaaggaaagaatgtcagcgggtatgcctcaagtaactcaagttttcaactcaatccaccactgtcctcaagagagttaacaagggcacacccttggtccattccaagcatgctgcttagttcacagctaccattggttggaagtcaagaccaaaatcagtatgtgtttgatcgagcatttgccacccaggtcaatgagcttccaatgccagaagaggatgtccccttttgtcacgattgtagagaacaaggacactatgccctgaattgtccatgggtatatgccaaagaagccccttcctttggtttagcagggcagacatcgctaaaccagcctcctcacaccaagtcaagcttgcagcctagtgtgcaaagtagagagcccaatggagagaatccatggaatcccgggaaatgctttcctcctagcctttcataccacgtggagtcacgtactaagcaagccaaaggcaagaagagtaagaatcagaagagaaaagcaccgatgcgaactgaagaagaagtacgtaagatgactattaccagcaccgaatggcctccagcagggataactattcctagacgtcaaagaggaaataccttccgaggtgcacgacagttgacccagcacctcctaagccatggcggcagagtatctgatagtgaagggtcagatcaagtctcctcggattatgaagatgagtctccccgacatctcggcgaggaagagatggaatcaaaagcatgcccccgttgtggagaaattggacacgttgctagcatgtgtttcacactctgccctcattgtgaggaagaccatccaccaggtgaatgtcccacccgcaaggtcacatgttttctgtgcgaaggtacaaaccatgtgcccaaggattgccaactcagtgtgttgttgaccaagaccacagaaatccaacgaacaaccatacgattgtctcatcagctagttagctccaacagcaacatcgacgatatcatccacagcaccaatgctcctcctgctgcacctgactctgcaataaatcatagcaataataccttcagccccaaccattctctgcaccgacagcctcagcaaagaattgtcgttgatggaagaagttgtgtctctccccgacctactccaagccgagcaaagggcaatcaacctcaggagggcgataccaagcaaaagaccgttatctgcttcaaacagcaatcagaaggaagtttctcccgtgaatga

SEQ ID NO: 15341 - DNA, 3060 bp, Oryza sativa
  Clone ID: TFbOSC900220j.C1.o13.fg
atggcgaggcgagcgttgcgactgcgactctctctctctctatcattttgcaacggaccggaatccaaccccactgaaccacctgtctctcctgaggagaaggttaagttcgaggctttggattgcctgttccgtggagcattgatcagtgtactcgctgacaatatagtggacgtgtatatgcacataccttcaaggaaggacatgtggaatgcacttgaggccaagttcggagtttccgacgccggcagcgagctgtatgtcatggagcagttctatgactacaagatggtcgatgaccgttctgtagtggaacaagctcatgagattcagatgctggctaaggagcttgagaacaacaagtgtgagttgccggacaagtttgtggcgggtggcattattgccaaattgccaccttcttggtcagactttgccacttctctaaggcacaagagacaagagttccgtgtttctgatctcattggctctttgggtgttgaggagaaggcgagggcaaaggacaaccggggcaaaaaggttgagggaggttctagtgccaatatggtacagaagaagaacactcatgcatcccacaatagcaagaaagtcaagtctgatgtcaaacctaaggctagaaccaattttaagaagaaaggcaagggaaaggcaaagggagactgctttgtgtgtggcaagtctgggcattgggccgaggactgtcctgagcgcaaagacaggaagtctgccaacatggtcattagtgagggcggaggaacatcggggtacggtaaaattttacctacagttctctctgtttttcattcacctgattggtggattgatactggtgctaatattcatgtcgggagaggttcctccttgttgatgggaaacgggtcacttgctaatattcatgtatgggttgttcatggtgttggtacggtcgatctgaagtttacttcgggaaagaccgtgcagctgaagaacgtgcagcatgtcccttcaataaagaagaatctagttagcggctctctactgtgtagagaaggttttagacttgtgtttgaatccaataaatgtgtcgtatctaaatatggaacttttattggaaaaggttatgacagcggaggcttgttccacttttctttggatgacatgcgtaataataataatgttgtgaaccatattagcgagaatgatgagtccaatgtgtggcattcgcgaccctgtcatgtgaattttggttgtatgacacgcttggctaacatgagtttaattccaaaattcactttggtcaaaggttccaagtgccatacttgtgttcaatcgaaacaacctcgcaagcctcacaaggcatctgaggcgagagatttggcacctctagaacttcttcattccaatctgtgcgaaatgaatggcgtgttgactaaagggggaaagaaatatttcatgacactgatagatgattgcactagattttgttatgtgtatctattgaaaacaaaggatgaagcattgcattattttaagacatataaagctaaggtagaaaaccaacttgaaaggaaaatcaaacggttgaggtctgatagaggtggagagtatttttccaatgagtttacatctttttgcgaagagtttggaattattcatgagaggacacctccctattcaccccaatcaaatggggtaaccgaaagaaagaaccgtactctaactgaaatggtgaatgccatgttagacactgcgagactttcccaggaatggtggggtgaggcagttttgactgcttgtcatgtcctaaataaaatcccaatgaagcataaggaagtaacaccattcgaggaatgggaaagaaagagattaaatctctcatacctacgaacatggggctgtttggccaaggtaaatgtacctatagccaaaaagcgtaaacttggaccgaatactgttgattgtgtgttccttggttatgctattcacagcgtgggttatagattcttagtagtaaactctgaagtacccgacatgcgagttggtacaattattgagtccagagatgctacattctttgagaatgaatttcccatgaaaaatacacctagcacttctaatcatgaaactgtcataccccataagcactttgcaccgatagaacacaatgatcaaacgcctgagggaaatcctgaggaggataatattgtagatactcgtaagagtaagagacaaagggttgcaaaatcctttggagatgactacattgtatacctcgtggatgacactccaagaaccatagaaaaggcatattcatctcctgacgctgactactggaaggaagcaaaaaagcttagacctgatggtacaattgaaaagtacaagacaaggcttgtggccagggttatacccaaaaagaaggcgaggatttttttcgacacctacttaccagttgcccgtttgatcacgattcgagtactacttgttcgagcagcctctcatggtcttctcgtccatcagatggacgttaagacagctttcctaaacggtgagctggaggaggagatctatatggatcaacaagacaggtatgtactagaaggtcaggtgggaatggtgtgtaaactgttgaaatccttgtatggccttaagcaagcacctaagcaatggcatgagaagtttgacaccacacttacatctactggctttgttgtgaacgaagctgacaaatgtgtgtactatcgctatggtgggggagaaggagtgatcttgtgtttatatgtcgatgacatattgatctttgggatcagcctcaatgtgattgaggaggtcaaggactttctgtccaagagctttgaaatgaaggatttgggagatgctgatgttattcttaacattaagctactgagaggagatgagggtgggattgcacaatcccactatgtggacaaagttttaagtcgctttggctatagtgactacaagccagctcctactccttatgatcccagcatgctattaaggaaaaaccgaagaatagcaagggatcaactgagatactcctaa

SEQ ID NO: 15342 - DNA, 2013 bp, Oryza sativa
  Clone ID: TFbOSC900403j.C1.o14.fg
atgttagatgaatacaagacatcggaccgcttttgggccgaagccgtcaacaccgcatgccacgccatcaaccgcctctatcttcaccgccttcttaagaagactccctatgagcttcttatcggtaacaaaccaaatgtctcttactttcgtgttttcggtagtaagtgctacattcttactaagaaggctagatcctcaaagtttgctcctaaagtggatgaggggttcttgcttgggtatgggtcaaatgaatgtgcataccgcgttttcaataaaacctctggtattgttgggatcgcgcgtgatgtgacatttgacgaaactaacggctctcaagtagagcaagttgactcacatgtgttaggtgaagaggaggacccgagcgtagcaatcaagagatgtgaaaaagcgccttcctcaacgggcctatcaacgagttggtatacgtggagcaaccactgggcttcgaggatccgaagtatcccaaccacgtgtacaagttccacaaggcgctctacgggctctagtaggatgatgaccaagcgttttgagatgtccatgatgggtgaattgaagttcttcctcggccttcaaatcaagcaactaaaggaaggaactttcatttgccaaacaaagtacttgaaggacatgctcaagaagtttggaatggagaacgccaagccaatccacactcccatgccatcaaattgtcacctcgacctcaatgagcaaggtaaagacgtcgaccaaaagatgtttaacagagaaaaaggaaagaatgtcagagggtatgcctccagtaactcaagttttcaactcaatccaccactagcctcaagagagttaacaagggcacacccttggtccattccaagcatgctgcttagttcacagctaccattggttggaagtcaagaccaaaatcagtgtgtgtttgatcgagcatttgccacccaggtcaatgagcttccaatgccagaagagcatgtccccttttgtcatgattgtagagaacaaggacactatgccctgaattgtccatgggtatatgccaaagaagccccttcctttggtttagcagggcagacatcgctaaaccagcctcctcgcaccaagtcaagcttgcagcctagtgtacaaaggagagagcccattggagagaatccattgaatcccgggaaatgctttcctcctagcctttcgtaccacgtggggtcacgtactaagcaagccaaaggcaagaagagtaagaatcagaagagaaaagcaccgatgcgaactgaagaagaagtacgtaagatgactattaccagcaccgaatggcctccagctgggataactattcctagacgtcaaagaggaaatactttccgaggtgcacgacagttgacccagcacctcctaagccatggtggcagagtatctgatagtgaagggtcagatcaagtctcctcggattatgaagatgagtctccccgacatctcggcgaggaagagatggaatcaaaagcatgcccccgttgtggagaaattggacatgttgctagcatgtgtttcacactctgccctcattgtgaggaagaccatccaccaggtgaatgtcccacccgcaaggtcacatgttttctgtgcgaaggtacaaaccatgtgcccaaggattgccaactcagtgtgttgttgaccaagaccgcagaaatccaacgaacaaccctacgattgtctcgtcagttagtcagctccaacagcaacatcgacgatatcatccacagcaccaatgctcctcttgctgcacctgactctgcaataaatcatagcaataataccttcagcaccaaccattctctgcaccgacggcctcagcaaagaattgtcgtcgatggaagaagttgtgtctctccccgacctactccaggccgagcgaagggcaatcaacctcaggaggatgataccaagcagaagaccgttattcgcttcaaccagcaatcagaaggaagcttctcctgtgaatga

SEQ ID NO: 15343 - DNA, 2733 bp, Oryza sativa
  Clone ID: TFbOSC101630j.C1.o12.fg
atggagtttggatgggccctgcgacgtcctatgcggcttccagattcacctaggcacgagaggggactgcccgctgccttgcgaggagtgggggtgaaacctgagggacggagcgccattacgccccctcccgaaaaggcacaagaggaagatgcagagaagaaagccagaggaaaagcaacattaaagtcgataatcgtagccccggcgagagctacaagcaagtttcaaatcgaggcagaagaacaatatctttcatcaaaatggcaagcggtaaaaccaaagttttggtggcggaagcgccaaaatccttcttcgtcaacctctcaggccgtcttcaatcgcccagctgcctccttcaatccactaaatctcagagaaaaattcaaggagatcttgcacggcaagtgcttccgctgcctcgcttcagatcaccaggcagcagcttgcagggatcccatccgctgctatacttgtagacgcagtggacacatctccttccgctgcccaaacaaatcaaagcaacccattcactcccgcctcaccttccccaagcaagccccctccattcaatcccaactcatcttcccaccgcttcccagcaagaaccaacagcaaccaacaacgacccgccctggttcggttttccatcgtttgcacaagccaacggtgaccatggatcacatacctggtctaccgaatcaacggccggcggtcggctatgcaacggtgccgatgacggagctcatgcagcacgagctggagcgccttcgctttcatggcgcactcatctcggccgaggttgagggacaggagacgtcccctagggaggtggcacgtgcactgacccagcaggttgggatccccatctcggacctgcgagtgacgcgccatcacccggaagatttcttcgtcttcttcgatttcccagaggggcaggccgcggcaacgcggagaggcttcatcactctggatggaggaaggttcaccatcacgccatggagcgccgacaggcatgtgcaccacccgaactggtggtttcgcgtgcggctctgcctggagggattgccgcagtacgcatggaacagggcgggattggagggcgtcatgggtcccatctgcctcttcgatcgcatcgagcatgagtcggttcagcggcagaacatggccatcttctcatgctggatgtggatgcggaatcctgacctcctgccacgaatagtgatctccaccttcttcccgccggaagctgggcgtgtcacctccggcatcacaccgccgcttccggacgagatcgcgccaccgccgagggggaggctgccgcatgtcatagtccatctggacgagatggaggactggactccaggaccgccccatccgccctgctcgccttcttccggcgtgagcggacttccctcctcggactcgtctgattcgggaggcccgatacccacggtgcgcaccttccagtggtacctgggctgcgccgacggaacccagcctcctcggcaacgggcggcagtgaggcggggatgcagggcactgccgcagagaagagaagacccagaggatgatgaggatgacaacgggcggcggcgccacgctgaggatattccaccacgccgccgctcgctgcgcgatgtcatcattggaagggactggtcggttgagtcgcgggcggcggaaggggcgcggcactggagccgcacgccgcatccttccggccgccagcgagcgcacggcgatgggtgccaaggccgctcacgaaccaggcacagctcccgatgctcctgccgctgcagatcccgtcgcacgcgctccccaagctccttgactcctcgcggtcaggacggcaccggcgatgcaggcggcgcgacgaccaaggtggtcgctgttagtggccaggctgatggcgaccagcagccagtcgacgctctcgtgagtcttcctgaccctctgatcaagatcctatgctcctcacccctgctccccttctcagatgaccagggggaccacgacccgatgctgccgctcctggcagagatcgctcccaagtcttcacgggaggcggagaacgagacgaagaggacgggtggggaagaaccgatactgggagaggataaggtggcgtcggcagctgagttgggccaggagaagatgggccatctcgtcccagatgcgcagcaggcccccaagatggacctcctcgctcagtccactggagatgacgaggcccaagcttccacaggagaccagcccaccctggtgcagcaggccgactgcgaggagcaacaccaggccacggtccagactcagcccatccacggaggagaaggtgaacgtgaaaaggtcgtcttatctcctctgttctcgcagctgcagccgccgatcatcctgcaggcgccgctcgagctggcgccgcccggcgcggccaagacgaaggggtgcggacgcaaggtggtgcagatgccgtcgcggcggagcggccgtaaggcgcgcttctcgtcggtgccggtgtctaagcgcgcagaagtgcgcctcatggaggagatggggctgctcaccccgggtgaaccggtcgtggatgcggtggtggaggcttatgcaaagtccttcgacacaccgcttccgttgcatgtcatcgccggtctgcgggcgctcacactcctggatggagtgcacgacatgccggtgccaggagagaaaggaaccaccgcaacggcggtggtctga

SEQ ID NO: 15344 - DNA, 1110 bp, Oryza sativa
  Clone ID: TFbOSC11448j.C1.o1.fg
atggaagcagaactcacagcactagatactgcgacagttgaggccgaatggcttcgtgaactcctggtggatttgccggtggttgaaaaaccagtgccagctatcctgatgaactgtgataatcaaacagtgattattaaagtgaacagttcgaaggacaacatgaagtcatctaggcatgtaaagagaagactgaaatctgtcagaaagcagaaaaactccggagtgatagcattggactatgtccagacggctaaaaagctggcagatcagtttactaaggggctaccacgcaaacgaagtgaaccgcctctctctcatgaggaggaggctaagttcgaggcttcggattgcctgttccgtggagcattgttcagtgtactcgctgacaatatagtggatgtgtatatgcacatgccttcagggaaggacatgtgggatgcacttgaggccaagttcggagtttccgacgctggcagcgagctgtatgtcatggagcagttctatgactacaagatggaacttgagaacaacaactgtgagttgccggacaagtttgtggcgggtggcattattgccaaattgccaccttttttgtcggactttgccacttctctaaaacacaagagacaagagttcagtgttaatgatctcattggctctttgggtgttgaggagaaggcgagggcaaaggacaaccggggcaaaaagatcgagggaggttctagtgccaatatggtgcagaagaagaaccctcacgcatcccacaacaacaagaaagtcaagcctgatgtcaaacccaaggctacaaccaattttaagaagaaaggcaagggaaaggcaaagggagattgctttgtgtatggcaagcctggacattgggccaaggattgtcctgagcgcaatgacaagaagtctgctaacatagtcattagtgagggcggaggaacatcggggtacggtcgggagaggttcctccttgttgatgggaaacgggtcgcttgcggctattcatggtgttggtacggtcgatctgaagtttacttcgggaaagatcgtgcagctgaagaacgtgcaacatgtcccttcaataaagaagaatctagttag

SEQ ID NO: 15345 - DNA, 1920 bp, Oryza sativa
  Clone ID: TFbOSC900186j.C1.o18.fg
atgcctccacaggtttctctacaactagtggtgatggcagcagatgaagggagccagatttggtggctagtagtgatgagcgacgaaagtggtatctctcaggcggatggaggcaaacgaagtgaaccgcctctctctcatgaggaggaggctaagttcgaggcttcggattgcctgttccgtggagcattgttcagtgtactcgctgacaatatagtggatgtgtatatgcacatgccttcagggaaggacatgtgggatgcacttgaggccaagttcggagtttccgacgctggcagcgagctgtatgtcatggagcagttctatgactacaagatggaacttgagaacaacaactgtgagttgccggacaagtttgtggcgggtggcattattgccaaattgccaccttttttgtcggactttgccacttctctaaaacacaagagacaagagttcagtgttaatgatctcattggctctttgggtgttgaggagaaggcgagggcaaaggacaaccggggcaaaaagatcgagggaggttctagtgccaatatggtgcagaagaagaaccctcacgcatcccacaacaacaagaaagtcaagcctgatgtcaaacccaaggctacaaccaattttaagaagaaaggcaagggaaaggcaaagggagattgctttgtgtatggcaagcctggacattgggccaaggattgtcctgagcgcaatgacaagaagtctgctaacatagtcattagtgagggcggaggaacatcggggtacggtaaatttttacctacagtactctctgtttttcattcacctgattggtgggttgatactggtgctaatattcatgtcgggagaggttcctccttgttgatgggaaacgggtcgcttgcggctattcatggtgttggttccaagtgccatacttgtgttcaattgaaacaacctcgcaagcctcacaaggcatctgaggcgaggaatttggcacctctagaacttgttcattccgatctgtgcgaaatgaatggcgtgttgactaaagggggaaagaaattttttatgacactgatagatgattgcactagattttgctatttgtatctattgaaaacaaaggatgaagcattgcattactttaagatctataaagctgaggtagaaaaccaacttgaaaggaaaatcaagcggttgaggtctgataggggtggagagtatttttccaatgagtttacatccttttgcaaagagtttggaattattcatgagaggacgtctccctattcaccccaatcaaatggggtagccgaaagaaagaaccgcactctaactgagatggtgaatgccatgttagacactgcgggacttcccaaggaatggtggggtgaggcaattttgactgcctgtcatgtcttgaataaaattccaatgaagcataaggaaataacaccattcgagcaatgggaaaggaagaaattaaatctctcatacctacgtacatggggctgtttggccaaggaagcggtacgcagtgagatagactcaattatgtttaatggtacttgtgaagtcgttgagcgtccatatgggtgcaagcctgtaggatgcaaatgggttttcaagaaaaagcttaggcctgcaaatgggttttcaacaaaaagtttaggcctgatgatggacgttaagacagcattcctaaacggagagctggaggaggagatctatatggatcaaccagacgggtatgcactagaaggtcaggagggaatggtgtgtaaacagttgaaatccttgtatggccttaagcaagcacctaagcaatggcatgagaagtttgacaccacacttacatctgctggctttgttgtgaacgaagctgacaaatgtgtgtactatcgctatggtgggggagaatga

SEQ ID NO: 15346 - DNA, 738 bp, Oryza sativa
  Clone ID: TFbOSC15136j.C1.o2.hg
atgcgaactgaagaagaagtacgtaagatgactattaccagcaccgaatggcctccagctgggataactattcctagacgtcaaagaggaaatactttccgaggtgcacgacagttgacccagcacctcctaagccatgacggcagagtatctgatagtgaagggtcagatcaagtctcctcggattatgaagatgagtctctccgacatctcggcgaggaagagatggaatcaaaagcatgcccccgttgtggggaaattggacacattgctagcatgtgtctcacactctgcactcattgtgaagaagaccatccaccaggggagtgtctcacccgcaaggtcacatgttttctgtgcgaaggtacaaaccatgtgcccaaggattgccaactcagtgtgttgttgaccaagaccgtagaaatccaacgaacaaccctacgattgtctcatcagctagtcagctccaacagcaacatcgacgatatcatccacagcaccaatgctcctcctgctgcacctgactctgcagtaaatcatagcgataataccttcagcaccaaccattctctgcaccgacagcctcagcaaagaattgtcgtcgatggaagaagttgtgtctctccccgacctactccaggccaagcaaagggcaatcaacctcaggagggcgataccaagcagaaaaccgtcatccacttcaaacagcaatcagaaggaagcttctcctgtgaatga

SEQ ID NO: 15347 - DNA, 2184 bp, Oryza sativa
  Clone ID: TFbOSC25727j.C1.o1.fg
atgaaatgcttctgggtgagtactggcaagcctatggaagttcttaatgctgaccagcagaaagaattcgacgaggccactactctcttcgtgggatgcattcttagcgttcttggcgatcgtctggtcgaggtgtatatacatatgaccgacgctaaggagttgtgggatgcactgattgctaaattcggtgctactgatgctagcaataatctgtacatcatggagctgtttcatgactacaagatggctgataaccgttctgtagttgagcaggcccatgtaatacagaccatggctaagaaactcgagcaggcccatgaatactccgttgaggggttgatagcgtctcttgatgttgaggagaaaactcgggaaaaagactctgcgtctaagggcgatggtgggcaatccagcgccaatgttgtgcacaaggcccagaacaagagcaaggggaaatacaaagctcagcagaccaccaacttgaagaagaagaagaacaacaatcctaatcaggatgagaggacttgctttgtgtgtggcctacctggtcatctggccaggaagtgtccacaacgcaaggggatgaaggcacttgcagggcagacttctaagtctgctaatgtgaccattggcaacactagagacggaagcgggtatgataatttaccttctggtttttcagttaatcagtctactaattggtggattgatataggggccaatgtcgcacggggttccaccgtcctaatagggaatgggtcacatgcttctgttcatggtgttggcacggtagatctgaaatttacttcaggaaagatcgtgcagctaaagaacgtgcagcatatccctactatcgacaggaatcttgttagtggctcccgtctaactagagatggatttaagttggtttttgagtctaataaaatagtcctgtctaaacatggatattttattggtaaatgttatgagtgcggaggcctgttccgcttttccctttctgattttctgcaagttcctaatagaaataaggacaaaacaccatatgagatatggattgggagaaaaccatcactttcttatttgcgcacatgggggtgcttggcgaaagtcaatgtaccaataacgaagaagcgcaaacttggacctaagactgtggactgtgtctttttgggatatgctcatcacagcattgcctatagatttttaatagttaaatctgaggtacctgacatgcatgttggtacaattatggagtctcgtgatgctaccttctttgtgaactttttcctaatgaaggatacacatagtagttctagccaaccctctgaaataattcccagttcaatcacatcaccagaacaaactgaacatacacatgaacatgtcactgaggagaatgacagtgaaggtcctcgaaggagtaatagacaaaggacggctaagtcttttggtgatgatttcattgtgtacctcgtggatgacacttctaagtcaatttcaaaagcatatgcatctccagatgcagactactggaaggaggctgtccgtagcgaaatggattccattatcactaacgggacttgggaggtgatagagcgaccctatgggtgtaaacctgttgggtgcaagtgggtgttcaagaagaagcttaggcctgacggtactattgaaaagtacaaggctcggcttgttgctaagtgctatactcagaaagaagagctggatgaggagatatatatggatcagcccgatgagtttgtagttgatggtcaagaaggcaagaaacaagctcctaagcaatggcatgagaaatttgataaaacattgacatctgcaggctttgcaatcaatgagaagatcttgaatcgcattggttacattgacaagctgacggcactggatactgctactgttgaggcagaatgggtgcgtgatctattaatgcacctacctattgttgaaaaatcggtgccggctattcttatgaactgtgacaatcaaacgaaagctggcaaatcccttcacgaagggactatcacgaaatgtgatagacaatgcatcgaaggagatgggtttgagacccatagcattcttgaaagaacttacctttgtgagcttgactgttggtcgcagtctatgaagatgttgggtgaatcttctaggaagcttactaaagactaa

SEQ ID NO: 15348 - DNA, 736 bp, Oryza sativa
  Clone ID: TFbOSC26403j.C1.o1.fg
atggagctgtttcatgactacaagatggctgataaccgttctgtagttgagcaggcccatgtaatacagaccatggctaagaaactcgagcaggcccatgaatactccgttgaggggttgatagcgtctcttgatgttgaggagaaaactcgggaaaaagactctgcgtctaagggcgatggtgggcaatccagcgccaatgttgtgcacaaggcccagaacaagagcaaggggaaatacaaagctcagcagaccaccaacttgaagaagaagaagaacaacaatcctaatcaggatgagaggacttgctttgtgtgtggcctacctggtcatctggccaggaagtgtccacaacgcaaggggatgaaggcacttgcagggcagacttctaagtctgctaatgtgaccattggcaacactagagacggaagcgggtatgataatttaccttctggtttttcagttaatcagtctactaattggtggattgatataggggccaatgtcgcacggggttccaccgtcctaatagggaatgggtcacatgcttctgttcatggtgttggcacggtagatctgaaatttacttcaggaaagatcgtgcagctaaagaacgtgcagcatatccctactatcgacaggaatcttggtagtggctcccgtctaactagagatggatttaagttggtttttgagtctaataaaatagtcctgtctaaacatggatatttaattg

SEQ ID NO: 15349 - DNA, 1361 bp, Oryza sativa
  Clone ID: TFbOSC401381j.C1.o2.np
ccctcctagccacttgaagcatgtgaggtggagagaagagggggaacacacgggcgtacttgctcgcctcgctttgctgggcagggcaggcggcgcacgtgcacgacgtacattcgaatggtccgaaaaattggttccttacccttgcgcggatgtagatgaggctactactctctttatgggatacattcttagcgttcttggcgattgtctggtcgaggtgtatatgcatatgacgctaaggagttgtgggatgtgggatgcactgaatactaaattcggtgctactgatgctagcaatgatctgtacgttatggagcagtttcatgactacaggatggctgacaaccgttttgtagttgagcaggctcatgagatacagaccatggctaaagaactcgtggagcagtttcatgactacaggatggctgacaaccgttctgtagttaagcaggctcatgagacagaccatggctaaagaactcgtatactgcactcaaacacaacagacaggaatacaccgttgaggggttgatagcgtctcttgatgttgaggagaaagctcatgaaaaagacttcgcacctaagggcgatggtgggcagtccagtgccaatgttgtgcacaaggcccagaacaagagcaaggggaaatacaaagctcagcagaccaccaacttcaagaagcaaaagaagaacaacaacaatccgaaccaggatgagagaacttgctttgtgtgtggcttgcctggtcatttggccaggaagtgtccacaacgcaaggggatgaaagcacctgcagggtagacttctaaatctgctaatgtgaccattggtaacactagagaaggaacaacttatggtaatttacctactattttttcagttaatcagtctactaattggtggattgatacaggggccaatgtacatgtttgtgctgatatttcgttgttctcttcttatcaagtcgcacgggattccaccgtcctaatggggaatgggtcacatgcttctattcatggtgttggcacggtagatctgaagttacttcgggaaagatcgtacagctgaagaatgtgcaacatgtccctactatcaacaggaattttgttagtggctcccgtctgactagagacagatttaagttggttttcgagtctaataaagtagtcgttgtgaaatcatttcactatgggagaaaatttcttgctatgggagagtttctaaaattgattttgaaagtctttgttttatctgagatagtgtatatagttgctaaaatctctaaagagatgatgttttggcattgtaaacttggatatattgtttttatcatcatggatcggtcgtcatggatgtat

SEQ ID NO: 15350 - DNA, 1413 bp, Oryza sativa
  Clone ID: TFbOSC406456j.C1.o1.fg
atgtcgtggcagagggttggtgccctgctgcttggggctcagtcctgcctgcctgtcccgggggttccggccgtaggcaggattgggtcggtactcttgtttatggctaggatgggttgggaactatgtcacgtcttccgtccgtataccgtggtgatgtttaacagagaaaaaggaaagaatgtcagagggtatgcctccagtaactcaagttttcaactcaatccaccactggcctcaagagagttaaccagggcacacccttggtccattccaagcatgccgcttagttcacagctaccattggttggaagtcaagaccaaaatcagtatgtgtttgatcgagcatttgccacccaggtcaatgagcttccaatgccagaagaggatgtccccttttgtcacgattgtagagaacaaggacactatgccctgaattgtccatgggtatatgccaaagaagccccttcctttggtttaacagggcagacatcgctaaaccagcctcctcgcaccaagtcaagcttgcagcctagtgtgcaaagtagagagcccaatggagagaatccattgaatcccgggaattgctttcctcctagcccttcgtaccacgtggggtcacgtactaagcaagccaaaggcaagaagagtaagaatcagaagagaaaagcgccgatgcgaactgaagaagaagtacgtaagatggctattagcagcaccgaatggcctcccgcagggataactattcctagacgtcaaagaggaaataccttccgaggtgcacgacagttgacccagcaccttctaagccatggtggcagagtatctgatagtgaagggtcagatcaagtctcctcggatgatgaagatgagtctccccgacatctcggtgaggaagagatggaatcaaaagcatgtatccgttgtggagaaattggacacattgctagcatgtgtctcacactctgcgcttattgtgaagaagaccatccaccaggggagtgtcccacccgcaaggtcacatgctttctgtgcgaaggtacaaatcatgtgcccaaggattgccaactcagtgtgttgttgaccaagaccgcagaaatccaacgaacgaccctacgattgtctcgtcagctagtcagctccaacagcaacatcgacgatatcatccacaacaccaatgctcctcctgctccacctaactctgcaataaatcatagcaataatatctttagcaccaaccattctctgcaccgacagcctcagcaaagagttgtcgtcgatggaagaagttgtgtctctccccgacctactccaggccaagcaaagggcaatcaacctcaggagggcgataccaagcagaaaaccgtcatccgcttcaaccagcaatcagaaggaagcttctcctgcgaatga

SEQ ID NO: 15351 - DNA, 2584 bp, Oryza sativa
  Clone ID: TFbOSC18459j.C1.o2.np
gaatctgagttgcttgttcgtgcgccgccgccgccgccgattccgccgcatcccgccgtccccgcgcgcaataaagtggggggaatcattccccgtgattccctctccgttttcccccgcttttccctctctctctccctcggattcgttcggatttaatcccgcaagtttcaccggcgtcattgatggagccgagatctccgcggccgattcctccctctccggccgctctctccctctcccgacgctatataattgttccccgtgcctccctcctccgtttccgccactcgccgctcgctctccccgtcggattcgtgctcgcgccgtcctcctctctctccgccgtcgccgccgagctccggttcgccgccgccgtcgctccggacttcctcccgactcggcgtcacctccatcggcttcgccgcgtcgtcgtcgacctcgtccgctcctccgtttcgcccgccgaccgccggagcaccgtcgtcctcgccgtcccgaaccgcgccgccgctttcctccactccggtcgtcgtttccgccgtcctcgtcgtcccggggtgagccgtggaccgcccctttcgcttccctctcttctccgctctctcgggcgccgctccgccgcgccggtggtcgccggcggtgaccatcggggcgcgggtgcgccgcctcccgtcggccgtgccggcgaggccgccttcgggcgcgccccgcggctgccaagtggggcccggccgtcagccgcccgcgctcgcgggatgtttaacagagaaaaaggaaagaatgtcagcgggtatgcctcaagtaactcaagttttcaactcaatccaccactggcctcaagagagttaaccagggcacacccttggtccattccaagcatgctgcttagttcacagctaccattagttggaagtcaagaccaaaatcagtatgtgtttgatcgagcgtttgccacccaggtcaatgagcttccaatgccagaagaggatgtccccttttgtcacgattgtagagagcaaggacactatgccctgaattgtccatgggtatatgtcaaagaagccccttcctttggtttagcagggcagacatcgctaaaccagcctcctcgcaccaagtcaagtttgcagcctagtgtgcaaagtgaagagcccaatggagacaatccattgaatcctagaaaatgctttcctcctagcctttcgcaccacgtggggtcacgtactaagcaagccaaaggcaggaagagtaagaatcagaagagaaaggcaccgatgcgaactgaagaagaagtacgtaagatgactattaccagcacagaatggcctccaccaggaatgacaaaacgtcagagaagaaataccttccgaggtgcgccacagttgacagagcaacttttagctaatggaggtagagtgtctgatagtgaagattcagatcaagtctcctcagatgatgaagatgagaagtctccccaaggtttcaaccagaataaaatggaacataaggcatgctctcgttgtagagaaatcggtcatgttgccagctcgtgtgccactacatgcgttcattgtgaggaagaccatccacccgacaggtgtccaacgagcaggatcacttgtttcttttgtgaaggaactgatcatgtaccaaaagattgtcaattcagttttctgctgacgaagaagatggccaaccaacccgccagttccaacggagagaagcatcaaggcaacacaaatcctcgccaagattacagtttcagcctgactccagtgccaggacagaggaatcaaaatgagaaaagaaaatgccgagtccgggaagatatctgttgcttcaattgtcaaggaatgggtcatttcgccgacaagtgcccaaaaccgagaaacatagctgccggcacgtcagtccacgtaactccctgcactcagaagcttgctcctcagcgaattgtcatccatgcatcccgaagcagtcctatagcccgcgttgcaacagctccaactccagcgagagcattaccacaaggtgtcaatgctcaatttcagccccagccatcagttgacaagacagaggccagtatcggcattgtacctttggatgttccagcacagcagccaaggaatcaagtacaagatgaagaacctgagcaagaccatccaccaggggagtgtctcacccgcaggtgacatgttttctgtgtgaaggaacaaaccatgtgcccaaggattgccaacttagtgtgttgttgaccaagaccgcagaaatccaacgaacaactctacgattgtctcatcagctagtcagctccaacaacaacatcgatgatatcatccaccgcaccaatgctcctcttgctccacctaactttgcaataaatcatggcaataataccttcagcaccaaccactctctgcatcgacagcctcagcaaagaattgtcgtagatggaagaagttgtgtctctccccgacctactccaggccaagcaaagggcaatcaacctcaggagggcgataccaagcagaaaaccgtcatccgcttcaaacagcaatcagaaggaagcttctcctgtgaa

SEQ ID NO: 15352 - DNA, 1290 bp, Oryza sativa
  Clone ID: TFbOSC400691j.C1.o14.fg
atgtcgtggcagagggttggtgccctgctgctaggggctcagtcctgcctgcctgtcccgggggttccggccgtaggtgggattgggtcggtactcttgtctatggctaggatgggttgggaactatgtcacgtcttccgtccgtataccgtggtgatgtttaacagagaaaaaggaaagaatgtcagagggtatgcctccagtaactcaagttttcaactcaatccaccactggtctcaagagagttaaccagggcacacccttggtccattccaagcatgccgcttagttcacagctaccattggttggaagtcaagaccaaaatcagtatgtgtttgatcgagcatttgccacccaggtcaatgagcttccaatgccagaagaggatgtccccttttgtcacgattgtagagaacaaggacactatgccctgaattgtccatgggtatatgccaaagaagccccttcctttggtttaacagtgcagacatcgctaaaccagcctcctcgcaccaagtcaagcttgcagcctagtgtgcaaagtagagagcccaatggagagaatccgttgaatcccgggaattgctttcctcctagcctttcgtaccacgtggggtcacgtactaagcacgccaaaggcaagaagagtaagaatcagaagagaaaagcgccgatgcgaactgaagaagaagtacgtaagatgactattaccagcaccgaatggcctccagcagggataactattcctagacgtcaaagaggaaataccttccgaggtgcacgacagttgacccagcacctcctaagccatggtggcagagtatctgatagtgaagggtcagatcaagtctcctcggattatgaagatgagtctctccgacgtctcggcgaggaagagatggaatcaaaagcatgcccccgttgtggagaaattggacacattgctagcaggtgtctcacactttgccctcattgtgaagaagaccatccgccaggtgaatgtcccacccgcaaggtcacatgttttctgtgcgaaggtacaaaccatgtgcccaaggattgccaactcagtgtgttgttgaccaagaccgcagaaatccaacgaacaaccctacgattgtctcgtcagctagtcagctccaacagcaacatcgacgatataatccacagcaccaatgctcctcttgctgcacctgattctgcagtaaatcatagcgataataccttcagcaccaaccattctctgcaccgacagcctcagcaaagaatctctccagaatcagaatga

SEQ ID NO: 15353 - DNA, 1293 bp, Oryza sativa
  Clone ID: TFbOSC412750j.C1.o3.fg
atggatgaagtcgggcgtcgatggacattctccagggcaaatgaaggctacacgagctgcggcccggaatggtggccctgggttggcttggaacaagctggaaccccaggtcgggttcccagttcggtccaaatcatggtaggccttgggttaaggcagatgtttaacagagaaaaaggaaagaatgtcagagggtatgcctccagtaactcaagttttcaactcaatccaccactggtctcaagagagttaaccagggcacacccttggtccattccaagcatgccgcttagttcacagctaccattggttggaagtcaagaccaaaatcagtatgtgtttgatcgagcatttgccacccaggtcaatgagcttccaatgccagaagaggatgtccccttttgtcacgattgtagagaacaaggacactatgccctgaattgtccatgggtatatgccaaagaagccccttcctttggtttaacagtgcagacatcgctaaaccagcctcctcgcaccaagtcaagcttgcagcctagtgtgcaaagtagagagcccaatggagagaatccgttgaatcccgggaattgctttcctcctagcctttcgtaccacgtggggtcacgtactaagcacgccaaaggcaagaagagtaagaatcagaagagaaaagcgccgatgcgaactgaagaagaagtacgtaagatgactattaccagcaccgaatggcctccagcagggataactattcctagacgtcaaagaggaaataccttccgaggtgcacgacagttgacccagcacctcctaagccatggtggcagagtatctgatagtgaagggtcagatcaagtctcctcggattatgaagatgagtctctccgacgtctcggcgaggaagagatggaatcaaaagcatgcccccgttgtggagaaattggacacattgctagcaggtgtctcacactttgccctcattgtgaagaagaccatccgccaggtgaatgtcccacccgcaaggtcacatgttttctgtgcgaaggtacaaaccatgtgcccaaggattgccaactcagtgtgttgttgaccaagaccgcagaaatccaacgaacaaccctacgattgtctcgtcagctagtcagctccaacagcaacatcgacgatataatccacagcaccaatgctcctcttgctgcacctgattctgcagtaaatcatagcgataataccttcagcaccaaccattctctgcaccgacagcctcagcaaagaatctctccagaatcagaatga

SEQ ID NO: 15354 - DNA, 2637 bp, Oryza sativa
  Clone ID: TFbOSC401056j.C1.o5.fg
atgtcgacaaccggtgacaacaacaacactggagacaaggacaaggcaatactgcctcaaactccagcggagggccattctcgggttggctttgctgcatccctaaaaccacatgctttcgatggttcaaattataaaagatggaaagcacgtgcacttttgtggttgacggcggtgcattgtttctttgtctcacggggcaaaccaagtgaactgcctctctcacctgaggaggaggctaagttcgaggctgcggattgcttgttccgtggagcattgatcagtgtgctcgccgacaatattgtggacgtgtatatgcacatgccttcaaggaaggacatgtgggatgcttttgaggccaagttcggggtttccgatgccagcagcgagctgtatgtcatggagcagttctatgactacaagatggtcgatggtcgttctgtagtggaacaggctcatgagattcagatgttggcaaaggaacttgagaacaacaactgtgagttgcctgacaagtttgtggcaggtggcattattgccaaattgccaccttcttggacggactttgctacttctctaaaacacaagaggcaagagttcagtgttactgatcttattggctctttgggtgttgaggagaaggcgagggcaaaggacaaccggggcaaaaagatcgagggaggttctagcgccaatttggtgcagaagaagaaccctcacgcatcccacaacaacaacaagaaagtcaaacctgacgtcaaacccaaggctacaaccaattttaagaagaaaggcaagggaaaggcaaaaggaggttgctttgtgtatggcaagtctgggcattgggccaaggattgtcctgagtgcaaggacaagaagtctacaaacatggttattagtgagggcggaggaacatcgaggtatggtaaatttttacctacagttctctctgtctgtcactcacctgattggtgggttgatactggtgctaatattcatgtcgggagaggttcctccttgttgatgggaaacggatcgcttgcggctgttcatggtgttggttatgacagcggaggcttgttccgcttttccttggatgatatgtgtaataaagttgtgaaccatgatgaagcattacattacttcaagatctataaggctgaggtagaaaaccaactggaaaggaaaatcaaacggttgagaattcctactaagcataaggaagtaacaccattcgaggaatgggaaaagaagaaattaaatctctctcacctgcgcacatggggctgtttggccaagagatgccacttttttgagaatgaatttcctatgaaaaatgcacctagtacttctagtcaagaacctattttatcccctgagcactttatgccgatagaacatattgatcaaacgcttgaggaaaatcctaaggaggataacattgtagcaactcgaaagagtaagagacaaaggactgcaaagtcttttggagatgactacattgtatatcttatggatgatactccaagaaccattgaagaggcatattcatctcctgatgctgactattggaaggaagcggtacgcagtgagatggactcaattatgtctaatggtacttgggaagtcgtcgagcgtccatatgggtgcaagcctgtaggatgcaaatgggttttcaagaaaaagcttaggcctgatggtacaattgaaaagtacaaggcaaggcttgtggccaagggttatacccaaaaagaaggcgaggactttttcgacacttattcaccggttgctcgcttgaccacgattcgagtactactcgctctggcagcctctcatggtctactcgtccatcagatggatgttaagacagctttcctcaatgaagagttggaggaggagatctatatggatcaactagatgggtatgtactagaaggtcagaagggaatggtgtgcaagctgttgaagtccttgtatggtctcaaacaagcgcctaagcaatggcatgagaagtttgataataaacttacatctgctggctttgttgtgaacgaagctgacaaatgtgtgtactatcgctatggtgggggagagggagtgatcttgtgtttatatgtcgatgacatattgatctttgggaccaggctcaatgtgattgaggaggtcaaggactttctgtccaaaagcattgaaatgaaggatttgggagtgggtggtgttattcttaacattaaactactgagaggagatgagggtgggattacacttgtgcaatctcactatgtggacaaggtcttgagtcgctttggttatagtgactgcaaagctgctcctactccttatgatcccagtgtgctattaaggaaaaaccgaagaatagcaagggatcaattgagatactctcagatcattggttcattgatgtacttagctagtgcaacgaggcctgacatctcatttgctgtgagcaagttgagccgtgttttttcaaatccgggagatgatcattggcatgctcttgaaagagtaatacgctatctaaaagggacaatgagctatgaaattcactacgccggtacccaaaagtgctggagggctatagtgattcaaattggatatctgatgctgatgagataa

SEQ ID NO: 15355 - DNA, 2065 bp, Oryza sativa
  Clone ID: TFbOSC497j.C1.o1.np
atggcattgcagccatttaccgacgacctcctcgccgagatccttctccgcctcccgtcggcggcctccctccaacgcgccgcgctagcctccaagtgctggctcgccgtcgcctccggccccgacttcctccggcgattccgcgcccgccacacctagtcgcctctcctcggcctgttcgtctcccacgggagctccggcctccccgtgttccaccccgccgcgaccgtccgctccgaccccgacctcggcgccgcggtactcgggggcgacttctcgctcatccgcgtcggggacggcgaggatccccgctggcaactccgggactgccgcaacggccgcctgctcctctgcggaggtagatccgtcgccgtctacgacccggtgtcccgccggcgcgtctccatccgccgcccacaggacgaccccttctcggacgcctacattgccgactgcttgctgcacgggcgcggcgacaacggcgcggcgtcgttccgcgtggtgtccgtgcagcgccatggccggaggatgcgcgccgcggagtacaactccggtactcgagagtggagcttccacccgtgggtggaaaacatgaggcggcctcgccggggccaggcgatgcatgcggcggggattatcttctggaaatgcgaggacaattttgtgatattgcttgacacgctcacgatggaattctccatgctcagtctccctgtaagcttgttccagccttccaagtacgccataggggagatggaggatggcgtgtgctgccttgtatgccttgatggcaccatggacaacgtccacatgcaagtgtggctgctcatggaggaggacggtggtggcaggaggtgggaattggagaaggaaatgccggttagtgaagtgcttgacaggcattccctggtgcgacaagtccgaacagtggctagtggattggttcttgtttcctgggatgaccgctatcctcaatttgccattgacctgaagaatatgaaggtcatggctgagtttaggtgcagcggcgagacttatcttttccaaacgccatggccacccgctttgttggtcgatagcgaggttcaaccagcggatttggctattcctttacaatctgcagaatatgtggagccgcttcagatgatcgctactcagaacatgatgaaacatgttaatcttgctgcagagagaactgatgttgtgaattcagagggcccattggatttggtattggaaccacatggcccactggacgcacaacaagctatggctgctgaagcggagaccttggtggtaacagcagacctgaaattagtcaggtctactgaagcacaaaaccagtcagtagctgaaaaacctgagatcatgaaggggcctgaagtcccagtttcgaaaaggagcatgtcacgtttggaaaaaagaagaggggaaagatatgagagtgctctccacaaggcaatggagaggaaagctcgttacatgggtggtgtggaacagcttagtacttctcttggaagaaactacagaagatcagagaagccaattgttgtggactctagttacgagagatactaccagtgtcgtcaacgtcgagagaagccaattgttgtggactctcgttacggtaaatactaccagcgtcgtcaacgacgaccagccgcaggagttcagggaagcatcaccggactcaacaaagaatccccacgaggtttgtcattgaatctgaggaactttaacaacagccctgtcaatcgaaattgcgcagaagcccggcagtgtgaggcggccggcaagtcggcagcggggctgtcgctgacggcatggcgttcaagcacgatgttctacgcaagtagcatggctatggccgctgccgtcatggagcttgacatcgaggcacccatggcgtctaagagcatggtgcaagaggcgggaggacggaggcaccagcgcgtggagttgggtggtctcctcgagttcgaactcgtcctcatgtccccgttgtcaccgagctggcccaccgccggagctacgatagtgctgttgcatgccattgtcagcgagt

SEQ ID NO: 15356 - DNA, 1671 bp, Oryza sativa
  Clone ID: TFbOSC17441j.C1.o2.gm
atggaggagaaaccgtcaacttcatgtctgttcggaagtcaagtcaagtcaagcctcaagcttcatgcaaggagcgagaagatcagttcaaagtcgtcgttccgcgaagatcaagagtcacgtcaatgtcacccaccgcaggtgccagatcagatgccagcccggaacccgaatcagagtcagagtcaggagttcccaatatcggcaccgaagacccctgtcaaaatgctgtccagatccccgaagataacgacagccaagtcatcgtcagaccaaaggaaagtaagtgctacctgttatgactgtggtgagcaaggtcattatgtaaggaactgtccatggaaggtgttcgccaggtcacctgaaaaagacgagaagcagtgcccagggagtaaccaagctccaagtcagtctaccgacaagaaggatggtactttgcagcccaactctggagcgaacaggaaggtgacatggaagatggataatggcaggaccatgatcatcacaagttcagaatttactcctgaagacgcagcaaggatacccaagcgtcagagaggaagaaataccttccgtggagcacgccagctaacccgacatctcataaagtacggttcgcccagacccgaagatgatgaatcaggagagcagttttctgctgatgacgatgatgatgatactgatgacgatgatgatacgacccttaacagtttcatggaaagaggattggagttcaaagcatatcatgtgcctaaggactgtcagttaaacgcggtcatagctaagaccaagaaagaacaagggacaaccgtgcaacccattcgtcaaccaatgacaatcgacaacagcggtcacaatccttctgctcttcctccaactctagttccagtggaagccaaccatggaagaagcaacgtcaccaaggatgttcataagtctctgcttgttcccgtttcagctgccaaagtgcataatcagaagcctgcaccccgagaccaagcaagtcgattctgtcacaactgtcgtaagccaggacatcgtttcagtgattgtcctcttccaagagcagcaaaggcagttcgtcgtgattcacaagttaccagcactgcccatgacaccaatcgacacctgaatgtgcaacctccgccccaacggattatcgtcaagggcaccgtcaaaggtcacattgttccaccagcaatcgtttcaagcctacagcaccaacgccagcagcgtaagcaatgccaggagaacaacagctcgctacagctacaaagaggcggtacgccccttcgtcagcacccgcggcaagtgttgtcagcaccaggtcgcccaactgttgtcagttctagcaatgcacctcgtattgctccaatctggaggcccatcgacaaatcaccgttcggtaaccccacgggcaagaagatcctacccgttacagctgacaagacagttgcccctccaccatcgaagatcaacaagcagagcaacgttcccggtcatacctacccccactccgccagagacagaggcgacgtgggggcacggccgcccgttcaatcggacgtgaccggcaacaggccggtcacagattggtcacctccgattgacaggggtcagctaggcgcaccgcatgcctgcccttatcgcgttaaatgcagtgagggatag

SEQ ID NO: 15357 - DNA, 5355 bp, Oryza sativa
  Clone ID: TFbOSC400545j.C1.o64.np
atcttggaaacagatgagagaagaactaggaatagagttatccgtttttgcaaggttcaatggagtaatcactcagagggagaatcaacttgggaacgagaagatgaattaaagtcagctcatccccatttgttcgccagttcttccgaatctatttcgacgtttccggagagtccgttttcgcaggagaagaatttgaagagttccaagtccagcaaggcaactcctggtttggaatggttaattcctggtttggagatagaactgtgcagccggggttggttgttcagaatagttgggcctatgcaacaggatgccgcgctacaagcctgagtacttgtttggtactgagggatttgtccaggagttgcgtacgatgtcctttgccataggctttgggactgcccctttgtatgcccagattcctcatgatcatgatgaagagaagtgccgtgtcaaagtcaccttgaacagtaatcgtgaagatatcccatcggtgatgttcgaggctggagggggaaactatattcatgcatgtcaggaggtggcaaggatcgccataggagagctccgtgatcgctacagtgatcagttggccaacactgagtatcgctaccatcctctccaaccccagggaagtgaccgtggcagctaccttgaacctgaggggattgagaatgatgccaccacaaggcatttggttgagatgctgtgggctatggatgagacccgcgcggagattgtgttagcagctcaagatcgtgaagaccggaatcgtggtaagatttgcaaactagaggacaaggtggatcgtttggaaaaggaactagccgcgttgaagggagaagcaccaccacaaaaggccagggttcgtcttaccgcaatgaagagagctctatttgtccctcgctaccagttggcgccaaagatggtgctcactcgcagcaacgggaaaggccccaacatcaacaacaacaacaacaacaatggagagaatcccacgcttgcccaagtcctggctcaacaggcacagcttatgaacatgatgatgcagcaactccagaaccagcagaaccagggaaacaaccatgcacctccccagaacaagttagcagaatttcttcgtgtgaggccgcctactttttctagcactactaatccagttgaggctggtgattggctgcacgccatagagaagaagttggacttgcttcagtgcactgatcaggagaaggtctcatttgcatcacaccaactgcatggccctgcctctgagtggtgggatcacttccgccttaacaggactactgctgaacctatctcttggcttgaattcaccgctgctttccggaagacgcatataccatcgggagtggtgtctctcaagaagaaggaattcaggtcgctcacccagggatcccgcacggtcaccgagtatctgcacgagttcaatcgtctggctcgttatgctccggaagatgtgcacactgatgaagagcgtcaggagaagttcttggaaggacttaatgatgagctttcttacccactcatgactggggattatcatgatttccagaagttagtggataaggctattcgtcaggaggacaagtacaaccgcatggagcagaagaaacgccggattgctcacttcaaggcacaacaggggaatagtcagaggccgcgtcttactttgggaccccagtccatgccacagggaggttcttcatctgttgttcgtccgcagcgtcagttcttcaacaacaacgcgggcaacaacatccgcaaccaagctccacgccctattgcagctctgacacagcaacagcctgccaagaaggagcaaggtagcaagcccggggtgtgcttcaactgtggtgaaccaggccattactctgacaagtgtccaaaaccccgatgcgtgaaggttgtccctgtccagagcaactctaccgcaccagcatcaaaggctcgtgtcaatcatgttgctgctgcagaagctcaaggtgctccagatgtgattttgggtacgttccctgttaactcatttcctgcaatagtgctttttgattctggtgctacacattcatttttatctatgagttttgcggggaatcatgggatggaagtagaagatcttagacgtcctttgatggttagtaccccgagtaatcaagcactctcattgcaacgtagcccctctgtcagaatagagattcaaggagtaccatttctggccaatcttattctgttagaatccaaagaccttgatgtcatcctagggatggactggttagccagatataaaggtgtgatagactgtgccaacagaaaagtaactctcaccagcaatgatggtcgagttgtaactgttcatgcattgtcttctgagcctttaaggtcaagtctgaaccaaatagctttggaagagattcccatagtacaggaatacccggatgtgttcccggacgatttacctggtatgccgcctaaaagagatattgaattcagaatagatctggtaccaggaacaactttgatccataagagaccttatagaatggcagccaatgaattagcagaagtcaagagacaagtagatgatttgcttcagaaaggatacatcagaccaagttcgtctccatggggagctccagttatttttgtggaaaagaaagatcatacccagaggatgtgtgtggactatcgtgcactaaatgatgtgactatcaagaataagtatctgctgcccagaattgatgatttgtttgatcagcttaaaggtgccaccattttctccaagatagatctccgatcagggtatcaccagttgaggatcaaagaggaagatatacctaagacggcttttaccactaggtatgggttgtttgaatgtactgttatgtcttttggacttaccaatgccgccgctttcttcatgaacttgatgaataaggtgtttatggaatacctagataagttcgtggtggtctttattgatgacattcttatctactcccgaaccaaagaagagcatgaagaacatcttcgccttgcactagagaagctacgagaacatcaactgtaggccaagtttagcaagtgtgaattttgattgtctgcagtgaagttccttggtcacgtcatctcagccggaggagttgccgttgatcctagtaatgtggaatccataaccaactggaaacaaccaaagacagtttcagagattcgcagtttcctgggtcttgcgggttattaccggaggtttatagagaatttctccaagattgctaagcccatgacatgactgcttcagaaagatgtgaagtacaagtggtcagaagaatgtgagcagagttttcaagagttgaaaagtcgcttaatatcagcacccattttgattttgcctgatccaaagaagggtttccaagtgtattgcgatgcatctaagcttgggttaggttgtgttctgatgcaagatgggaaggtggttgcctatgcatctcgtcagttacgtccgcatgagaagaactaccctactcatgatcttgagttagctgcagtggttcatgcgctgaagatttggcgtcattatcttttcggtactcgtacagaggtgtacaccaatcacaagagtttaaagtatatctttactcagccagatctgaacatgagacaacggagatggttggaattcattaaggattatgacatgggaattcattatcacccgggaaagactaatgttgtagcagatgctcttagcaggaaaggctattgcaatgctacggaaggacgacagttgccattggagttatgcaaggaatttaaaagattaaatttgggaattgtcagtagaggtcttgttgcagccttagaagcgaagcccactctcatcgatcaggttagagaagcccaaattaatgatcctgatattcaagaaattaagaagaatatgagacgaggaaaagctatcgggtatttggaagatgagcaaggaactgtatggttgggcgagagaatctgcgtcccaaacaacaaagatttaaaagatgcaattctgaaagaagctcatgatactttatactccattcaccctggtagtaccaagatgtaccaagatctcaaggaaagatttttgtgggcaagtatgaagcgtgagatagcggaatatctagctgtgtgtgatgtttgtcagcgggtcaaggtagaacatcagaaatccgccggtttgttgcagcctttgaagataccagaatggaagtgggaggaaatcggtatggatttcatcactggtctacccagaacgtcatcaggccacgactctatttgggtgatagtcgacagacttaccaaagtggctcatttcatcccagtaaagacaacatattccggaagtcggttggcggaattgtatatggcaaggattgtgtgtttgcatggcgttcctaagaaaatagtgtctgatcgaggtagtcagtttacttcaaagttttggaagaagcttcaggaagagatgggttctaagctgaacttcagtactgcttatcatccgcagacagatggacaaaccgaaagggtaaattagattttggaagacatgttgagagcttgtgctttagacttcggtggaagttggaataagaatctgccttacgcggaattctcgtacaacaacagttatcaagctagtcttcaaatggctccttacgaagcactgtatggtcggaagtgccgcactccgcttttgtgggatcaaacgggagaacgtcgggttttcgggactgatatcctaagagaagcagaagagaaggtaaagatcattcaagaaagattgcgtgtggctcagtctcgtcaaaagagttatgccgacaatcgtcgcagagatttgagttttgaagaaggagatcatgtgtaccttcgtgtcacgcctctttgaggagttcatcgttttcgcaccaaaggaaaattggcaccgcgtttcgtgggaccttataaggttgtcagtcgaagaggtgaggttgcttatcagttggagttacctcaatcgttggcaggtgtccataatgtgttccatgtgtcacagttgaaaaagtgtttaagggtacccactgaggaagctaatcttgaacagatagaaatccaagaggatctggcatatgttgagaaaccaatccgtatcttggaatggaaacagatgagagaagaactaggaatagagttatccgtttttgcaaggttcaatggagtaatcactcagaggaagaatcaacttgggaacgagaagatgaattaaagtcagctcatccgcatttgttcgccagttcttccgaatctcgaggacgagattctgtt

SEQ ID NO: 15358 - DNA, 4779 bp, Oryza sativa
  Clone ID: TFbOSC401340j.C1.o25.fg
atggggaagttgaaggaatctgaagaattattggaaagatgccttgaagtcagaaaaaggattttgtctgaggaacattttcagatcacttaccaggtatttgagtttttcaccacaagctctgctttattggcaattaacacagactgggaggtagctgttactttggtacacttggcaaggctaaccatgctaaactttattagtgacaaggaggacagtgacctagcaagatccaaacttgtcagggcaaggctacttgtcaatgattcaatcagcagccccccggaggtgcgccatgtccgacgctcggtctcggcgttcggtcgcctcgagcactcggcgtcagcaggacgccgagctcgccgcagcagaagagcgcaggcgagcaacggctcagaccgctgcagcagcagcgagggcggccagactggcggcagcggagttggcagcagccagggcggaggcggaggcggaggcggaggcggcggaagatgcggcacgtgcggcggagggagcttgaggagctggcaagagaaagggcacgggagcgggcagagcggtgggcagcagcccacctccacggcggcggcggcggcccaagggaccgcgcgcccgccgacgggaacccagacgggcgcgggcgtgccggcggcagcccggagcccgcacgcggccatcgcaggcagcgcggctctctcccctgatcggcgccatggtcaccacgtcgtccagacggtggtcagggactttggtcccgtcggtgggtggcctaccctcaccaaaaccaactacatcgagtgggccgtggtgatgagggtgaggctacaggtgcggcacatgtgggaggcagtccggtacggcgacgtcgactacgacgaggatcggcgggcactggatgccctcatcgctacagtcccgcccgagatgcagttctcgctttcccagaagcggactgccaaggaggcctgggacgccatcgctgcggcacgcatcggcagggaccgcgcccgcaagtccacactgcaggcactccgcaaggagtgggagaacctggccttcaagccaggtgaggatgttgatgactttgctctccgtctcaacactctcttgcagaaaatggtgcagtacggcgacgacacttacgacgaggagagagctgtcgagaagctcttccgctacgtccctgagaagtacaggcagatcgctcgctcgatcgaatctctgctggacctctccacgatgtcgatcgaggaggcgttaggtcgcctcaaggtcgtcgatggtgatgagccacaacctctcttggggcccatcaccatcggcgggaagctccatctcactcgggagcagtgggaggcctctcagggtaacgggaggaagggggagtcatcttccccgacaggcggccgtaagccgcgcaaggcgcggggaggtgtccagctacggtgggcgcgaagacatgccgagggtggcgcccgcagaggcgcccagggcgttgccaccggcaaccacaagccggcacgagacgacgcctgccgcagctgtggcaagcttggccattgggccaaagactgtcgacagccacgacgcggccaggtccacgtcgcacgggtggaggaagagccggctctgctcctagctcatgcaaacattgagctacctccagcggcaccggccgcagcggctttcctccaccttgatgagccgaaggtactcgtctccctctgcaacggctccagcaacgacaaggctgatgggtggtacctcgacaccggctccacccatcacatgaccgaccgacgggagttcttcaccgagttcgactccagcgtccgaggctccgtcaagttcggggacgcctccggcgtcgagatcaagggtgttggctccgtcaccttcactgccaagtccggtgagcacaggctgctcaccggtgtctactacatccccgcgttgaggaattctatcatcagcgtggaacagctggatgagaacggctcacgcgtgttggtcgaggacggactcatgaggatttgggatcgctgtcgtcgccttcttgccaaggtaaccagaggcactaatcgactctacatcctcagcgcgcaagtcgcacaaccagtttgcctcgccgctcgtcgggacgacgaggcgtggcagtggcacgagcgcttcgggcacctccacttcgaggccctgaagcagctcagtgccaaggagatggtccgaggcatgccgtgccttgaccgcgtggagcagctctgcgacgtctgcgtggtgacgaagcagcggcggctcccctttccccagcagacgagctttcgagccaaggagcagctcgagctcgtgcacggggacttgtgtggcccagtgacaccggccacaccaggaggacgacgttacttcctgctgctcgtcgacgacctctcccgctacatgtgggtgatggtcctcggcagcaagggagaggctgcagacgccatcaggcatgcgcaggctgctgcagaggcggagtgcggccgcaagctgcgcgtgctgtgcaccgacaacggcggcgaattcacagcggctgaattcgcgtcgtactgcgctgatgagggcattcagcgccactataccacgccgtacagcccgcagcagaacggcgtcgtcgagcggcgcaaccagatggttgtggggatggctcgggccctcctcaagcagagggggatgccggccatcttctggggggaggcggtggtgacggccgcctacatcctcaaccgctcgcctaccaaggccctcgatggcaggacaccgtacgaggcttggcatgggcgcaagccggcggtctcccacctgcgggtcttcggctgcctcgcgttcgccaaggagcttggccacatcggcaagctcgacgacaggagcaccccaggggtgttcatcggctacgcggagggctcgaaggcttaccgcatcctcgacccggagacagcgtgtgcgcactgcgcgcgacgttgtgttcgacgaaggccgagggtgggtatgggacaaggcggtggacgatggttggacttcaccgtcgagtacgtccacttcgagggagctgggggactaggcagctcttcttcaccgagcgtgtctacccaagcccccgaatctccaccgactccgacaccaacacaccctcgggccacgacttcgactacgacgagctcttcgtcgacaccacctcagccagtgactccacatgctccagcaccaacagccactccaagcacgtctactccgacgccagctcgtgttgagcgcagcccggtggagttcgctactccgctctcccacgacggggagcgcatcgacgcgtaccacgacggcgagcagctacggtaccgtacgatggaggatcttctcggcgaccagccggtgccgggactggtgcctcgcgacctagaggcgcagttgcaccttgcgtgcgacgacggtgagcctcggtcttttgcagaggccgagaaacacgcggcatggcgtgccgcgatgcagtcggagatggacgcggttcaggagaaccgcacctgggagcttgctgacctccctcgtggtcaccgcgcgatcacccttaagtgggtgttcaagctgaagagggatgaagccggagccatcgtcaagcacaaggctcgcttggtggcacgcggtttcgtgcagcaggaggggatcgactacgacgatgcctgcgctcccgtggcatggatggagtccgtgcgactccttcttgcgctggttgctcatgaaggctggggcgtccatcacatggacgtcaagtcggtgtttctgaatgtcgacttgaaggaggaggtctacgtgcaccagccgccgggatttgtgattcccggcaaggagggcaaggtgctacgcttgcacaaggccctctacggcttgcggcaggcaccgagggcgtggaatgccaagttggattccacgctcaaggggatgggctacgagcaaagcctgcacgaggcggccatctaccggcggggcaatggaggaaatgccttgctggtgggtgtctacatcaacgacttggtgatcatcggcaccaaggatgcggaggttgcggcgttcaaggaggagatgaaggccaccttccaaatgagtgatctggggcctctctccttctacctggggatcgaagtgcaccaggacgactccgggatcacgcttcgacagaccgcctacgccaagcgcgtcgttgagctggctgggctcaccgattgcaacccagctctcactccgatggaggagagactgaagctgagccgcgacagcacggcggaggaggtggatgctacacagtaccggcgtcttgtggggagccttcgctacctcacccacacacggccggacttggccttctccgtcggctacgtggtggccctgtccagctgcgaggccgagtacatggcggcctccgccacttcgacccaggcgctctggcttgctcgactgcttagtgatctcctcggcagagacactggaacggtggagctcagggtggatagcaagtccgctctggccctggcaaagaaccccgtttttcacgaacggagcaagcacatccgggtgaggtaccacttcatccgaagctacttggaggaagggagcatcaaggcgagctacatcaacaccaaggaccagcttgcggacttgctcaccaagcctcttgggaggatcaagttcctcgagctctgctctaggatcgggatggcccaacttccccacaagacgacgcacaagacttag

SEQ ID NO: 15359 - DNA, 4872 bp, Oryza sativa
  Clone ID: TFbOSC418119j.C1.o2.fg
atgtgcagccgggatgattgttcagaatggttgggcctaagcaacaggatgccgcgctacaagcctgagtacttgtttggtgttgagcgatttgtccaggagttgcgtacgatgtcctttgccataggatttgggactgcccctttgtatgcccagattcctcatgatcgtgatgaagagaagtgccgagtcaaagtcaccttgaacagtaatagtgaagatatcccatcagtgatgttcgaagttggaggaggaaactacattcatgcatgtcaggaggtggcaaggatcgccataggagagctccgcgatcgctacagtgatcagttggccgacactgagtatcgctaccatcctcgccaaccccagggaggtgaccgtggcagctaccttgagactgaggggattgagaatgatgctaccacaaggcatttggttgagatactgtgggctatggatgagacccgcgcggaggttgtgctagcagctcaagatcgtgaagaccggaatcgtgataagatttgcaagctagaggacaatgtggattctatcagatgtaagtgggcccggcctgggggaggcgggacgttacatggatcgtttgggcccggcctgggggaggcgggacgttacatggatcgtttggagaaggaactagccgcattgaagggagaagcaccaccacaaaaggccagggttcgtcttaccgcaaggaagagagctctattcgtccctcgctaccaattggcgccaaaggttcgtgtggtggaaaaagaagctaccccaaccctagcggatcctccggtcgtcaacgtaagtgatgatgaaggagaagaatcgaagcgcacccactcaaaggtcgaatggggagctactcaagatgatggagacgagccgaacgagccttcaatcaactccgatgccggatctggtgattggctgcacgccatagagaagaagttggatttgcttcagtgcactgatcaggagaaggtctcatttgcatcacaccaactgcatggccccgcctctgagtggtgggatcacttctgccttaataggactactgctgaacctatcacttggcttgaattcaccgctgctttccggaagacgcatataccatcgggagtggtgtctctcaagaagaaggaattcaagtcgctcacccagggatctcgcacggtcaccgagtatctgcacgagttcaatcgtctggctcgttatgctccggaagatgtgcgcactgatgaagagcgccaggagaggttcttggaaggacttaatgatgagctttcttacccactcatgactggggattatcatgatttccagaagttagtggataaggctatttgccaggaggacaagtataaccgcatgaagcagaagaaacgccggattgctcacttcaaggcacaacaggggaatagtcagaagccgcgtcttcctttaggaccccagtccatgccacagggaggttctttgtctgttgttcgtccgcagcgtcagttcttcaacaacaatgctggcaacaacatccgcaatcaagctccactccctgttgcagctccaacacagcaacagcctgccaagaaggagcaaggcagcaagcctggagtgtgcttcaactgtggtgaaccaggccattactctgacaagtgtccgaagccccgacgcgtgaaggttgtccctgcccagagcaactctaccgcaccagcatcaaaggctcgtgtcaatcatgttgctgctgcaaaagctcaaggtgctccagatgtgattttgggtacgttccttgttaactcagttcctgcaacagtgcttttcgattttggtgctacacattcatttttatctatgagttttgcgggaaatcatgggatggaagtagaagatcttagatgtcctttgatggttagtaccccaagtaatcaagcactctctttgcaacgtagcccctcggtcagaatagaaattcaaggagtaccatttctggccaatcttattctgttagaatccaaagaccttgatgtcatcctagggatggactggttagccagatataaaggtgtgatagactgtgccaacagaaaagtaactctcaccagcaatgatggtcgagttgtaactgttcatgcattgtcttctgagtttttaaggtcaagtctgaaccaaatagctttggaagagattcccatagtacaggaatacccggacgtgttcccggacgatttacctgccaatgaattagcagaagtcaagaggcaagtagatgatttgcttcagaaaggatacattagaccaagttcgtctccatggggagctccagttatttttgtggaaaagaaagatcatacccagaggatgtgtgtggactatcgtgcactaaatgatgtgactatcaagaataagtacccgctgcccagaattgatgatttgtttgatcagcttaaaggtgccaccgttttctccaagatagatctccgatcagggtatcaccagttgagaatcaaagaggaagatatacataagacggcttttaccactagatatgggttgtttgaatgtactgttatgtcttttggacttaccaatgcccccgctttcttcatgaacttgatgaataaggtgtttatggaatacctagacaagttcgtggtggtctttattgatgacattctcatttattctcgaaccaaagaagagcatgaagaacatcttcgtcttgcactagagaagctgcgagaacatcaactgtatgccaagtttagcaagtgtgaattttggttgtctgaagtgaagttccttggtcacgtcatcttagccggaggagttgccgttgatcctagtaatgtggaatccgtaaccaactggaaacaaccaaagacagtttcagagattcgcagtttcctgggtcttgcaggttattaccggaggtttatagagaatttctccaagattgctaagcccatgacacggctgcttcagaaagatgtgaagtacaagtggtcagaagaatgtgagcagagttttcaagagttgaaaagtcgcttaatatcagcacccattttgattttgcctgatccaaagaagggtttccaagtgtattgcgatgcatctaagcttgggttaggttgtgttctgatgcaagatgggaaggtggttgcctatacatctcgtcagttacgtccgcatgagaagaactaccctactcatgatcttgagttagctgcagtggttcatgcgttgaagatttggcgtcattatcttttcggtactcgtacagaggtgtacaccgatcacaagagtttaaagtatatctttactcagccagatctgaacatgagacaacggagatggttggaattaattaaggattatgacatgggaattcattatcacccgggaaaggctaatgttgtagcagacgctcttagcaggaaaggctattgcaatgctacggaaggacgacagttgccattggagttatgcaaggaatttgaaatattaaatttgggaattgtcagtagaggtttcgttgcagccttagaagcaaagcccactctaatcgatcaggttagagaagcccaaattaatgatcctgatattcaagaaatcaagaagaatatgagaagaggaaaagctatcgggtatttggaagatgagcaaggaactgtatggttgggcgagagaatctgcgtcccagacaacaaagatttaaaagatgcaattctgaaagaagctcatgatactttatactccattcaccctggtagtaccaagatgtaccaagatctcaaggaaagattttggtgggcaagtatgaagcgtgagatagcggaatatgtagctgtgtgtgatgtttgtcagcgggtcaaggcagaacatcagaaacccgccggtttgttgcagcctttaaagataccagagtggaagtgggaggaaatcggtatggatttcatcactggtctacccagtacgtcatcaggccacgactctatttgggtgatagtcgacagacttaccaaagtggctcatttcatcccagtaaagacaacatattccggaagtcggttggcggaattgtatatggcaaggattgtgtatttgcatggcgttcctaagaaaatagtgtctgatcgagatgaacaaaccgaaagggtaaatcagattttggaagacatgttgagagcttgtgctttagacttcggtggaagttgggataagaatctatcttatgcggaattctcgtacaacaacagttatcaagctagtcttcagatggctccttacgaagcactgtatggtcggaagtgccgcactctgcttttgtgggatcaaacgggagaacgtcaggttttcgggactgatatcttaagggaagcagaagaaaaggtaaaaatcattcaagaaagattgcgtgtggctcagtctcgtcataagagttatgccgacaatcgccgcagagatttgagttttgaagaaggagatcatgtgtaccttcgtgtcacgcctcttcgaggggttcatcgttttcacaccaaaggaaaattggcaccgtgttttgtgggaccttataagattatcaatagaagaggagaggttgcttatcagttggagttacctcaatctctggcaggagtccataatgtgtttcacgtgtcacaattgaaaaagtgtttaagggtacctaccgaagaagctaatcttgaacagatagaagttcaagaggatctgacatatgttgagaagccaatccgtatcttggaaacaaacgagagaagaaccaggaatagagttatccgttttgcaaagtccaatggagtaatcactcggaagaagaatcaacttgggaacgagaagatgaattaa

SEQ ID NO: 15360 - DNA, 4527 bp, Oryza sativa
  Clone ID: TFbOSC8370j.C1.o11.fg
atgatgccgcgctgcaagcctgagtacttgtttggtgttgagggatttgtcaaggagttgcgtacgatgtcctttgccataggatttgggactgcccctttgtatgcccagattcctcgtgatcgtgatgaagagaagtgccgagtcaaagtcaccttgaacagtaatagtgaagatatactatccgtgatgttcgaagctggaggaggaaactacattcatgcatgtcaggaggtggcaaggatcgccataggagagctccgcgatcgctacagtgatcagttggccgacactgagtatcgctaccatcctcgccaaccccagggaagtgaccgtggcagctaccttgagactgaggggattgagaatgatgctaccacaaggcatctggtcgagatgctgtgggctatggataagacccgcgcggagattgtgttagcagctcaagatcgtgaagaccggaatcgtggaaagatttgcaaactagaagacaaggtggatcgtttggagaaggaactagccgcattgaagggagaagcaccaccgcagaaggccagggttcgtcttaccgccaggaagagagctttattcgtccctcgctaccaattggcgccaaaggttcgtgtggtagaaaaagaagctaccccaaccctagcggatcctccgatcgtcaacaacaagttagcagaatttcttcgtgcgaggccgcccactttctctagcaccactaatcctgttgaagctggtgattggctgcatgccatagagaagaagttggatttgcttcagtgcactgatcaggagaagaagacgcatataccatcgggagtggtgtctctcaagaagaaggaattcaggtcgctcacccagggatctcgcacggtcaccgagtatctgcacgagttcaatcgtctggctcgttatgctccggaagatgtgcgcactgatgaagagcgccaggagaggttcttggaaggacttaatgatgagctttcttacccactcatgactggggattatcatgattttcagaagttagtggataaggctattcgccaggaggacaagtacaaccgcatggagcagaagaaatgccggattgctcacttcaaggcacaacaggggaatagtcagaggccgcgtcttactttaggaccacagtccatgccacggggaggttcttcgtctgttgttcgtccgcagcgtcagttcttcaacaacaatgctggcaacaacatccgcaatcaagctccacaccctgttgcagctccaacacagcaacagcctgccaagagggagcaaggcatcaagcccggggtgtgcttcaactgtggtgaaccaggccattactctgacaagtgtccgaagcctcgacgcgtgaaggttgtccctgcccagagcaactctaccgcaccagcatcaaaggctcgtgtcaatcatgttgctgctgcagaagctcaaggtgctccagatgtgattttgggtacgttccttgttaactcagttcctgcaacagtgcttttcgattctggtgctacacattcatttttatctatgagttttgcgggaaatcatgggatggaagtagaagatcttagacgtcctttgatggttagtaccccgagtaatcaagcactctctttgcaacgtagcccctctgtcagaatagaaattcaaggagtaccatttctggccaatcttatcctgttagaatccaaagaccttgatgtcatcctagggatggactggttagccagatataaaggtgtgatagactgtgccaacagaaaagtaactctcaccaacaatgatggtcgagttgtaactgttcatgcattgtcttcggagtctttaaggtcaagtctgaaccaaatagctttggaagagattcgcatagtacaggaatacccggacgtgttcccggacgatttacctggtatgccgcctaaaagagatattgaattcagaatagatctggtaccaggaacaactccgatccataagagaccctatagaatggcagtcaatgaattagcagaagtcaagaggcaagtagatgatttgcttcagaaaggatacatcagaccaagttcgtctctatggggagctccagttatttttgtggaaaagaaagatcatacccagaggatgtgtgtggactatcgtgcactaaatgatgtgactatcaagaataagtacccgctgcccagaattgatgatttgtttgatcagcttaaaggtgccaccgttttctccaagatagatcttcgatcagggtatcaccagttgagaatcaaagaagaagatatacctaagacggcttttaccactaggtatggattgttcgaatgtactgttatgtcttttggacttaccaatgcccccactttcttcatgaacttgatgaataaggtgtttatggaatacctagacaagttcgtggtggtctttattgatgacattcttatctactctcgaacaaaagaagagcatgaagaacatcttcgtcttgcactagagaagctacgagaacatcaattgtatgtcaagtttagcaagtgtgaattttggttgtctgaagtgaagttccttggtcacgtcatctcagccggaggagttactgttgatcctagtaacgtggaatccgtaaccaactggaaacaaccaaagacagtttcagagattcacagtttcctaggtctcgcaggatattatcggaggtttatagagaatttttccaagattgctaagcccataacacgattacttcaaaaggatgtaaagtacaagtggtcagaagaatgtgagcagagttttcaagagttgaagaatcgcttaatatcagctcctattttgattttacctgatccaaagaagggtttccaagtgtattgcgatgcatccaaacttgggttaggttgtgttctgatgcaagatggcaaggtgattgcctatgcatctcgtcagttacgtccacatgagaagaactaccctactcatgatcttgagttagctgcagtggttcatgcattgaagatttggcgtcattatcttttcggtactcgtacagaggattatgacatgggaattcattatcacctgggaaaggttaatgttgtagcagatgcccttagcaggaaaggctattgcaatgctacggaaggacgacagttgccattggagttatgcaaggaatttgaaagattaaatttgggaattgtcagtagagatttcgttgcagccttacaagcaaagcccactctaattgatcaaattagagaagctcaaattaacgacccggatattcaagaaattaagaagaatatgagaagaggaaaagctatcggtttcttggaagatgagcaaggaactcgagtcaaggcagaacatcagaaacccaccgggttgttgcagcctttgaggataccagaatggaagtgggaggaaatcggtatggatttcatcactggtctacccagaacggcatcaggccatgactctatttgggtgatagtcgacagacttaccaaagtagctcatttcatcctagtaaagacaacatattccggaagtcggttggcggaattgtatatggcaaggattgtgtgtttgcatggcgtccctaagaaaatagtgtctgatcgaggtagtcagtttacttcaaagttttggaagaagcttcaggaagagatgggttctaagctgaactttagtactgcttatcatccgcagacagacggacaaaccgaaagggtaaatcagattttggaagacatgttgagagcttgtgctttagacttcggtggaagttgggataagaatttgccttacgccgaattctcgtacaacaacagttatcaagctagtctccaaatggctccttatgaagcactgtatggtcggaagtgccgcactccgcttttgtgggatcaaatgggagaacgtcaggttttcgggacggatatcctgagggaagcagaagaaaaggtgaaaatcattcaagaaagattgcgtgtggcccagtctcgtcataagagttatgccgacaatcgtcgtagagatataagttttgaagaaggagatcatgtgtaccttcgtgtcacgcctcttcgaggagttcatcgtttccacaccaaaggaaaattggcaccgcgtttcgtgggaccttacaagattgtcagtagaagaggagaggtcgcttgtcagttggagttacctcaatctttggcaggagtccataatgtgttctatgtatcgcaattgaaaaagtgtttaagggtacctaccgaagaagctaatcttgaacagatagaagtccaagaggatctgacctatgttgagaaaccaatccgtatcttggaaatagatgagagaagaaccagaaatcgagttatccgtttttgcaaagtccaatggagtaatcactcggaagaagaatcaacttgggaacgagaagatgaattaaagtcagctcatccgcatctgttcgccagttcttccgaatctcgaggacgagattctgtttaa

SEQ ID NO: 15361 - DNA, 2463 bp, Oryza sativa
  Clone ID: TFbOSC8370j.C1.o11.np
atgtcgtcctccgccagtccgtccgtggcgccatcggccgaatacgtagagcacttgtccaatctggtcgtgatccttgtcacatgagcaccactattttcttggtccgatcggcaatcttgatcccactgagttcatcatcgccaaaaccaataggatcccttttagattggccaatccaaatctaggccactgaaagaataccctcaaatcttggccttctcttgagaaaacttctcctgagaaaagttgtgctgtgtggtataagcgcgtatcggctagcaagcaggtccattgggatgaaccaggaatcggccaagcgcttgctcttactttggcaaattcggctaaggatgaacccctgatggcctctgccgcttatttttggtccaataccctcaatgcttttctgttaaaccaagggccgatgaccccaactctgatcgacatcactatgattaccggattagatgtaatttcatcggctaaccccatgagcttgaacaacaagaaccagtttgactttaggaccaaaagcatagggggctggtctggctatgtagcaacatacatgggcaagggatctgtcacccctcgagaacacactacctttctcatgatgtggctcgagaagtttctcttttatggatcgagctatggtccgactaccaactggcaattcttagccgaagcccttgaaactaagaggcaacttcctttgggcaaaatcctcctcgactatctgtatcagatgttgagtaatgcatcggccaagatagccaccggttcagtagtgggtgcgggttgtgaattggccacccctgacagaagctgaattcccgaggctggaacccactacagtttctatgaaggcttccagagagatgcttgagtttggttcccttatgaggactcagtgaattttgatcacccggcagacttcaggtttgaggatatcaactctgaaaagtataaaaaatccacagaagtcttctcggctgccattagtccatgcattcttcctattggcatccaccaagggagaaatatacacgtgtcctatgagttctatcatccgatgagctcagctaggcaatttggaatgggacagatgccaattagcttattctttgccgataaaatccaatgcagaggggagatctcatccacactaatgatggatcggctgctcaatatcccaggaccctctctgggtagcattgataacatagagttggcaaggtttaggagcagaaactttgacagatggtggggtgaatggaagcaacatatattccattagccggcctctacgtacatgacagttctgtttcctgatgttgtccctcagacaacataatctccccctcctcgcaagagtaacagtggaagggacatagaatatgctctaggacttttaccaaatggaggcaggaagagaaagaccaaggcaccggcagttgatccatcagctctggttcacaaaaagaaagccaagaagcataaacccaagctagccgacgacttgcctgccttagatccatccatcgagcaagctctggatgaagaagaaattgaggaagacgtcgatcaagcggcagccgaactgagcgatgaaggagaaaaaacaccattagcttcacccaagcaaactcctccaactcctgctgccccgactcacttctcaaggaaaaagaagactgctgtgaggaagaaatcgacagcaacaacacttaaaccagctccaccacaaatgtcaattgaccgtaccccatcggctacaggaagtcatcatgttgaagaagaggaacaaccagccgctcctgccatcctaaccttagccgatctattctcctttgacatcaaagattactttgataaagaagtagaagaagaatccacaagcaaggctctagcccctctggatgaaaatgtcaagaaaacactcgaagatatatcccttcggctagagtcatcattagacaacttggtggccgactgcggttccatccgggcacggtttgctgaaatccaagccttaatcccggatgatctggcaaataccattactccagctgtgtcactcgagcaacatcaattcaagctggagaaggctaagcaacggattgccgatcagcaggtgcgaaaagatattgaagccactatccaagccaatcggcaactttcgaacatagatcggcttgaagcccacaagattgatcttatagctcaacttgaagaatgcaatgccgaattagatcatgaaaagcaaaagctagccaatcttccaagtgctgttgaagaacagagtctagattgagatcggctatcaaaaatgtggctgacatgaccaagtccctcaaagtcatctctggaaccgacgcccaagacatccaagccatcgaagaagtagatcaaattagacaacgggctgtgttggctatccagcgttacttgtctgga

SEQ ID NO: 15362 - DNA, 4191 bp, Oryza sativa
  Clone ID: TFbOSC900207j.C1.o2.fg
atggtgcactgctttgaattgtgttatgcggagggtattgtcacaatctctattcggtggtacacctctggccagagtaaaactattcgaatagccgtgcccgcgtatttattgaatgccatttatacaaatgagactatattatgccatcctttgttatcccctgcacttgcatatttgctgcatggcttgttgagtatgtcatatactctccttgcaatcattcatcagaggaggagttctaaagtgatgctgaagatgccgcgcttcaagcctgagtacttgttcggtattgagggatttgtccaagagctgcgtgcgatgtcctttaccataggattcgggactgcccctttgtatgcccagattccacatgatcgtgatgaagagaagtgccgtgtcaaggtcaccttgaacagtgatcgtgaagatatcccatcggtgatgttcaaggctggagggggaagctatccacatgcttgtcaggaggtggcaaggatcgccataggagagctccgcggccgttacaatgatctgttggccgacactgagtatcgctaccatcctcgtcagccacagggaagtgaccgtgcgagctatgttgatcctgaaggaattgagaatgatgctaccacaagacatttggtcgagatgctgtgggccatggatgagtcccgcgttgaaatcgtgtcagctgctcaagctcgtgaagaccggaaccgtggtaagatctgcaagctagagggcaaggttgatcgtctggagaaggaattggccgaattgaagggagaagcgccaccacagaaggccagggttcgtcttaccgctaggaagagagctctttttgttccccgctaccagttggcgcccaaggttcatgtggtgtcaagagaagctgtcccagtggatcctcctgtcgttaatttaagcgatgatgaggaagaagattcaaagcgcacccattcaaagaaccaacagaaccaggggaacaatcatgctcctcctcagaacaagtttgcagaatttcttcgcgtgaggccacctactttttctagcactaccaatctggttgaggccggtgattggctgcacaccatagaaaagaagttggacctgcttcagtgcactgaccaagaaaaagtctcctttgcttcacatcagcttcatggccctgcctttgagtggtgggatcatttccgtctcaacagggctactgctgaaccaatcacttggcttgagttcactgctgctttcaggaagactcatgtaccatcgagagtggtgtctctcaagaagaaggagttcagggcgctcactcagggatcccgttctgtcaccgagtacatgcatgaattcaatcgtctggcccgttatgctccgaaggatgtgcgtacaaatgaagagcatcaagagaagttcttggaagggttgaatgatgagctttcttacccgctgatgactggagattattctgatttccaggagttgcgtcagttctacaacaacaataacaaccgcaaccaagctccacgtcctgttgcaactccagtccagcaccagcctgtcaagagggagcaagaaaacaagccaggggtgtgcttcaactgtggtgaaccaggtcattattctgacaagtgtccgaagcctcgacgtgtgaagaccattcctgtgcagaataactccaatgcaccaacgtcaaaggctcatgtcaatcatgttgctgttgcagaagcccaaggtgctacagatgtgattttggagattcaaggtgttccatttccggccaaccttattctgttagaatccaaagaccttgatgtcatcctagggacggactggttagacagatataaacgtgtgattgactatgccaatagaaaagtaactctcaccagcaatgatggtcaagttgtaactgttcatgcattgccttctgaacctttaaggtcaagtctgaaccaaataactttggaagagattcccatagtacgggactacccggatgtgttcccggatgacttacctgcaaaggtcaagagacaagtagatgatttgcttcagaaaggatacattcgaccaagttcatctccatggggagctccagtcatttttgtggagaaaaaagatcatacccagaggatgtgtgtggattatcgtgcactaaatgatgtgaccatcaagaacaagtaccctctgcctagaattgatgatttgtttgatcaacttaaaggtgccaccgttttctccaagattgatcttcgatcagggtatcaccagttgaggattaaagacgaagatatacctaagacgtcttttaccactcggtatgggttatttgaatgtactgtcatgtctttcggacttactaatgcccctgctttcttcatgaacctgatgaataaggtgtttatggagtacctggacaagttcatggtggtctttattgatgacattcttatttactcccaaaccaaagaagagcatgaagaacatcttcgccttgcactagagaagctacgagaacatcaactgtatgtcaagtttagcaaatgcgaattttggttgtctgcagtaaagtttcttgggcacgtcatctcagccggaggagttgccgtcgaccctagctattaccggaggttcatagagaatttttccaagattgcaaagcccatgacacgcctgcttcagaaagacgtgaagtacaagtggtcagaagaatgtgagcagagttttcaagagctgaagagtcgcttaatatcagcgcccattctgattttgccagatccaaagaagggtttccaagtgtattgcgatgcatctaagcttgggttaggttgtgttctaatgcaagatgggaatgtggttgcctatgcatctcatcagttacgtccccatgagaagaattatcctacccatgatcttgagttagccgcagtgattcatgcattgaagatttggcgtcactatctctttggtactcgtacggaggtgtacacagatcacaagagtttgaagtatatcttcatccagccagatctgaacatgagacagcggagatggttggaattaattaaggattatgacatgggaattcattatcaccctggaaaggctaatgatgtagcagatgttctcagtaggaaaggctattgcaatgctacggaaggacgacagttgccgtgggagttatgcaaggaatttgaaaggctgaatttgggaattgtcagtagaggttttgttgtagctttagaagcgaagcccactctcatcgatcaggttagagaagctcaaatcaatgatcttaatatccaagagattaagaagaatatgagaagaggaaaggctatcggttatttggaagatgagcaaggaactgtatggttgggtgagagaatttgtgtcccagacaacaaggagttgaaagatacaatcttgaaggaagcccatgacactttatactccattcaccctggtagtaccaagatgtaccaagatctcaaggagaaattttggtgggcaagtatgaagcatgagatagcagagtatgtagctgtgtgtgatgtatgtcaacgagtcaaggcagaacatcagaaacccgcaggagaacgtcaggtttttgggactgatattctgagggaagcagaagagaaagtaaagatcattcaagaaagattgcgtatagcccagtctcgtcataagagctatgctgacaatcgccgcagggatttaagttttgaggaaggagatcatctgtaccttcgtgtcatgcctcttcggggagctcatcgttttcgcaccaaagggaaattggcaccgtgttttgtgggaccatataagattatcagtagaagaggtgaggtcgcctatcagttggagttacctcaatccttggcaggtgttcataatgtgttccatgtgtcacagctaaaaaagtgtttgagggtacccactgaagaagctaatcctgagcagatagaaattcaggaggatctgacttatgttgagaaaccaatccgtatcttggagacagatgagaaaagaaccaggaatcgagttatccgtttctgtaaggtccaatggagtaatcactcagaagaagaagctacctgggaacgagaagatgaattaaagtcagctcatccgcatcttttcgtcatctcttccgaatctcgaggacaagattctgtttaa

SEQ ID NO: 15363 - DNA, 4515 bp, Oryza sativa
  Clone ID: TFbOSC900380j.C1.o12.fg
atgccgcgctacaagcctgagtacttgtttggtactgagggatttgtccaggagttgcgtacgatgtccttcgccataggatttgggactgctcctttgtatgcccagattcctcatgatcgtgatgaagagaagtgctgtatcaaagtcaccttgaacagtaatcgtgaagatatcccatcggtgatgttcgaggctggagggggaagctacattcatgcttgtcaggaggtggcaaggatcaccataggagagctccgagaaagctacaatgatcagttggccgacactgagtatcgctaccatcctcgtcaaccccagggaaacgaccgtggtagctatcttgaacctgcagggattgagaatgatgctaccaccagacatttggttgagatgctgtgggccatggatgagacccgcgttgagattgtgttagcagctcaagatcgcgaagaccggaatcgtggtaagatttgcaagctggaggacaaggtggatcgtttggagaaggaactagccgcgttgaagggagaagcaccaccacaaaaggccagggttcgtcttaccgcaaggaagggagctctttttgtccctcgctaccagttggcgcctaaggttcgtgtggtggaaaaagaagctgccccagccccagcggatcctccggttgtcaactgcactgatcaagagaaagtctcctttgcttcacatcaccttcatggccctgcctctgagtggtgggatcacttccgtttcaacaggactactgctgaaccaatcacttggcttgagttcaccgctgctttccggaaaacgcacataccctcaggagttgtgtctctcaagaaggagttcagggtgctcactcagggatctcgctttgtcactaaatacttggatgagttcaatcgtctgcctcgctatactccggaagatgtgtgcaccgatgaagagcgccaagagaaattcttggaaggactgaatgatgagctttcttacccactaatgactggggattatcatgatttccagaagttggtggataaggctattcgccaggaggacaagtacaaccgtatggagaagaagaaacaccggattgctcacttcaaagctcagcaggggaatagtcagaggccgcgtcttgctatgggacctcaggcagtgtcacaaggagggtcttcgtctgttgttcgtccgcagcgtcagttattcaacaacaatgctagcaacaacaatcgcagccaagctccacgtcctgttgcaactccaactcagcatcagcctgccaagagggagcaagggaacaagccaggagtgtgctttaattgtggtgaaccaggacattactctgacaagtgtccgaagccccgccgcgtgaagattgtccctgcccagaacaactcctccgcaccagcgtcaaaggctcatgtcaatcatgtggctgctgcagaagctcaaagtgctccagatgtgattttgggtacgttccctgttaactcagttcctgcaacagtgcttttcgattctggtgctacacattcctttttatctatgagttttgcgggaaatcatgggatggaggtagaagatcttagacgtcctttgatggttagtaccccgagtaaccaagcactctcatcgcaacgtagcccctccgtcagaatagagattcagggtgtaccatttctggccaaccttattctgttagaatccaaagaccttgatgtcatcctagggatggactggttagccaaatataatggtgtgatagactgtaccaatagaaaagtaactctcaccagcaatgacggtcaagttgtaactgttcattcattgccttacgggcctttaaggtcaagtctgaaccaaataactttggaagagattcccatagtacgggagtacccagatgtgttcctggatgatttacctggtatgccgcccaagagagatatagaattcagaatagatctggtaccaggaacaactccaatccataagagaccttatagaatggcagccaacgaattagcagaggtcaagaggcaagtagatgatttgcttcagaaaggatacatcagaccaagctcgtctccatggggagctccggtcatttttgtggaaaagaaagatcatacccagaggatgtgtgtggactatcgtgcactaaatgatgtgactatcaagaataagtaccctctgcctagaattgatgacttgtttgatcagcttaaagatgccaccgttttctccaagatcgatcttcgatcaaggtatcaccagttgaggatcaaagaggaagatatacctaagacggcttttaccactcggtatgggttgtttgaatgtactgttatgtctgttggacttaccaatgcccccgctttcttcatgaacttgatgaataaggtgtttatggaatacctagacaagttcgtggtagtctttattgatgacattcttatctactcccgaaccaaagaagagcatgaagaacatcttcgccttgcattggagaagctacgagagcatcaattgtatgccaagtttagcaaatgtgaattttggttgtccgaagtaaagtttcttggtcacgtcatctcagccggaggagttgccattgatcctagtaatgtggaatccgtaaccaactggaaacaaccaaagacagtctcagagattcgtagtttcctgggtcttgcaggctattaccggaggtttatagagaatttctccaagattcctaagcccatgacacgactgcttcagaaagacgtaaagtacaagtggtcagaagaatgtgagcagagttttcaagagctgaaaagtcgcttaatatcagcacccattttgattttgcctgatcctaagaagggtttccaagtgtactgcgacgcatctaagcttgggttaggttgtgttctgatgcaagatgggaaggtggtttcctatgcatcttgtcagttacgtccgcatgagaactaccctactcatgatcttgagttagctgcagtggttcatgcgttgaagatttggcgtcattatcttttcggtactcgtacagaggtgtacacggatcacaagagtttgaagtatatctttacccagccgaatctgaacatgagacaacggagatggttggaattgattaaggattatgacatgggaattcataatcaccacggaaaggctaatgttgtagcagatgctctcagcaggaaaggctattgcaatgctacggaaggacaacagttgccatgggaattatgcaaggaatttgaaagactgaatttgggaattgtcagtagaggttttgttgcaactttagaagcgaagcccactctcattgaccaggttagagaagctcaaatcaatgatcctgatattcaagagatcaagaagaatatgagaagaggaaaggctatcgggtatttggaagatgagcaaggaaccgtatggttgggtgagagaatctgtgtcccagagaacaaggagttgaaagatgcaattctgaaggaagctcacgacactttatactccatttaccctggtagtaccaagatgtaccaagatctcaaggaaaaattttggtgggcaagtatgaagtatgaacgagtcaaggcagaacatcagaaacccgcaggtttgttgcagcctttgaagataccagaatggaagtgggaggaaatcggtatggatttcatcactggtctacccagaacgtcatcgggccatgactctatttgggtgatagtcgacagacttaccaaagtggctcatttcatcccggtgaggacaacatatttcggaagccgtttggcagaattgtatatggcaaggattgtgtgtttgcatggcgttcctaagaaaatagtatccgatcgaggtagccagtttacttcaaagttttggaagaagcttcaggaagagatgggttccaagttgaacttcagtaccgcttatcatccgcagatagacggacaaaccgaaagggtaaatcagattttggaagacatgttaagagcttgtgctttagacttcggtggaagttgggataagaatctgccttacgcggaattctcgtacaacaacagttatcaagctagtcttcaaatggctccttatgaagcgttgtatggtcggaagtgccgcactccgcttttgtgggatcaaacgggagaacgtcaagttttcgggactgatattctgagggaagcagaagagaaggtaaagatcattcaagaaagattgcgtatagctcagtctcgtcataagagttatgccgacaatcgccgcagtgatttaagttttgaggaaggagatcatgtgtaccttcgtgtcacgcctctccgaggggttcatcgtttccacaccaaaggaaaattggcaccacgtttcgtgggaccttataagattgtcagtcaaagaggtgaggttgcttatcagttggagttacctcaatccttggcaggtgttcataatgtgatccatgtgtcaaagttgaaaaagtgttaa

SEQ ID NO: 15364 - DNA, 3249 bp, Oryza sativa
  Clone ID: TFbOSC401728j.C1.o15.fg
atgtctggagttgccgccgctgctggaggagatggcggaggtggtgcgccgccaacaggagccggagctagtgcgccaggaggaggtgccgtgaacgacaacaacaacggaggcaattctgcctcaccatccagcggagggccattctcgggcgctattcctgttccattattagcgctatcgctatactatgtgcgctatgttcttgttcctgttcttcatgatgcctctatgcgttactgttatgttcctgttcctgacattcatgatgcgcatagtatgctactggttatgttaagatcgccctacactgcttatgccatgattattgctttaacattttggattaaaatatgccgattaatgactatatttccaacaatccaaaaacttgataggtcattttcggtagttggctttgctgctgcactgaaaccacatgcttttgatggttcaaactataaaagatggaaagcacgtgcactattgtggttgacagcgatgcagtgcttctatgtttcacggggcaaacgaagtgaaccacctctttctcctgaggaagaggctaagttcgaggcttcagattgcctgttccgtggaacattgatcagtgtactcgctgacaacatagtggacgtatacatgcacatgccttctgggaaggacatgtgggatgctcttgaggccaagttcggagtttctgacgccgacagtgagctatatgtcatggagcagttctatgactacaagatggtcgatgaccgttctgtagtagaacaagctcatgagattcagatgctggttaaggaacttgagaacaacaactgtgagttgccggacaagtttgtggcgggtggcattattgccaaactaccaccttcttggtcggactttgccacttctctaaagcacaagagacaagagttcagtgtttctgatctcattggctctttgggtgttgaggagaaggcgagggcaaaggacgtccggggcaaaaaggttgagggaggttctagtgccaatatggtacagaagaagaaccctcatgcatcccacgataacaagaaagttaagcctgatgtcaaatccaaggctacaaccaattttaagaagaaagacaagggaaaggcaaaggtagactgctttgtgtgtgacaagtctgggcattgggccaaggactgtcctgagcgcaaagacagaaagtctgccaacatggtcattagcgagggcggaggaacatcggggtacggtaaaatattatctacagttctctctgtttttcattcacctgattggtgggtggacactggtgctaatattcatgtcgggagaggttcctccttgttgatgggaaacgggtcgcttgcggctgttcatggtgttggttccaagtgccatacttgcgttcaatcgaaacaacctcgcaagcctcacaaggcatctgaggcgaggaatttggcacctctagaacttgttcattccgatttgtgcgaaatgaacggcgtgttgactaaagggggaaagaaatatttcatgacactgatagataattgcactagattttgctatgtgtatctattgaaaacaaaggatgaggcattgtattactttaaaatctataaagctgaggaagtaacaccattcgaggaatgggaaaggaagaaattaaatctctcatacctacaaacatggggctgtttggccaaggtaaatgtacctatagccaaaaagtggaaatttggaccaaatactgttgattgtgtgttccttggttatgctatccacagtgtggtttatagattcttaatagtaaactctggagtacctgacatgcatgttggtacaattcttgagtccagaggtgctacattctttgagaatgaatttcctatgaaacatacacctagcacttctagtaaagaaactgtcatgccccatgagcacttggcaccgatagaacacaatgatcaaacgcctaaggaaaatcctgaggaggacaacattgtagatactcgcaagagtaagagacaaagggttgcaaaatcctttggagatgactacattgtatacctcgtggatgacaccccaagaaccatagaagagacatattcatctcctgacgctgactactggaaggaagcagtacgcagtgaaatggactcgattatgtctaatggtacttgggaagtcgttgagcgtccatatgggtgcaagcccgtaggatgcaaatgggttttcaagaaaaagcttaggcctgatggtacaatcgaaaagtacaaggcaaggcttgtggccaagtgttatacccaaaaggaaggcgaggacttcttcgacacatactcaccagttgctcgcttgaccacgattcgagtactacttgctctggcagcctctcttggtcttctcgtccatcagatggacgttaagacagctttcctaaacggagagctagaggaggagatctatatggatcaaccagacgggtatgtactagaaggtcaggagggaatggtgtgtaaactattgaaatccttgtatggcctcaagcaagcacctaagcaatggcatgagaagtttgacaccacgcttacatctgcaggctttgttgtgaacgaagctgacaaatgtgtatactatcgctatggtgggggagaaggggtgatcttatgcttatatgtcgatgacatattgatctttgggaccagccttaatgtgattgaggaggtcaaagactatctgtccaagagttttgaaatgaaggatttgggagaggctgatgttattcttaacatcaaactacaaagaggagatgagggtgggattacacttgtgcaatcccactatgtggacaaggttttgagtcgctttggatatagtgactgcaagccagctcctactccttatgatcccagcgtgctattaaggaaaaaccgaagaatagcaagggatcaactgagatactctcaaatcattggttcattgatgtacttggctagcgcaacgaggcctaacatctcatttgctgtaagcaagctgagccggtttgtctcaaatccgggagatgatcattggcaggctctagaaagagtaatgcgctatctaaagggcactatgagctatggaattcactataccgggtatccaaaagtactagaagggtatagtgactcaaactggatatctgatgctgatgagataaaagccacaagtggatatgtgttcacacttggaggtggcgctgtttcctag

SEQ ID NO: 15365 - DNA, 1917 bp, Oryza sativa
  Clone ID: TFbOSC401847j.C1.o19.fg
atgtcgacaaccggcgacaacaacaacactagagacaaggaggagcctcccgtcaacaccaacggaggcaatactgtctcaaactccagcggagggccattttcggggtataacgtttcactcttaccgttcgttcttcgtttcctacaactgtcggtcgcaatattattgcgttctcttgtctatgttgatgcttattctatattaagcacactcaagttgtatacatctagcactgtcactagatctactcatattgcaaatgtcatgtttattgtcttaatattttggattaaaatatgtcgaattatgaccaaatttccaacaatccaaaaacttgatagtgtgcacgccgacagtattgtggacgtttatatgcacatgccttcagggaaggacatgtgggattctcttgaggccaagttcggggtttccgacgccgacagcgagctgtatgtcatggagcagttctatgactacaacatggtcgatgaccgttctgtagtggaacatgctcatgaaattcagatgctggcaaaggaacttgagaacaacaactgcgagttgccggacaagtttgtggcgggtggcattattgccaaattgccaccttcttggtcagactttggtacttctctaaaacacaagaggcaagagttcagcgttactgatctcattggctctttgggtgttgaggagaagacgagggcaaaggacaaccgggacaaaaagatcgagggaggttctagcgctaatttggtacagaagaagaaccctcacgcatcccacaacaagaacaagaaagtcaaacctgacgtcaaacccaaggctacaatcaattttaagaataaagacaagggaaaggcaaaaggagattgctttgtgtgtggcaagcctaggcattgggccaaggactgtcctgagtgcatggacaagaagtctgcaaacatggttattagtgagggcggaggaacatcggggtatggtcgggagaggttcctccttgttgatgggaaacggatcgtttgcggttgttcatggtgtagattctgctatgtgtacctattgaaaacaaaggacgaagcattacattactttaagatctataaggctgaggtagaaaaccaactagaaaggaaaatcaaacggttgaggtctggtaggggtggagagtatttttccaatgagtttacttctttatgcgaagagtatggaattattcatgagaggacgcctccctattcaccccagtcaaacggggtagccgaaaagaagaaccgcactctaactgaaatggtgaatgccatgttagacactgcaagactttccaaggaatggtggggtgaggcaatattgactgcgtgtcatgtcctgaatagaattcctactatgcataaagaactaacaccattcgaggaatgggaaaggaagaaattaaatctccctcacctgcgcacatggggctgtttggccaaggtaaatgtatctatagccaaaaagcgtaaacttggaccaaagaccgtagattgtgtgttccttggttatgctatccatagtgtgggatataggttcttaacagtaaattctggagtacccgacatgcgtgttggtataattactgagtccagagatgccacattttttgagaatgaatttcctatgaaaaatgcacctagcacttctagtcaagaacctattttatcccctgagcactttgtgccgatagaacacattgatcaaatgcttgaggaaaattctgaggaggataacattgtagcaactcaaaagagtaagagacaaaggactgcaaagtcttttggagatgactacgttgtatatcttgtggatgatactccaagaaccattgaagaggcatattcatctcctgacactgactattggaaggaagcggtatga

SEQ ID NO: 15366 - DNA, 395 bp, Oryza sativa
  Clone ID: TFbOSC423289j.C1.o1.gm
cacaagagacaagagttcagtgtttctgatctcattggctctttgggtgttgaggagaaggcgagggcaaaggacgtccggggcaaaaaggttgagggaggttctagtgccaatatggtacagaagaagaaccctcatgcatcccacgataacaagaaagttaagcctgatgtcaaatccaaggctacaaccaattttaagaagaaagacaagggaaaggcaaaggtagactgctttgtgtgtgacaagtctgggcattgggccaaggactgtcctgagcgcaaagacagaaagtctgccaacatggtcattagcgagggcggaggaacatcggggtacggtcgggagaggttcctccttgttgatgggaaacgggtcgcttgcggctgttcatg

SEQ ID NO: 15367 - DNA, 2256 bp, Oryza sativa
  Clone ID: TFbOSC12493j.C1.o1.fg
atgtctggagttgctggcggaggtggtgcgccgccgccgacaggagctggatccggagctggtgcgccgccgccgacaggagctggatccggagctggtgcgccaggaggaggtgccgtgaacgactacaacaacggaggcaattctgcctcaccatccagcggagggccattctcggggtataatcttctcctcctactactgttgttagcgctatactgtgtgagctatgttcttgttcctgttctacatgatgcctctagcatgttatcgcattactggtatgttcctgtttctgacattcatgatgcgcatagtatgctactggttatgttaagatcaccctacactgcttatgccatgatcattgtttcaatttcttggattaaaatatgccgaataatgactatatttccaacaatccaaaaacctgataggtcattttcggtagttggctttgctgctgcactgaaaccacatgcttttgatggttcaaactataagagatggaaagcacgtgcactattatggttgacagcgatgcagtgcttctatgtttcacggggcaaacgaagtgaaccacctctctctcctgaggaagaggctaagttcgaggcttcggattgcctgttccgtggagcattgatcagtgtactcgctgacaacatagtggacgtgtacatgcacatgccttctgggaaggacatgtgggatgcacttgaggctaagttcggagtttctgacgctggcagtgagctgtatgtcatggagcagttctatgactataagatggtcgatgaccgttctgtagtagaacaagctcatgagattcagatgctggctaaggaacttgagaacaacaactgtgagttgccagacaagtttgtggcgggtggcattattgccaaactgccaccttcttggtcggactttgccacttctctaaagcacaagagacaagagttcagtgttcctgatctcattggctctttgggtgttgaggagaaggcgagggcaaaggacgtgcggggcaaaaaggttgagggaggttctagtgccaatatggtacagaagaagaaccctcatgcatcccacaacaacaagaaagtcaagcctgatgtcaaacccaaagctgcaaccaattttaagaagaaaggcaagggaaaggcaaaaggagactgctttgtgtgtggcaagtctgggcattgggccaaggactgtcctgagcgcaaagacaggaagtctgccaacatgatcattagcgagggcggaggaacatcggggtacggtaaaatattacctacagttctctctgtttttcattcacctgattggtgggtggatactggtgctaatattcatgtcgggagaggttcctccttgttgatgggaaacgggtcgcttgcggctgttcatggtgttggtacggtcgatctgaagtttacttcgggaaagaccgtgcagctgaagaacgtgcagcatgtcccttcaataaagaagaatctagttagcggctctctattgtgtagagaaggttttagacttgtgtttgagtccaataaatgtgtcgtatctaaatatgggacttttgttggaaaaggttatgacagcggaggcttgttccgcttttctttgaatgacatgtgtaataatcataatgctgtgaaccatattagcgagaatgatgagtctaatgtgtggcattcgcgactctgtcatgtgaatttcggttgtatgacgcgcttagctaacatgagtttaattccaaaattcactttggtcaaaggttccaagtgccatacttgtgttcaatcgaaacaacctcgcaagcctcacaaggcatctgaggcgaggaatttggcacctctagaacttgttcattccgatttgtgcgaaatgaacggcgtgttgactaaagggggaaagaaatatttcatgacactgatagatgattgcactagattttgctatgtgtatctattgaaaacaaaggatgaggcattgcattacttcaaaatctataaagctgaggtagaaaaccaacttgaaaggaaaatcaaacggttgaggtctgatagaggtggggagtatttttccaatgagtttgcatctttttgcgaagagtttggaattattcatgagatgacgcctccctattcaccccaatcaaatggggtgcccgaaagaaagaaccgtactgtcgcgtcccaaaacgactctaaaactcatcctcgaaattgtgcaaagaataattaa

SEQ ID NO: 15368 - DNA, 2415 bp, Oryza sativa
  Clone ID: TFbOSC1305j.C1.o1.fg
atgtctggagttgctgccgccgctaccggcggaggtggtgcgccgccgccgacaggagctggtgcgccgccgccgacaggagctggatccggagctggtgcgccaggaggaggtgccgtgaacgactacaacaacggaggcaattctgcctcaccatccagcggagggccattctcggggtataatcttctcctcctgctactgctgttagcgctattcctgttcccattgttagcgctatactgtgtgcgctatgttcttgttcctgttctacatgatgcctctagcatgttatcgcgttactggtatgttcctgtttctgacattcatgatgcgcatagtatgctactggttatgttaagatcaccctacactgcttatgccatgatcattgtttcaatttcttggattaaaatatgccgaataatgactatatttccaacaatccaaaaacctgataggtcattttcggtagttggctttgctgctgcactgaaaccacatgcttttgatggttcaaactataagagatggaaagcacgtgcactattgtggttgacagcgatgcagtgcttctatgtttcacggggcaaacgaagtgaaccacctctttctcctgaggaagaggctaagttcgaggcttcggattgcctgttccgtggagcattgatcagtgtactcgctgacaacatagtggacgtgtacatgcacatgccttctgggaaggacatgtgggatgcacttgaggccaagttcggagtttctgacgccggcagtgagctgtatgtcatggagcagttctatgactacaagatggtcgatgaccgttctgtagtagaacaagctcatgagattcagatgctggctaaggaacttgagaacaacaactgtgagttgccggacaagtttgtggcgggtggcattattgccaaactaccaccttcttggtcggactttgccacttctctaaagcacaagagacaagagttcagtgttcctgatctcattggctctttgggtgttgaggagaaggcgagggcaaaggacgtccggggcaaaaaggttgagggaggttctagtgccaatatggtacagaagaagaaccctcatgcatcccacaacaacaagaaagtcaagcctgatgtcaaacccaaggttgcaaccaattttaagaagaaaggcaagggaaaggcaaagggagactgctttgtgtgtggcaagtctgggcattgggccaaggactgtcctgagcgcaaagacaggaagtctgccaacatgatcattagcgagggcggaggaacatcggggtacggtaaaatattacctacagttctctctatttttcattcacctgattggtgggtggatactggtgctaatattcatgtcgggagaggttcctccttgttgatgggaaacgggtcacttgcggctgttcatggtgttggtacggtcgatctgaagtttacttcgggaaagaccgtgcagctgaagaacgtgcagcatgtcccttcaataaagaagaatctagttagcggctctctattgtgtagagaaggttttagacttgtgtttgagtccaataaatgtgtcgtatctaaatatgggacttttgttggtaaaggttatgacagcggaggcttgttccgtttttctttgaatgacatgtgtaataatcataatgctgtgaaccatattagcaagaatgatgagtctaatgtgtggcattcgcgactctgtcatgtgaatttcggttgtatgacgcgcttagctaacatgagtttaattccaaaattcactttggtcaaaggttccaagtgccatacttgtgttcaatcgaaacaacctcgcaagcctcacaaggcatctgaggcgaggaatttggcacctctagaacttgttcattccgatttgtgcgaaatgaacggcgtgttgactaaagggggaaagaaatatttcatgacactgatagatgattgcactagattttgctatgtgtatctattgaaaacaaaggatgaggcattgcattactttaaaatctataaagctgaggtagaaaaccaacttgaaaggaaaatcaaacggttgaggtctgatagaggtggggagtatttttctaatgagtttgcatccttttgcgaagagtttggaattattcatgagatgacgcctccctattcaccccaatcaaatggggtggccgaaagaaagaaccgtactctaactgagatggtgaatgccatgttagacactgcggggctttccaaggaatggtggggtgaggcagttttgactgcatgtcatgtcttgaataaaattccaatgaagcataaggaagtaacaccattcgaggaatgggaaaggaagaaattaaatctctcatacctacgaacatggtgctgtatggccaag

SEQ ID NO: 15369 - DNA, 3561 bp, Oryza sativa
  Clone ID: TFbOSC1309j.C1.o6.fg
atgtctggagttgctgccgccgctaccggcggaggtggtgcgccgccgccgacaggagctggtgcgccgccgccgacaggagctggatccggagctggtgcgccaggaggaggtgccgtgaacgactacaacaacggaggcaattctgcctcaccatccagcggagggccattctcggggtataatcttctcctcctgctactgctgttagcgctattcctgttcccattgttagcgctatactgtgtgcgctatgttcttgttcctgttctacatgatgcctctagcatgttatcgcgttactggtatgttcctgtttctgacattcatgatgcgcatagtatgctactggttatgttaagatcaccctacactgcttatgccatgatcattgtttcaatttcttggattaaaatatgccgaataatgactatatttccaacaatccaaaaacctgataggtcattttcggtagttggctttgctgctgcactgaaaccacatgcttttgatggttcaaactataagagatggaaagcacgtgcactattgtggttgacagcgatgcagtgcttctatgtttcacggggcaaacgaagtgaaccacctctttctcctgaggaagaggctaagttcgaggcttcggattgcctgttccgtggagcattgatcagtgtactcgctgacaacatagtggacgtgtacatgcacatgccttctgggaaggacatgtgggatgcacttgaggccaagttcggagtttctgacgccggcagtgagctgtatgtcatggagcagttctatgactacaagatggtcgatgaccgttctgtagtagaacaagctcatgagattcagatgctggctaaggaacttgagaacaacaactgtgagttgccggacaagtttgtggcgggtggcattattgccaaactaccaccttcttggtcggactttgccacttctctaaagcacaagagacaagagttcagtgttcctgatctcattggctctttgggtgttgaggagaaggcgagggcaaaggacgtccggggcaaaaaggttgagggaggttctagtgccaatatggtacagaagaagaaccctcatgcatcccacaacaacaagaaagtcaagcctgatgtcaaacccaaggttgcaaccaattttaagaagaaaggcaagggaaaggcaaagggagactgctttgtgtgtggcaagtctgggcattgggccaaggactgtcctgagcgcaaagacaggaagtctgccaacatgatcattagcgagggcggaggaacatcggggtacggtaaaatattacctacagttctctctatttttcattcacctgattggtgggtggatactggtgctaatattcatgtcgggagaggttcctccttgttgatgggaaacgggtcacttgcggctgttcatggtgttggtacggtcgatctgaagtttacttcgggaaagaccgtgcagctgaagaacgtgcagcatgtcccttcaataaagaagaatctagttagcggctctctattgtgtagagaaggttttagacttgtgtttgagtccaataaatgtgtcgtatctaaatatgggacttttgttggtaaaggttatgacagcggaggcttgttccgtttttctttgaatgacatgtgtaataatcataatgctgtgaaccatattagcaagaatgatgagtctaatgtgtggcattcgcgactctgtcatgtgaatttcggttgtatgacgcgcttagctaacatgagtttaattccaaaattcactttggtcaaaggttccaagtgccatacttgtgttcaatcgaaacaacctcgcaagcctcacaaggcatctgaggcgaggaatttggcacctctagaacttgttcattccgatttgtgcgaaatgaacggcgtgttgactaaagggggaaagaaatatttcatgacactgatagatgattgcactagattttgctatgtgtatctattgaaaacaaaggatgaggcattgcattactttaaaatctataaagctgaggtagaaaaccaacttgaaaggaaaatcaaacggttgaggtctgatagaggtggggagtatttttctaatgagtttgcatccttttgcgaagagtttggaattattcatgagatgacgcctccctattcaccccaatcaaatggggtggccgaaagaaagaaccgtactctaactgagatggtgaatgccatgttagacactgcggggctttccaaggaatggtggggtgaggcagttttgactgcatgtcatgtcttgaataaaattccaatgaagcataaggaagtaacaccattcgaggaatgggaaaggaagaaattaaatctctcatacctacgaacatggtgctgtatggccaagtccagagatgctacattctttgagaatgaatttcctatgaaatatacacctagcacttctagtaaagaaactgtcatgccccatgagcactttgcaccgatagaacacaatgatcaaacgcctgaggaaaatcctgaggaggacaacattgtagatactcgcaagagtaagagacaaagggttgcaaaatcctttggagatgactacattgtatacctcgtggatgacaccccaagaaccatagaagaggcatattcatctcctgacgctgactactggaaggaagcagtacgcagtgaaatggactcgattatgtctaatggtacttgggaagtcgttgagcgtccatatgggtgcaagcccgtaggatgcaaatgggttttcaagaaaaagcttaggcctgatggtacaatcgaaaagtacaaggcaaggcttgtggccaagggttatacccaaaaggaaagcgaggatttcttcgacacatattcaccagttgctcgcttgactacgattcgacaagcacctaagcaatggcatgagaagtttgacaccacgcttacatctgcaggctttgttgtgaacgaagctgacaaatgtgtatactatcgctatggtgggggagaaggggtgatcttgtgcttgtatgtcgatgacatactgatctttgggaccagccttaatgtgattgaggaggtcaaagactatctgtccaagagttttgaaatgaaggatttgggagaggctgatgttattcttaacatcaaactacaaagaggagatgagggtgggattacacttgtgcaatcccactatgtggacaaggttttgagtcgctttggatatagtgactgcaagccagctcctactccttatgatcccagtatgctattaaggaaaaaccgaagaatagcaagggatcaactaagatactctcaaatcattggttcattgatgtacttggctagcgcaacgaggcctgacatctcatttgctgtaagcaagctgagccggtttgtctcaaatccgggagatgatcattggcaggctctggaaagagtaatgcgctatctaaagggcactatgagctatggaattcactataccgggtatccaaaagtactagaagggtatagtgactcaaactag

SEQ ID NO: 15370 - DNA, 879 bp, Oryza sativa
  Clone ID: TFbOSC14746j.C1.o5.gm
atggtgctccaccacctgcggtcgcacaacggcccttcatggagactggtcctcaaactccaaaatgctccgatgaacggccaaatctcagcgacgttgaacgcgttgtgcgtcgggctcgtcaccgccagctcaattagcactgagaatagcgtgggatatctagtcgtggggaagcaaagggcccctgatcagccgtggagaagcagaagccaaaccctgacacccctcttctcgttctacgctactccaaggcctcgctacaccagccccgtgcactgccgggagggtgccgtcctcctcatagctaaagctcttgccgtagtgagatcaagggagaagttggtgctcgctagctccctgtttgcccaccacagtgccactgccacctgctccaccccggctgcttctggtgttgttgcttctcgcatgctagatcgagggcgtcatctggagctcgagcccttcgtcacggcgagcgactcggagtggacaggggagatcacagtggcgagtgaatcgaggctccggctcccggcgcgccatctccaggtgcgggagcagcagcggcggcggaagacatggtgtagcagacgacgacgacgacgaacagaagacgaggagcagtcgtgcggaagcactccccaaaaacctgatcactcgcctacccggtgcagatctcgggcgaaggtgtggttccggaggccctgcttgttccgatctctcgtgcacgcaagcgatcagaagtggggaagcagaacagtagcagcaccaggcgcgcgcgaggaggaggaggaagaacaccagatggaaatggagactgttaagttgaacttccacctaggaaatgagctacatcagaccacaactaaacaatga

SEQ ID NO: 15371 - DNA, 4149 bp, Oryza sativa
  Clone ID: TFbOSC16536j.C1.o8.fg
atgtcgaacactggagacaaggagaaggagactcccgtcaacaccaacggaggcaatactgcctcaaactccagcggaagaccattcttggggtataaccttattacattatttcaattagaagttttactgttaatgttcatcgcaatgtcaacattgtgtcattatgtgattgttgatgcttattcaatgttaagcatgctcatgttgattacattcaccactatcactggatcaaatcctattgtaaatatcatgtttattatcttgttattttggattaaaatatgccgaattatgaccaaatttctaacaatccaaaaacctgataggtcattttcggtagttggctttgctgctacactgaaaccacatgcctttgatggttcaaactataagagatggaaagcacgtgcactattgtggttgacagcgatgcagtgcttctatgtttcacggggcaaacgaagtgaaccacctctttctcctgaggaagaggctaagttcgaggcttcggattgcctgttccgtggagcattgatcagtgtactcgctgacaacatagtggacgtgtacatgcacatgccttctgggaaggaaatgtgggatgcacttgaggccaagttcggagtttctgacgccggcagtgagctgtatgttatggagcagttctatgactacaagatggtcgatgaccgttctgtagttgaacaagctcatgagattcagatgctggctaaggaacttgagaacaacaactgtgagttgccggacaagtttgtggcaggtggcattattgccaaactaccaccttcttggtcggactttgccacttctctaaagcacaagagacaagagttcagtgttcctgatctcattggctctttgggtgttgaggagaaggcgagggcaaaggacgtccggggcaaaaaggttgagggaggttctagtgccaatatggtacagaagaagaaccctcatgcatcccacaacaacaagaaagtcaagcctgatgtcaaacccaaggctgcaaccaattttaagaagaaaagcaagggaaaggcaaagggagactgctttgtgtgtggcaagtctgggcattgggccaaggactgtcctgagcgcaaagacaggaagtctgccaacatgatcattagcgagggcggaggaacatcggggtacggtaaaatattacctacagttctctctgtttttcattcacctgattggtgggtggacactggtgctaatattcatgtcgggagaggttcctccttgttgatgggaaacgggtcgcttgcggctgttcatggtgttggtacggtcgatctgaagtttacttcgggaaagaccgtgcagctgaagaacgtgcagcatgtcccttcaataaagaagaatctagttagcggctctctattgtgtagagaaggttttagacttgtgtttgagtccaataaatgtgtcgtatctaaatatgggacttttgttggaaaaggttatgacagcggaggcttgttccgcttttctttgaatgacatgtgtaataatcataatgctgtgaaccatattagcgagaatgatgagtctaatgtgtggcattcacgactctgtcatgtgaatttcggttgtatgacgcgcttagctaacatgagtttaattccaaaattcactttggtaaaaggttccaagtgccatacttgtgttcaatcgaaacaacctcgcaagcctcacaaggcatctgaggcgaggaatttggcacctctagaacttgttcattccgatttgtgcgaaatgaacggcgtgttgactaaagggggaaagaaatatttcatgacactgatagatgattgcactagattttgctatgtgtatctattgaaaacaaaggatgaggcattgcatttctttaaaatctataaagccgaggtagaaaaccaacttgaaaggaaaatcaaacggttgaggtctgatagaggtggggagtatttttccaatgagtttgcatccttttgcgaagagtttggaattattcatgagatgacgcctccctattcaccccaatcaaatggggtggccgaaagaaagaaccgtactctaactgagatggtgaatgccatgttagacactgcggggctttccaaggaatgcataaggaaaacaccattcgaggaatgggaaaggaagaaattaaatctctcatacctacgaacatggggctgtttggccaaggtaaatgtacctatagccaaaaagcggaaacttggaccaaaaactgttgattgtgtgtttcttggttatgctatccacagtgtgggttatagattcttaatagtaaactctggagtacccgacatgcatgttggtacaattcttgagtccagagatgctatattctttgagaatgaatttcctatgaaatatacacctagcacttctagtaaagaaactgtcatgccccatgagcactttgcaccgatagaacacaatgatcaaacgcctgaggaaaatcctgaggaggacaacattgtagatactcgcaagagtaagagacaaagggttgcaaaatcctttggagatgactacattgtatacctcgtggatgacaccccaagaaccatagaagaggcatattcatctcctgacgctgactactggaaggaagcagtacgcagtgaaatggactcgattatgtctaatggtacttgggaagtcgttgagcgtccatatgggtgcaagcccgtaggatgcaaatgggttttcaagaaaaagcttaggcctgatggtacaatcgaaaagtacaaggcaaggcttgtggccaagggttatacccaaaaggaaggcgaggacttcttcgacacatactcaccagttgctcgcttgaccacgattcgagtactacttgctctggcagcctctcatggtcttctcgtccatcagatggacattaagacagctttcctaaacggagagctggaggaggagatctatatggatcaaccagacgggtatgtactagaaggtcaggagggaatggtgtgtaaactattgaaatccttgtatggcctcaagcaagcacctaagcaatggcatgagaagtttgacaccacgcttacatctgcaggctttgttgtgaacgaagctgacaaatatgtatactatcgctatggtgggggagaaggggtgatcttgtgcttatatgtcgatgacatactgatctttgggaccagccttaatgtgattgaggaggtcaaagactatctgtccaagagttttgaaatgaaagatttgggagaggctgatgttattcttaacatcaaactacaaagaggagatgagggtgggattacacttgtgcaatcccactatgtggacaaggttttgagtcgctttggatatagtgactgcaagccagctcctactccttatgatcccagcgtgctattaaggaaaaaccgaagaatagcaagggatcagctgagatactctcaaatcattggttcattgatgtacttggctagcgcaacgaggcctgacatctcatttgctgtaagcaagctgagccggtttgtctcaaatccgggagatgatcattggcaggctctggaaagagtaatgcgctatctaaagggtactatgagctatggaattcactataccgggtatccaaaagtactagaagggtatagtgactcaaactggatatctgatgctgatgagataaaagccacaagtggatatgtgttcacacttggaggtggcgctgtttcctggaagtcttgcaagcagaccatcttaacgaggtcaacaatggaagcagaacttacagcactagatattgcgacagttgaggccgagtggcttcgtgaactcctgatggatttgccggtggttgaaaaaccagtgccagctatcctaatgaactgcgataatcaaacagtgattattaaagtgaacagttcaaaggacaacatgaagtcatctagacacatcaagagaagactgaaatctgtcagaaagcagaaaaactctggagtgatagcattggactatgtccaaacggctagaaatctggcagatcagtttaccaaggggctaccacgtaatgtgatagacagtgcatcgagggaaatgggcttgatacccacctaa

SEQ ID NO: 15372 - DNA, 3561 bp, Oryza sativa
  Clone ID: TFbOSC18107j.C1.o5.fg
atgtctgcgcctggagccggagcttccgatggtgcgcctggagctggagccggagatggtgcgcctggagctgcgaacgtcaacaccaacggaggcaattttgcctcacaatccagcggagggccattctcgggtgaaccacctctttctcctgaggaagaggctaagttcgaggcttcggattgcctgttccgtggagcattgatcagtgtactcgctgacaacatagtggacgtgtacatgcacatgccttccgggaaggacatgtgggatgcacttgaggccaaattcggagtttccgacgccggcagtgagctgtatgtcatggagcagttctatgactacaagatggtcgatgaccgttctgtagtagaacaaactcatgagattcggatgctggctaaggaacttgagaacaacaactatgagttgccggacaagtttgtggcaggtggcattattgccaaattgccaccttcttggtcagactttgccacttctctaaagcacaagagacaagagttcagtgtttctgatttcattggctctttgggtgttgaggagaaggcgagggcaaaggacgtccggggcaaaaaggttgagggaggttctagtgccaatatggtacagaagaagaaccctcatgcatcccacaataacaagaaagtcaagcatgatgtcaaacccaaggctgcaaccaactttaagaagaaaggcaagggaaaggcaaagggagactgctttgtgtgtggcaagtctgggcattgggccaaggactgtcctgagcgcaaagacaagaagtctgccaacatggtcattagcgagggaggaggaatatcggggtacggtaaaatattacctacagttctctttgtttttcactcacctgattggtgggtggatactagtgctaatattcatgtcgggagaggttcctccttgttgatgggaaacgggtcgcttgcggctgttcatggtgttggtatggtcgatctgaagtttacttcgggaaagaccgtgcagctgaagaacgtgcagcatgtcccttcaataaagaagaatcttgttagcggctctctactgtgtagagaaggttttagacttgtgtttaaatccaataaatgtgtcgtatctaaatatgggacttttgttggaaaaggttatgacagcggaggcttgttccgcttttctttgaatgacatgtgtaataatcataatgttgtgaaccatattagcgagaatgatgagtctaatgtgtggcattcacgactctgtcatgtgaatttcggttgtatgacgcgcttagctaacatgagtttaattccaaaattcactttggtgaaaggttctaagtgccatacttgtgttcaatcgaaacaacctctcaagcctcacaaggcatctgaggcgaggaatttggcacctcttgaacttgttcattccaatttgtgcgaaatgaatggcgtgttgactaaagggggaaagaaatatttcatgacaccgatagatgattgcactaggttttgctgtgtgtatctattgaaaacaaaggatgaagcattgcatttctttaagacctataaagctgaggtagaaaaccaacttgaaaggaaaatcaaacggttgaggtctgatagaggtggggagtatttttccaatgaattttcatccttttgcgaagagtttggaattattcatgagaggacgcctccctattcaccccaatcaaatggggtggccgaaagaaagaatcgtactctaactgagatggtgaatgccatgttagacattgtagagctttccaaggaatggtggggtaaggcagttttgactgcatgtcatgtcctgaataaaattccaatgaagcataaggaagtaaatgtacctatagccaaaaagtggaaacttggaccaaatactgttgattgtgtgttccttggttatgctattcacagtgtgggttatagattcttaatagtaaactctggagtacccggcatgcatcttggtacaattattgagtgtagagatgctacattctttgagaatgaatttcccatgaaacatacacctagcacctctagtcaagaaactgtcatgccccatgagcactttgcaccgatagaacacaatgatcaaacgcctgaggaaaatcctgaggaggacaacattgtagatactcgtaagaaagaggcatattcatctcctgacgctgactactggaaggaagcagtacgcagtgaaatggactcgattatgtctaatggtacttgggaagtcattgagcatccatatgggtgcaagcccgtaggatgcaaatgggttttcaagaaaaagcttaggcttgatggtacaattgaaaagtacaaggcaaggcttgtggcaagggttatacccaaaaggaaggcgaggactttttttgacacatactcaccagttgctcgcttgaccacgattcgagtactacttgctctggcagcctctcatggtcttctcgtccatcagatggacgttaagacagctttcgtaaacagagagctggaggaggagatctatatggatcaaccatacggatatgtactagaaggtcaggagggaatggtgtgtaaactgttgaaatccttgtatggcctaaagcaagctcctaagcaatgtcatgagaagtttgacaccacgcttacatctgcaggctttgttgtgaacgaaactgacaaatgtgtgtactatcactatagtgggggagaaggagtgatcttgtgcttatatgtcgatgacatattgatctttgggaccagcctcaatgtgattgaggaggtcaaggactatctgtccaagagttttgaaatgaaggatttgggagaggctgatgttattcttaacattaaactacaaagaggagatgagggtgggattacacttgtgcaatcgcactatgtggacaaggttttgagtcgctttggatatagtgactgcaagccagctcctactccttatgatcccagcgtgctattaagaaaaaaccgaagaatagcaagggatcaactgagatactctcaaatcattggttcattgatgtacttggctagtgcaacgaggccagacatctcatttgctgtaagcaagctgagccggtttgtctcaaatccaggagatgatcattggcaggctctggaaagagtaatgcgctatctaaagggcactgtgagctatgggattcactataccgggtatccaaaagtactagaagggtatagtgactcaaactggatatctgatgctgatgagataaaagccacaggtggatatgtgttcacacttggaggtggcgctgtttcctggaagtcttgcaagcagaccatcttaacgagttcaaaggacaacatgaagtcatctaggcatatcaagagaagactgaaatctgtcagaaagcagaaaaactccggagtgatagcattggactatgtccaaacggctagaaatctggcagatcagtttaccaagaggctaccacgtaatgtgatagacagtgcatcgagggaaatgggcttgatacccacctaa

SEQ ID NO: 15373 - DNA, 937 bp, Oryza sativa
  Clone ID: TFbOSC21802j.C1.o1.fg
gcctgatgtcaaacccaaggctgcaaccaattttaagaagaaaggcaagggaaagacaaagggagactgctttgtgtgtggcaagtctgggcattgggccaaggactgtcctgagtgcaaagacaggaagtctgccaacatgatcattagcgagggcggaggaacatcggggtatggtaaaatattacctacagttctctctgtttttcattcacctgattggtgggtggatactggtgctaatattcatgtcgggagaggttcctccttgttgatgggaaacgggtcacttgcggctgttcatggtgttggtacggtcgatctgaagtttacttcgggaaagaccgtgcagctgaagaacgtgcagcatgtcccttcaataaagaagaatctagttagcggctctctattgtgtagagaaggttttagacttgtgtttgagtccaataaatgtgtcgtatctaaatatgggacttttgttggaaaaggttatgacagtggaggcttgttccgcttttctttgaatgacatgtgttataatcataatgctgtgaaccatattagcgagaatgatgagtctaatgtgtggcattcgcgactctgtcatgtgaatttcggttgtatgacgcgcttagctaacatgagtttaattccaaaattcactttggtcaaaggttccaagtgccatacttgtgttcaatcgaaacaacctcgcaagcctcacaaggcatctgaggcgaggaatttggcacctctagaacttgttcattccgatttgtgcgaaatgaacggcgtgttgactaaagggggaaagaaatatttcatgacactgatagatgattgcactagattttgctatgtgtatctattgaaaacaaaggatgaggcattgcattactttaaaatctataaagctgaggtagaaaaccaactttga

SEQ ID NO: 15374 - DNA, 2607 bp, Oryza sativa
  Clone ID: TFbOSC22139j.C1.o3.fg
atgtctgcgcctggagccggtgccgctactgctgctggaggagatggcggaggtggtgcgccaccaggagctggagctggagctggaggtggtgcgccaggagctagagccggtgccgcgaacaacaacaccaacggaggcaattctgcctcacaatccagcggagggccattctcaagatcaccctacactgtttatgccatgattattgtcttaacattttggattaaaatatgccgatttatgaccatattttcaactatccaaaaacctgataggtcattttcggtagttggctttgctgctacattgaaaccacatgcttttgatggttctaactataagagatggaaagcacgtgcactattgtggttgacagcgatgcaatgcttctatgtttcacggggcaaacgaagtgaaccacctctttctcctgaggaagaggctaagttcgaggcttcggattgtctgttccgtggagcattgatcagtgtactcgctgacaacatagtggacgtgtacatgcacatgccttctgggaaggacatgtgggatgcacttgaggccaagttcggagtttctgacgctggcagtgcgctgtatgtcatggagcagttctatgactataagatggtcgatgaccgttctgtagtagaagctcatgagattcagatgctggctaaggaacttgagaacaacaactgcgagttgccggacaagtttgtggtgggtggcattattgccaaattgccaccttcttggtcggacttcgccacttctctaaagcacaagagacaagagttcagtgtttctgatttcattggttctttgggtgttgaggagaaggcgagggcaaaggacgtccggggcaaaaaggttgagggaggttctagtgccaatatggtacagaagaagaaccctcatgtatcccacaacaacaagaaagtcaagcctgatgtcaaatccaaggctgcaaccaactttaagaagaaaggcaagagaaaggcaaagggagactgctttgtgtgtggcaagtctgggcattgggctaaggactgtcctgagcgcaaagacaggaagtctgcgaacatggtcattagcgagggcggaggaacatcggggtacggtcggaagaggttcctccttgttgatgggaaacgggtcgcttgcggctgttcatggtgttgtgtgggttatagattcttaatagtaaactctggagtacccgacatgcatgttggtacaatttttgagtccagagatgctacattctttgagaatgaatttcccatgaaacatacacctagcacttctagtcaagaaactgtcatgccccatgagcactttgcaccgatagaacacaatgatcaaacgcctgaggaaaatcctgaggaggacaacattgtagatactcgcaagagtaagagacaaagggttacaaaatcctttggagatgactacattgtatacctcgtggatgacaccccaagaaccatagaagaggcatattcatctcctgacgctgactactggaaggaagcagtacgcagtgagatggactcgattatgtctaatggtacttgggaagtcgttgagcgtccatatgggtgcaagcccatggacgttaagacaactttcctaaacggagagctagaggaggagatctatatggatcaaccagacgggtatgtactagaagatcagaagggaatggtgtgtaaactgttgaaatccttgtatggcctcaagcaagcacctaagcaatggcatgagaagtttgacaccacgcttacatctgcaggcttcgttgtgaacgaagctgacaaatgtgtgtactatcgctatgatgggggagaaggagtgatcttgtgcttatatgtcgatgacatattgatctttgggaccagcctcaatgtgattgaggaggtcaaggactatctgtccaagagttttgaaatgaaggatttgggagaggctgatgttattcttaacatcaaactacaaagaggagatgagggtgggattgcacttgtgcaatcccactatgtggacaaggctctggaaagagtaatgcgctatctaaagggcactatgagctatggaattcactataccgggtatccaaaagtactagaagggtatagtgactcaaactggatatctgatgctgatgagataaaagccacaagtggatatgtgttcacacttggaggtggcgctgtttcctggaagtcttgcaagcagaccatcttaacgaggtcaacaatggaagcagaacttacagcactagatactgcgacagttgaggccgagtggcttcgtgaactcctgatggatttgccggtggttgaaaagccagtgtcagctatcctaatgaactgtgataatcaaacagtgattattaaagtgaacagttcaaaggacaacacgaagtcatctaggcatatcaagagaagactgaaatctgtcagaaagcagaaaaactccggagtgatagcattggactatgtccaaacggctagaaatctggcagatcagtttaccaaggggctaccacgtaatgtgatagacagtgcatcaaggaaaatgggcttgatacccacctaa

SEQ ID NO: 15375 - DNA, 3990 bp, Oryza sativa
  Clone ID: TFbOSC23901j.C1.o2.fg
atgtctggagttgctgccgccgctactggcccgccgacaggagctggtgatacgccgccgccgacaggagctggatccggagctggtgcgccaggaggaggtgtcgtgaacgactacaacaacggaggcaattctgcctcaccatccagcggagggccattctcggggtataatcttctcctcctgctactgctgttagcgctattcctgttcctgttcccattgttagcgctatactatgtgcgctatgttcttgttcctgttctacataatgcctctagcatgttatcgcgttactgtgcttctatggtttcacggggcaaacgaagtgaaccacctctttctcctgaggaagaggctaagttcgaggcttcggattgcctgttccgtggagcattgatcagtgtactcgctgacaacatagtggacgtgtacatgcacatgccttctgggaaggacatgtgggatgcacttgaggccaagttcggagtttctgacgccggcagtgagctgtatgtcatggagcagttctatgactacaagatggtcgatgaccgttctgtagtagaacaagctcatgagattcagatgctggctaaggaacttgagaacaacaactgtgagttgccggacaagtttgtggcgggtggcattattgccaaactaccaccttcttggtcggactttgccacttctctaaagcacaagagacaagagttcagtgttcctgatctcattggctctttgggtgttgaggagaaggcgagggcaaaggacgtccggggcaaaagggttgagggaggttctagtgccaatatggtacagaagaagaaccctcatgcatcccacaacaataagaaagtcaagcctgatgtcaaacccaaggctgcaaccaattttaagaagaaaggcaagggaaaggcaaagggagactgctttgtgtgtggcaagtctgggcattgggccaaggactgtcctgagcgcaaagacaggaagtctgccaacatgatcattagcgagggcggaggaacatcggggacggtcgggagaggttccttcttgttgatgggaaacgggtcgcttgcggctgttcatggtattggtacggtcgatctgaagtttacttcgggaaagaccgtgcagctgaagaacgtgcagcatgtcccttcaataaagaagaatctagttagcggctctctattgtgtagagaaggttttagacttgtgtttgagtccaataaatgtgtcgtatctaaatatgggacttttgttggaaaaggttatgacagcggaggcttgttccgcttttctttgaatgacatgtgtaataatcataatgctgtgaaccatattagcgagaatgatgagtctaatgtgtggcattcgcgactctgtcatgtgaatttcggttgtatgacgcgcttagctaacatgagtttaattccaaaattcactttggtcaaaggttccaagtgccatacttgtgttcaatcgaaacaacctcgcaagcctcacaaggcatctgaggcgaggaatttggcacctctagaacttgttcattccgatttgtgcgaaatgaacggcgtgttgactaaagggggaaagaaatatttcatgacactgatagatgattgcactagattttgctatgtgtatctattgaaaacaaaggatgaggcattgcattactttaaaatctataaagctgaggtagaaaaccaacttgaaatgaaaatcaaacggttgaggtctgatagaggtggggagtatttttctaatgagtttgcatccttttgcgaagagtttggaattattcatgagatgacgcctccctattcaccccaatcaaatggggtggccgaaagaaagaaccgtactctaactgagatggtgaatgccatgttagatactgcggggctctccaaggaatggtggggtgaggcagttttgactgcgtgtcatgtcctgaataaaattccaatgaagcataaggaagtaacaccattcgaggaatgggaaaggaagaaattaaatctctcatacctacgaacatggggctgtttggccaaggtaaatgtacctatagccaaaaagcggaaacttggaccaaaaactgttgattgtgtgttccttggttatgctatccacagtgtgggttatagattcttaatagtaaactctggtgtacccgacatgcatgctggtacaattcttgagtccagagatgctacattctttgagaatgagtttcctatgaaatatacacctagcacttctagtaaagaaactgtcatgccccatgagcactttgcaccgatagaacacgatgatcaaacgcctgaggaaaatcctgaggaggacaacattgtagatactcgcaagagtaagagacaaagggttgcaaaatcctttggagatgactacattgtatacctcgtggatgacaccccaagaaccatagaagaggcatattcatctcctgacgctgactactggaaggaagcagtacgcagtgaaatggactcgattatgtctaatggtacttgggaagtcgttgagcgtccatatgggtgcaagcccgtaggatgcaaatgggttttcaagaaaaagcttaggcctgatggtacaatcgaaaagtacaaggcaaggcttgtggccaagggttatacccaaaaggaaggcgaggacttcttcaacacatactcaccagttgctcgcttgaccacgattcgagtactacttgctctggcagcctctcatggtcttctcgtccatcagatggacgttaagacagctttcctaaacggagagctggaggaggagatctatatggatcaaccagacgggtatgtactagaaggtcaggagggaatggtgtgtaaactattgaaatccttgtatggcctcaagcaagcacctaagcaatggcatgagaagtttgacaccacgcttacatctgcaggctttgttgtgaacgaagctgacaaatgtgtatactatcgctatggtgggggagaaggggtgatcttgtgcttgtatgtcgatgacatactgatctttgggaccagccttaatgtgattgaggaggtcaaagactatctgtccaagagttttgaaatgaaggatttgggagaggctgatgttattcttaacatcaaacttcaaagaggagatgagggtgggattacacttgtgcaatcccactatgtggacaaggttttgagtcgctttggatatagtgactgcaagccagctcctactccttatgatcccagcgtgctattaaggaaaaaccgaagaatagcaagggatcaactaagatactctcaaatcattggttcattgatgtacttggctagcgcaacgaggcctgacatctcatttgctgtaagcaagctgagccggtttgtctcaaatccgggagatgatcattggcaggctctggaaagagtaatgcgctatctaaagggcactatgagctatggaattcactataccgggtatccaaaagtactagaagggtatggtgactcaaactggatatctgatgctgatgagataaaagccacaagtggatatgtgttcacacttggaggtggcgctgtttcctggaagtcttgcaagcagaccatcttaacaaggtcaacaatggaagcagaacttacagcactagatactgcgacagttgaggccgagtggcttcgtgaactcctgatggatttgccggtggttgaaaaaccagtgccagctatcctaatgaactgcgataatcaaacagtgattattaaagtgaacagttcaaaggacaacatgaagtcatctagacacatcaagagaagactgaaatctgtcagaaagcagaaaaactccggagtgatagcattggactatgtccaaacggctagaaatctggcagatcagtttaccaaggggctaccacgtaatgtgatagacagtgcatcgagggaaatgggcttgatacccacctaa

SEQ ID NO: 15376 - DNA, 323 bp, Oryza sativa
  Clone ID: TFbOSC2785j.C1.o1.hg
accacttttaagaagaaaggcaagggaaaggcaaagggcgactgctttgtgtgtggcaagtctgggcattgggccaaggactgtcctgagcgcaaagacaggaagtgtgccaacatggtcattagcgagggcggaggaacatcggggtacggtcaggagaggttcctccttgttgatgggaaacgggtcgcttacggctgtttatggtgttggtacggtcgatctgaagtttacttcgggaaagaccgtgcagctgaagaacgtgcaacatagtttggaattggggatcttctagagtcgtcagacgggcacctcgggcagct

SEQ ID NO: 15377 - DNA, 540 bp, Oryza sativa
  Clone ID: TFbOSC30194j.C1.o1.gm
atgctggctaaggaacttgagaacaacaactgtgagttgccggacaagtttgtggcgggtggcattattgccaaactaccaccttcttggtcggactttgccacttctctaaagcacaagagacaagagttcagtgtttctgatctcattggctctttgggtgttgaggagaaggtgagggcaaaggacgtccggggcaaaaaggttgagggaggttctagtgccaatatggtacagaagaagaactctcatgcatcccacaacaacaagaaagtcaagcctgatgtcaaacccaaggctgcaaccaattttaagaagaaaggcaagggaaaggcaaagggagactgctttgtgtgtggcaagtctgggcattgggccaaggactgtcctgagcgcaaagacaggaagtctgccaacatggtcgggagaggttcctccttgttgatgggaaacgggtcgcttgcggctgttcatggtgttggtacggttgatctgaagtttacttcgggaaagaccgtgcagctgaagaacgtgcagcat

SEQ ID NO: 15378 - DNA, 2721 bp, Oryza sativa
  Clone ID: TFbOSC31402j.C1.o3.fg
atggcggaggtggtgcgccgccgccaggagctggagccggtggcgcgaacaacaacatcaacggaggcaattctgcctcataatccagcggagggccattctcgggtggacgtgtacatgcacatgccttctgggaaggacatgtgggatgcacttgaggccaagttcggagtttctaacgccggcagtgagctgtatgtcatggagcagttctatgactacaagatgttgccggacaagtttgtggcgggtggcattattgccaaattgccaccttcttggtcggactttgccacttctctaaagcacaagagacaagagttcagtgtttctgatctcattggctctttgggtgttgaggagaaggcgagggcaacggacatccgggaaaaaaaggttgagggaggttctagtgccaatatggtacagaaaaagaaccctcatgcatcctacaacaacaagaaagtcaagcctgatgtcaaacccaaggctgcaaccaactttaagaagaaaggcaagggaaaagcaaagggagactgctttgtgtgtggcaagtctgggcattgggccaaggactgtcctgagcgcaaagacaggaagtctgccaacatggtcattggcgagggcggaggaacatcggggtacggtaaaatattacctacagttctctctgtttttcactcacctgattggtgggtggacactggtgctaatattcatgtcgggagaggttcctccatgttgatgggaaacgggtcgcttgcggctgttcatggtattggtacggtcgatcagaagtttacttcgggaaagaccgtgcagctgaagaacgtgcagcatgtcccttcaataaagaagaatcttgttagcggctctctactttgtagagaaggttttagacttgtgtttgagtccaataaatgtgtcgtatctaaatatgggacttttgttagaaaaggttatgacagcggaggcttgttccgcttttctttgaatgacatgtgtaataatcataatgttgtgaaccatattagcgagaatgatgagtctaatgtgtggcattcgcgactctgtcatgtgaatttcagttgtatgacgcgcttagctaacatgagtttaattccaaaattcactttgatcaaaggttccaagtgccatacttgtgttcaatcgaaacaacctcgcaagcctcacaaggcatctgaggcgaggaatttggcacctctagaacttgttcattccgatttgtgcgaaatgaacggcgtgttgactaaagggggaaagaaatatttcatgacactgatagatgattacactagattttgttatgtgtatatattgaaaagaaaggatgaagcattgcattactttaaaatctataaagctgaggtagaaaaccaacttgaaaggaaaatcaaacggttgaggtctgatagaggtgaggagtatttttctaatgagtttgcatccttttgcgaagagtttggaattatttatgagaggatgcctccctattcaccccaatcaaatggggtggccgaaagaaagaaccgtactctaactgagatggtgaatgccatgttagagactgcggggctttccaaggaatggtggggtgaggcagttttgactgcgtgtcatgtcctgaataaaatttcaatgaagcataaggaagtaacaccattcgaggaatgggaaaggaagaaattaaatctctcatacctacgaacatggggctgtttggccaagcactttgcaccgatagaacacaatgatcaaacgcctgagaaaaatcctgaggaggacaacattgtagacactcacaagagtaagagacaaagggttgcaaaatcctttggagatgactacattgtataccttgtggatgacaccccaagaaccatagaagagacatattcatctcctgacgctgactactggaaggaaataatggatgttaagacagctttcttaaacggagagctggaggaggagatctatatggatcaaccagacggccttaatgtgattgaggaggtcaaggactatctgtacaagagttttgaaatgaaggatttgggagaggctaatgttattcttaacatcaaactacaaagaggagatgagggtgggattacacttgtgcaatctcactatgtggacaaggttttgagtcgctttggatatagtgactgtaagccagctcctactccttgtgatcctagcgtgctattaaggaaaaaccgaagaatagtaagggatcaactgagatactctcaaatcattggttcattgatgtacttggctagtgcaacgaggcctgacatctcatttgctgtaagcaagctgagccggtttgtctcaaatccgggagatgatcattggcaggctctggaaagagtaatgcgctatctaaagggcactatgagctatggaattcactataccgggtattcaaaagtactagaagggtatattgactcaaactggatatctgatgctgatgagataaaagtcacaagtggatatgtgttcacacttggaggtggtgttgtttcctggaagtcttgcaagcagaccatcttaacaaggtcaacaatggaagcagaacttacagcactagatactgcgacagttgaggccgagtggcttcgtgaactcctgatggatttgccggtggttgaaaaaccagtgcgcgccagctatcctaatgaactatga

SEQ ID NO: 15379 - DNA, 897 bp, Oryza sativa
  Clone ID: TFbOSC33128j.C1.o1.fg
atgcagtgcttctatgtttcacggggcaaacgaagtgaaccacctctttctcctgaggaagaggctaagttcgaggcttcggattgcctgttccgtggagcattgatcagtgtactcgctgacaacatagtggacgtgtacatgcacatgccttctgggaaggacatgtgggatgcacttgaggccaagttcggagtttctgacgccggcagtgagctgtatgtcatggagcagttctatgactacaagatggtcgataaccgttctgtagtagaacaagctcatgagattcagatgctggctaaagaacttgagaacaacaactgtgagttgccggacaagtttgtggcgggtggcattattgccaaactaccaccttcttggtcggactttgccacttctctaaagcacaagagacaagagttcagtgtttctgatctcattggctctttgggtgttgaggagaaggcgagggcaaaggacgtgcggggcaaaaaggttgagggatgttctagtgccaatatggtacagaagaagaaccctcatgcatcccacaacaacaagaaagtcaagcctgatgtcaaacccaaggctgcaaccaattttaagaaaaaaggcaagggaaaggcaaagggagactgctttgtgtgtggcaagtctgggcattgggccaaggactgtcctgagcgcaaagacaggaagtctgccaacatggtcattagcgagggcggaggaacatcggggtacggttgggagaggttcctccttgttgatgggaaacgggtcgcttgcggctgttcatggtgttggtacggtcgatctgaagtttacttcgggaaagaccgtgcagctgaagaacgtgcagcatgtcccttcaataaagaagaatctagttag

SEQ ID NO: 15380 - DNA, 1419 bp, Oryza sativa
  Clone ID: TFbOSC400211j.C1.o1.fg
atgtctgcgcctggagccggtgccgctgctgctgctggaggagatggcggagatggtgcgccacctggagctgctgctggaggtggtgcaccaggagctggagccggtgccgcgaacaacaacaccaacggaggcagttctgcctcacaatccagcggagggccattctcagggtatatccttctcctattcctgttcttgttgttagcgctttattgctatgttcctgttcctgatattcatgatgcctctagcatgctaccgcgttactgctatgttcttcttcctgatattcataatgttgttcatgatgcctttagtatgctactggtaatgttacatgctgtcactagatcaccctacactgtttatgccatgattattgtcttaacattttggattaaaatatgccgatttatgaccatatttccaacaatccaaaaacctgataggtcattttcggtagttggctttgctgctgcactgaaaccacatgcttttgatggttctaattataagagatggaaagcacgtgcactattgtggttgacagcgatgcaatgcttctatgtttcacggggcaaacgaagtgaaccacctctttctcctgaggaagaggctaagttcgaggcttcggattatctgttccgtggagcattgatcagtgtacttactgacaacatagtggacgtgtatatgcacatgccttctgggaaggacatgtgggatgcacttgaggccaagttcggagtttctgacgccggcagtgagctgtatgtcatagagcagttctatgactacaagatggtcgatgaccgttctgtagtagaacaaactcatgagattcagatgctggctaaggaacttgagaacaacaactgtgagttgccggacaagtttgtggcaggtggcattattgccaaactgccaccttcttggtcggactttgccacttttctaaagcacaagagacaagagttcagtgagaaggcgagggcaaaggacgtccggggcaaaaaggttgagggaggttctagtgccaatatggtacagaagaagaaccctcatgcatcccgcaacaacaagaaagtcaagcctgatgtcaaacctaaggctgcaaccaactttaagaagaaaggcaagggaaaggcaaagggagactgctttgtgtgtggcaagtctgggcattgggccaaggactgtcctgagcgcaaagacaggaagtctgccaacatggtcattagcgagggcggaggaacatcggggtacggttgggagaggttcctccttgttgatgggaaacgggtcgcttgcggctgttcatggtgttggtacggtcgatctgaagtttacttcgggaaataccgtgcagctgaagaacgtgcagcatgtcccttcaataaagaagaatcttgttag

SEQ ID NO: 15381 - DNA, 3381 bp, Oryza sativa
  Clone ID: TFbOSC400297j.C1.o2.fg
atgcagtgcttctatgtttcacggggcaaacgaagtgaaccacctctttctcctgaggaagaggctaagttcgaggcttcggattgcctgttccgtggagcattgatcagtgtactcgctgacaacatagtggacgtgtacatgcacatgccttctgggaaggacatgtgggatgcacttgaggccaagttcggagtttctgacgccggcagtgagctgtatgttatggagcagttctatgactacaagatggtcgatgaccgttctgtagttgaacaagctcatgagattcagatgctggctaaggaacttgagaacaacaactgtgagttgccggacaagtttgtggcaggtggcattattgccaaactaccaccttcttggtcggactttgccacttctctaaagcacaacagacaagagttcagtgttcctgatctcattggctctttgggtgttgaggagaaggcgagggcaaaggacgtccagggcaaaaaggttgagggaggttctagtgccaatatggtacagaagaagaaccctcatgcatcccacaacaacaagaaagtcaagcctgatgtcaaacccaaggctgcaaccaattttaagaagaaaagcaagggaaaggcaaagggagactgctttgtgtgtggcaagtctgggcattgggccaaggactgtcctgagcgcaaagacaggaagtctgccaacatgatcattagcgagggcggaggaacatcggggtacggtaaaatattacctacagttctctctgtttttcattcacctgattggtgggtggacactggtgctaatattcatgtcaggagaggttcctccttgttgatgggaaacgggtcgcttgcggctgttcatggtgttggtacggtcgatctgaagtttacttcgggaaagaccgtgcagctgaagaacgtgcagcatgtcccttcaataaagaagaatctagttagcggctctctattgtgtagagaaggttttagacttgtgtttgagtccaataaatgtgtcgtatctaaatatgggacttttgttggaaaaggttatgatagcggaggcttgttccgcttttctttgaatgacatgtgtaataatcataatgctgtgaaccatattagcgagaatgatgagtctaatgatgaggcattgcatttctttaaaatctataaagctgagatagaaaaccaacttgaaaggaaaatcaaacggttgaggtctgatagaggtggggagtatttttccaatgagtttgcatccttttgcgaagagtttggaattattcatgagatgacgcctccctattcaccccaatcaaatggggtggccgaaagaaagaaccgtactctaactgagatggtgaatgccatgttagacactgcggggctttccaaggaatggtggggtgaggcagttttgactgcgtgtcatgtcctgaataaaattccaatgaagcataaggaagtaacaccattcgaggaatgggaaaggaagaaattaaatctctcatacctacgaacatggggctgtttggccaaggtaaatgtacctatagccaaaaaacggaaacttggaccaaaaactgttgattgtgtgtttcttggttatgctatccacagtgtgggttatagattcttaatagtaaactctggagtacccgacatgcatgttggtacaattcttgagtccagagatgctacattctttgagaatgaatttcctatgaaatatacacctagcacttctagtaaagaaacaatcatgccccatgagcactttgcaccgatagaacacaatgatcaaacgcctgaggaaaatcctgaggaggacaacattgtagatactcgcaagagtaagagacaaagggttgcaaaatcctttggagatgactacattgtatacctcgtggatgacaccccaagaaccatagaagaggcatattcatctcctgacgctgactactggaaggaagcagtacgcagtgaaatggactcgattatgtctaatggtacttgggaagtcgttgagcgtccatatgggtgcaagcccgtaggatgcaaatgggttttcaagaaaaagcttaggcctgatggtacaatcgaaaagtacaaggcaaggcttgtggccaagggttatacccaaaaggaaggcgaggacttcttcgacacatactcaccagttgctcgcttgaccacgattcgagtactacttgctctggcagcctctcatggtcttctcgtccatcagatggacgttaagacagctttcctaaacggagagctggaggaggagatctatatggatcaaccagacgggtatgtactagaaggtcaggagggaatggtgtgtaaactattgaaatccttgtatggcctcaagcaagcacctaagcaatggcatgagaagtttgacaccacgcttacatctgcaggctttgttgtgaacgaagctgacaaatgtgtatactatcgctatggtgggggagaagtggtgatcttgtgcttatatgtcgatgacatactgatctttgggaccagccttaatgtgattgaggaggtcaaagactatctgtccaagagttttgaaatgaaagatttgggagaggctgatgttattcttaacatcaaactacaaagaggagatgagggtgggattacacttgtgcaatcctactatgtggacaaggttttgagtcgctttggatatagtgactgcaagccagctcctactccttatgatcccagcgtgctattaaggaaaaaccgaagaatagcaagggatcagttgagatactctcaaatcattggttcattgatgtacttggctagcgcaacgaggcctgacatctcatttgctgtaagtaagctgagccggtttgtctcaaatccgggagatgatcattggcagactctggaaagagtaatgcgctatctaaagggtactatgagctatggaattcactataccgggtatccaaaagtactagaagggtatagtgactcaaactggatatctgatgctgatgagataaaagccacaagtggatatgtgttcacacttggaggtggcgctgtttcctggaagtcttgcaagcagaccatcttaacgaggtcaacaatggaagcagaacttacagcactagatactgcgacagttgaggccgagtggcttcgtgaactcctgatggatttgccggtggttgaaaaaccagtgccagctatcctaatgaactgcgataatcaaacagtgattattaaagtgaacagttcaaaggacaacatgaagtcatctagacacatcaagagaagactgaaatctgtcagaaagcagaaaaactccggagtgatagcattggactatgtctaa

SEQ ID NO: 15382 - DNA, 3894 bp, Oryza sativa
  Clone ID: TFbOSC400466j.C1.o5.fg
atgtctggagttgccaccgccactgctggcggaggtggtacgccgccgacaggagctcgatccggagctggtgcgccaggaggtgccgtgaacgacaacaacaacggaggcaattctgcctcaccatccagcggagggagtgcctcccgtacgactgctcatcgccatgtctggagttgccaccgccactgctggcggaggtggtcattttcggtagttggctttgctgctgcactgaaaccacatgcttttgatggttcaaactataagagatggaaagcacgtgcactattgtggttgacagcgatgcagtgcttctatgtttcacggggcaaacgaagtgaaccacctctttctcctgaggaagaggctaagttcgaggcttcggattgcctgttccgtggagcattgatcagtgtactcgctgacaacatagtggacgtgtacatgcacatgccttctgggaaggacatgtgggatgcacttgaggccaagttcggagtttctgacgccggcagtgagctgtacgtcatggagcagttctatgactacaagatggtcgatgaccattctgtagtggaacaagctcatgagattcagatgctggctaaggaacttgagaacaacaactgtgagttgccggacaagtttgtggcgggtggcattattgccaaactaccaccttcttggtcggactttgccacttctctaaagcacaagagacaagagttcagtgttcctgatctcattggctctttgggtgttgaggagaaggcgagggcaaaggacgtccggggcaaaaaggttgagggaggttctagtgccaatatggtacagaagaagaaccctcatgcatcccacaacaacaagaaagtcaagcctgatgtcaaacccaaggctgcaaccaattttaagaagaaaggcaagggaaaggcaaagggagactgctttgtgtgtggcaagtctgggcattgggccaaggactgtcctgagcgcaaagataggaagtctgccaacatggtcattagcgagggcggaggaacatcggggtacggtaaaatgttacctacagttctctctgtttatcattcacctgattggtgggtggacactggtgctaatattcatatatgtgctgacatttctctgttttcttcttatcaggtcgggagaggttcctccttgttgatgggaaacgggtcgcttgcggctgttcatggtgttggtacggtcgatctgaagtttacttcgggaaagaccgtgcagctgaagaacgtgcagcatgtccctttaataaagaagaatctagttagcggctctctattgtgtagagaaggttttagacttgtgtttgagtccaataaatgtgtcgtatctaaatatgggacttttgttggaaaatgttatgacagcggaggcttgttccgcttttctttgaatgacatgtgtaataatcataatgctgtgaaccatattagcgagaatgatgagtctaatgtgtggcattcgcgactctgtcatgtgaatttcggttgtatgacgcgcttagctaacatgagtttaattccaaaattcactttggtaaaaggttccaagtgccatacttgtgttcaatcgaaacaacctcgcaagcctcacaaggcatctgaggcgaggaatttggcacctctagaacttgttcattccgatttgtgcgaaatgaacggcgtgttgactaaagggggaaagaaatatttcatgacactgatagatgattgcactagattttgctatgtgtatctattgaaaacaaaggatgaggcattgcattactttaaaatctataaagctgaggtagaaaaccaacttgaaaggaaaatcaaacggttgaggtctgatagaggtggggagtatttttccaatgagtttgcatccttttgcgaagagtttggaattattcatgagatgacgcctccctattcaccccaatcaaatggggtggccgaaagaaagaaccgtactctaactgagatggtgaatgccatgttagacactgcggggctttccaaggaatgtgtgggttatagattcttaatagtaaactctggagtacccgacatgcatgctggtacaattcttgagtccagagatgctacattctttgagaatgaatttcctatgaaatatacacctagcacttctagtaaagaaactgtcatgccccatgagcactttgcaccgatagaacacaatgatcaaacgcctgaggaaaatcctgaggaggacaacattgtagatactcgcaagagtaagagacaaagggttgcaaaatcctttggagatgactacattgtatacctcgtggatgacaccccaagaaccatagaagaggcatattcatctcctgacgctgactactggaaggaagcagtacgcagtgaaatggactcgattatgtctaatggtacttgggaagtggttgagcgtccatatgggtgcaagcccgtaggatgcaaatgggttttcaagaaaaagcttaggcctgatggtacaatcgaaaagtacaaggcaaggcttgtggccaagggttatacccaaaagaaaggcgaggacttcttcgacacatactcaccagttgctcgcttgaccacgattcgagtactacttgctctggcagcctctcatggtcttctcgtccatcagatggacgttaagacagctttcctaaacggagagctggaggaggagatctatatagatcaaccagacgggtatgtactagaaggtcaggagggaatggtgtgtaaactattgaaatccttgtatggcctcaagcaagcacctaagcaatggcatgagaagtttgacaccacgcttacatctgcaggctttgttgtgaacgaagctgacaaatgtgtatactatcgctatggtgggggagaaggggtgatcttgtgcttatatgtcgatgacatactgatctttgggaccagccttaatgtgattgaggaggtcaaagactatctgtccaagagttttgaaatgaaggatttgggagaggctgatgttattcttaacatcaaactacaaagaggagatgagggtgggattacacttgtgcaatcccactatgtggacaaggttttgagtcgctttggatatagtgactgcaagccagctcctactccttatgatcccagcgtgctattaaggaaaaaccgaagaatagcaagggatcagctgagatactctcaaatcattggttcattgatgtacttggctagcgtaacgaggcctgacatctcatttgctgtaagcaagctgagccggtttgtcacaaatccgggagatgatcattggcaagctttggaaagagtaatgcgctatctaaagggcactatgagctatggaattcactataccgggtatccaaaagtactagaagggtatagtgactcaaactggatatctgatgctgatgagataaaagccacaagtggatatgtgttcacacttggaggtggcgctgtttcctggaagtcttgcaagcagaccatcttaacgaggtcaacaatggaagcagaactaacagcactagatactgcgacagttgaggccgagtggcttcgtgaactcctgatggatttgccggtggttgaaaaaccagtgccagctatcctaatgaactgcgataatcaaacagtgattattaaagtgaacagttcaaaggacaacatgaagtcatctagacacatcaagagaagactgaaatctgtcagaaagcagaaaaactccggggtgatagcattggactatgtccaaacggctagaaatctggcatatcagtttaccaaggggctaccacgtaatgtgatagacagtgcatcgagggaaatgggcttgatacccacctaa

SEQ ID NO: 15383 - DNA, 4362 bp, Oryza sativa
  Clone ID: TFbOSC400483j.C1.o5.fg
atgtctggagttgctgctgccgccgctaccggcggaggtggtacgccgccgccgacaggagctggtgcgccgccgccgacaggagctggtgcgccaggaggaggtgccgtgaacgactacaacaacggaggcaattctgcctcaccatccagcggagggccattctcggggtataatcttctcctcctgctactgctgttagcgctattcctgttcccattgttagcgctatactgtgtgcgctatgttcttgttcctattctacgtgatgcctctagcatgttatcgcgttactggtatgttcctgtttctgacattcatgatgcgcatagtatgctactggttatgttaagattaccctacactgcttatgccatgatcattgtttcaatttcttggattaaaatatgccgaataatgactatatttccaacaatccaaaaacctgataggtcattttcggtagttggctttgctgctgcactgaaaccacatgcttttgatggttcaaactataagagatggaaagcacgtgcactattgtggttgacagcgatgcagtgcttctatgtttcacggggcaaacgaagtgaaccacctctttctcctgaggaagaggctaagttcgaggcttcggattgcctgttccgtggagcattgatcagtgtactcgctgacaacatagtggacgtgtacatgcacatgccttctgggaaggacatgtgggatgcacttgaggccaagttcggagtttctgacgccggcagtgagctgtatatcatggagcagttctatgactacaagatggtcgatgaccgttctgtagtagaacaagctcatgagattcagatgctggctaaggaacttgagaacaacaactgtgagttgccggacaagtttgtggcgggtggcattattgccaaactaccaccttcttggtcggactttgccacttctctaaagcacaagagacaagagttcagtgttcctgatctcattggctctttgggtgttgaggagaaggcgagggcaaaggacgtccggggcaaaaaggttgagggaggttctagtgccaatatggtacagaagaagaaccctcatgcatcccacaacaacaagaaagtcaagcctgatgtcaaacccaaggctgcaaccaattttaagaagaaaggcaagggaaaggcaaagggagactgctttgtgtgtggcaagtctgggcattgggccaaggactgtcctgagcgcaaagacaggaagtctgccaacatgatcattagcgagggcggaggaacatcggggtacggtaaaatattacctacagttctctctgtttttcattcacctgattggtgggtggatactggtgctaatattcatgtatgtgctgacatttctctgttttcttcttatcaggtcgagagaggttcctccttgttgatgggaaacgggtcgcttgcggctgttcatggtgttggtacggtcgatctgaagtttacttcgggaaagaccgtgcagctgaagaacgtgcagcatgtcccttcaataaagaagaatctagttagcggctctctattgtgtagagaaggttttagacttgtgtttgagtccaataaatgtgtcgtatctaaatatgggacttttgttggtaaaggttatgacagcggaggcttgttccgcttttctttgaatgacatgtgtaataatcataatgctgtgaaccatattagcaagaatgatgagtctaatgtgtggcattcgcgactctgtcatgtgaatttcggttgtatgacgcgcttagctaacatgagtttaattccaaaattcactttggtcaaaggttccaagtgccatacttgtgttcaatcgaaacaacctcgcaagcctcacaaggcatctgaggcgaggaatttggcacctctagaacttgttcattccgatttgtgcgaaatgaacggcatgttgactaaagggggaaagaaatatttcatgacactgatagatgattgcactagattttgctatgtgtatctattgaaaacaaaggatgaggcattgcattactttaaaatctataaagctgaggtagaaaaccaacttgaaaggaaaatcaaacggttgaggtctgatagaggtggggagtatttttctaatgagtttgcatccttttgcgaagagtttggaattattcatgagatgacgcctccctattcaccccaatcaaatggggtggccgaaagaaagaaccgtattctaactgagatggtgaatgccatgttagacactgcggggctttccaaggaatggtggggtgaggcagttttgactgcgtgtcatgtcctgaataaaattccaatgaagcataaggaagtaacaccattcgaggaatgggaaaggaagaaattaaatctctcatacctacgaacatggggctgtttggccaaggtaaatgtacctatagtcaaaaagcggaaacttggaccaaaaactgttgattgtgtgtttcttggttatgctatccacagtgtgggttatagattcttaatagtaaactttggagtacccgacatgcatgctgctacaatttttgagtccagagatgctacattctttgagaatgaatttcttatgaaatatacacctagcacttctagtaaagaaactgtcatgctccatgagcactttgcaccgatagaacacaatgatgaaacgcctgaggaaaatcctgaggaggacaacattgtagatactcgcaagagtaagagacaaagggttgcaaaatcctttggagatgactacattgtatacctcgtggatgacaccccaagaaccatagaagaggcatattcatctcctgacgctgactactggaaggaagcagtacgcagtgaaattgactcgattatatctaatggtacttgggaagtcgttgagcgtccatatgggtgcaagcctgtaggatgcaaatgggttttcaagaaaaagcttaggcctgatggtacaatcgaaaagtacaaggcaaggcttgtggccaagggttatacccaaaaggaaggcgaggatttcttcgacacatattcaccagttgctcgcttgactacgattcgagtactacttgctctggcagcctctcatggtcttctcgtccatcagatggacgttaagacagctttcctaaacggagagctggaggaggagatctatatggatcaaccagacgggtatgtactagaaggtcaggagggaatggtgtgtaaactattgaaatccttgtatggcctcaagcaagcacctaagcaatggcatgagaagtttgacaccacgcttacagctgcaggctttgttgtgaacgaagctgacaaatgtgtatactatcgctatggtgggggagaaggggtgatcttgtgcttgtatgtcgatgacatactgatctttgggaccagtcttaatgtgattgaggaggtcaaagactatctgtccaagagttttgaaatgaaggatttgggagaggctgatgttattcttaacatcaaattacaaagaggagatgagggtgggattacacttgtgcaatcccactacgtggacaaggttttgagtcgctttggatatagtgactgcaagccagctcctactccttatgatcccagcgtgctattaaggaaaaatcgaagaatagcaagggatcaactgagatactctcaaatcattggttcattgatgtacttggctagcgcaacgaggcctgacatctcatttgctgtaagcaagctgagctggtttgtctcaaatccgggagatgatcattggcaggctctggaaagagtaatgcgctatctaaagggcactatgagctatggaattcactataccgggtatccaaaagtactagaagggtatagtgactcaaactggatatctgatgctgatgagataaaagccacaagtggatatgtgttcacacttggaggtggcgctgtttcctggaagtcttgcaagcagaccatcttaacgaggtcaacaatggaagcagaacttacagcactagatactgcgacagttgaggccgagtggcttcgtgaactcctgatggatttgccggtggttgaaaaaccagtgccagctatcctaatgaactgcgataatcaaacagtgattattaaagtgaacagttcaaaggacaacatgaagtcatctagacacatcaagagaagactgaaatctgtcagaaagcagaaaaactccggagtgatagcattggactatgtccaaacggctagaaatctggcagaccagtttaccaaggggctaccacgtaatgtgatagacagtgcatcgagggaaatgggcttgatacccacctaa

SEQ ID NO: 15384 - DNA, 3867 bp, Oryza sativa
  Clone ID: TFbOSC400500j.C1.o54.fg
atggcgcacctggagctggagccggagccggtgccgggaacgtcaacaccaatggaggcaattctgcctcacaatccagtagagggccattctcggggtatatccttcctcctgctcctgttgttagcgctattaatcttgttagtcgcaacttgctatgttcctgttcctgatgttcatgatgcctatagcatactagttatgttacatgttcctgttcctgatgttcatgcctttagcatactactggttatgttatatgttgtcactagatcatcctacactgttcatgccatgattattgtcttaacgttttggattaaaatatgccaatatatgaccatatttccaacaatccaaaaacctgataagtcattttcggtagttggctttgatgctgcactgaaaccacatgcttttgatggttctaactataagagatgtaaagcacgtgcactattgtggttgacagcgatgcaatgcttctatgtttcacggggcaaacgaagtgaaccacctctttctcctgaggaagaggctaagttcgaggcttcggattgcctgttctgtggagcattgatcagtgtactcgctgacaacatagtggacgtgtacatgcacatgccttccgagaaggacatgtgggatgcacttgaggccaagttcggagtttctgacgccggcagtgagctgtatgtcatggagcagttctatgactacaagatagtcgatgaccgttctgtacacaagagacaagagttcagtgtttctgatctcattggctctttgggtgttgaggagaaggcgagggcaaaggacgtccggggcaaaaaggttgagggaggttctagtgctaatatggtacagaggaagaaccctcatgcatcccacaacaacaagaaagtcaagcctgatgtcaaacccaaggctgcaaccaactgtaagaagaaaggcaagggaaaggcaaagggagactgctttgtgtgtggcaagtctgggcattgggccaaggactgtcctgagtgcaaagacaggaagtctgccaacatggtcattagcgagggcggaggaacatcggggtacggtaaaatattacctacagttctctctgtttttcacccacctgattggtgggtggatactggtgctaatattcatgtcgagagaggttcctccttgttgatgggaaacgggtcgcttgcggctgttcatggtgttggtacggtcaatctgaagtttacttcgggaaagaccgtgcagctgaagaacgtgcagcatgtcccttcaataaagaagaatcttgttagcggctctctattgtgtagagaaggttttagacttatgtttgagtccaataaatgtgtcgtatctaaatatgagacttttgttggaaaaggttatgacagcggaggcttgttccgcttttttttgaatgacatgtgtaataatcataatgttgtgaaccatattagcgagaatgatgagtctaatgtgtggcattcgcgactctgtcatgtgaatttcggttgtatgacgcgcttagctaacattagtttaattccaaaattcactttggtcaaaggttccaagtgccatacttgtgttcaatcgaaacaacctcgcaagactcacaaggcatctgaggcgaggaatttggcacctctagaatttgttcattccgatttgtgcgaaatgaacggcgtgttgactaaaggtggaaagaaatatttcatgacactgatagatgattgcactagattttgttatgtgtatgtattgaaaacaaaggatgaaacattgcattactttaagatctataaagctgaggtagaaaaccaacttgaaaggaaaatcaaacggttgaggtttgatagaggtggggagtatttttccaataagtttgcatccttttgcgaagagtttggaattattcatgagaggacgcctccctattcaccccaatcaaatggggtggccgaaagaaagaaccgtactctaactaagatggtgaatgccatgttaggcactgcggggctttccaaggaatggtggggtgaggcagttttgactgtgtgtcatgtcctgaacaaaattccaatgaagcataaggaagtaacaccattcgaggaatgggaaaggaagaaatcaaatctctcatacctacgaacatggggctgtttggctaaggtaaatgtacctatagccaaaaagcgaaaacttggaccaaatactgttgattgtgtgttccttggttatgctattcacagtgtgggttatagattcttaatagtaaactctggagtacctgacatgcatgttggtacaattattgagtccagagatgctacattcttcgagaatgaatttcccatgaaacatacacctagcacctctagtcaagaaactgtcatgtcccatgagtactttgcaccgatagaacacgatgatcaaacgcctgaggaaaatcctaatgaggacaacattatagatactcgcaagagtaagagacaaagggttgcaaaatcctttggagatgactacattgtatacctcgtggatgacaccctaagaaccatagaagaggcatattcatctcctgacgctgactactggaaggaagcagtacacagtgaaatggactcgattatgtctaatggtacttgggaagtcgttgagcgtccatatgggtgcaagcccgtaggatgcaaatgggttttcaagaaaaagcttaggcctatgatggacgttaagacagctttcctaaacgaagagctggaggaggagatctatatggatcaaccagacgggtatgtactagaaggtcaggagggaatggtgtgtaaactgttgaaatccttgtatggcctcaagcaagcacctaagcaatggcatgagaagtttgacactacgcttacatctgcaggctttgttgtgaatgaagctgacaaatgtgtgtactatcgctatggtgggggagaaggagtaatcttgtgcttatatgtcgatgacatattgatctttggaaccagcttcaatgtgattgaggaggtcaaggactatctgttcaagagttttgaaatgaaggatttgggagaggctgatgttattcttaacatcaaactacaaagaggagatgagggtgggattacacttgtgcaatcccactatgtggacaaggttttgagtcgctttggatatagtgactgcaagccagctcctactccttatgatcccaacgtgctattgagaaaaagccgaagaatagcaagggatcaactgagatactctcaaatcattggttcattgatgtacttggctagtgcaacgaggcctgacatctcatttgctgtaagcaagctgagccggtttgtctcaaatccgggagatgatcattggcaggctctggaaagagtaatgcgctatctaaagggcactatgagctatggaattcactataccgggtatctaaaagtactagaagggtatagtgactcaaactggatatctgatgctgatgagataaaagccacaagtggatatgtgttcacacttggaggtggcgttgtttcctggaagtcttgcaagcagaccatcttaacgaggtcaacaatagaagcagaacttatagcactagatactgcgatagttgaggccgagtggcttcgtgaactcctgatagatttgccggtggttgaaaaaccagtgccagctatcctaatgaactgtgataatcaaacagtgattattaaagtgaacaattcaaaggacaatatgaagtcatctaggcatatcaagagaagactgaaatctgtcagaaagcaaaaaaaactccggagtgatagcattggactatgtccaaacggctaa

SEQ ID NO: 15385 - DNA, 2898 bp, Oryza sativa
  Clone ID: TFbOSC400506j.C1.o17.gm
atggctcttcttggcaagactagttgcaaggctgccgtgttcttggcagctctagtggtcatggctactgctttttcatcctctcatgctgcccaaggacaagacgggcgggcgatcaggtttttggggagcgcaaggcgcgactactcactgttcgtcaacatctacttcatcttcaccaacatgtcgaacactggagacaaggagaaggagactccctgcttctatgtttcacggggcaaacgaagtgaaccacctctttctcctgaggaagaggctaagttcgaggcttcggattgcctgtttcgtggagcattgatcagtgtactcgctgacaacatagtggacgtgtacatgcacatgccttctgggaaggacatgtgggatgcacttgaggccaagttcggaatttctgacgccggcagtgagctgtatgttatggagcagttctatgattacaagatggtcgatgaccgttctgtagttgaacaagctcatgagattcagatgctggctaaggaacttgagaacaacaactgtgagttgccggacaagtttgtggcaggtgacattattgccaaactaccaccttcttggtcggactttgccacttctctaaagcacaagagacaagagttcagtgttcctgatctcattggctctttgggtgttgaggagaaggcgagggcaaaggacgtccggggcaaaaaggttgagggaggttctagtgccaatatggtacagaagaagaaccctcatgcatcccacaacaacaagaaagtcaagcctgatgtcaaacccaaggctgcaaccaattttaagaagaaaagcaagggaaaggcaaagggagactgctttgtgtgtggcaagtctgggcattgggccaaggactgtcctgagcgcaaagacaggaagtctgccaacatgatcattagcgagggcggaggaacatcggggtacggtcgggagaggttcctccttgttgatgggaaacgggtcgcttgcggctgttcatgtgtgggttatagattcttaatagtaaactctggagtacccgacatgcatgttggtacaattcttgagtccagagatgctacattctttgagaatgaatttcctatgaaatatacacctagcacttctagtaaagaaactgtcatgccccatgagcactttacaccgatagaacataatgatcaaacgcctgaggaaaatcctgaggaggacaacattgtagatactcgcaagagtaagagacaaagggttgtaaaatcctttggagatgactacattgtatacctcgtggatgacaccccaagaaccatagaagaggcatattcatctcctgacgctgactactggaaggaagcagtacgcagtgaaatggactcgattatgtctaatggtacttgggaaatcgttgagcgtccatatgggtgcaagcccgtaggatgcaaatgggttttcaagaaaaagcttaggcctgatggtacaatcgaaaagtacaaggcaaggcttgtggccaagggttatacccaaaaggaaggcgaggacttcttcgacacatactcaccagttgctcgcttgaccacgattcgagtactacttgctctggcagcctctcatggtcttctcgtccatcagatggacgttaagacagctttcctaaacggagagctggaggaggagatctatatggatcaaccagacgggtatgtactagaaggtcaggagggaatggtgtgtaaactattgaaatccttatatggcctcaagcaagcacctaagcaatggcatgagaagtttgacaccacgcttacatctgcaggctttgttgtgaacgaagctgacaaatgtgtatactatcgctatggtgggggagaaggggtgatcttgtgcttatatgtcgatgacatactgatctttgggaccagccttaatgtgattgaggaggtcaaagactatctgtccaagagttttgaaatgaaggatttgggagaggctgatgttattcttaacatcaaactacaaagaggagatgagggtgggattacacttgtgcaatcccactatgtggacaaggttttgagtcgctttggatatagtgactgcaagccagctcctactccttatgatcccagcgtgctattaaggaaaaaccgaagaatagcaagggatcagctgagatactctcaaatcattggttcattgatgtacttggctagcgcaacgaggcctgacatctcatttgctgtaagcaagctgagccggtttgtctcaaatccgggagatgatcattggcaggctctggaaagagtaatgcgctatctaaagggtactatgagctatggaattcactataccgggtatccaaaagtactagaagggtatagtgactcaaactggatatctgatgctgatgagataaaagccacaagtggatatgtgttcacacttggaggtggcgctgtttcctggaagtcttgcaagcagaccatcttaacgaggtcaacaatggaagcagaacttacagcactagatactgcgatagttgaggccgagtggcttcgtgaactcctgatggatttgccggtggttgaaaaaccagtgccagctatcctaatgaactgcgataatcaaacagtgattattaaagtgaacagttcaaaggacaacatgaagtttttggggagcgcaaggcgcgactactcactgttcgtcaacatctacttcatcttcaccaacatgtcgaacactggagacaaggagaaggagactcccgtcaacaccaacggaggcaatactgcctcaaactccagcggaggaccattcttgggctttgcctccacggcggttaaacaatgcaatgcgtgcgtcgagtgtggggagtcgaggtag

SEQ ID NO: 15386 - DNA, 3807 bp, Oryza sativa
  Clone ID: TFbOSC400569j.C1.o8.fg
atgcagtgcttctatgtttcacggggcaaacgaagtgaaccacctctttctcctgaggaagaggctaagttcgaggcttcggattgcctgttccgtggagcattgatcagtgtactcgctgacaacatagtggacgtgtacatgcacatgccttctgggaaggacatgtgggatgcacttgaggccaagttcggagtttctgatgccggcagtgagctgtatgttatggagcagttctatgactacaagatggtcgatgaccgttctgtagttgaacaagctcatgagattcagatgctggctaaggaacttgagaacaacaactgtgagttgccggacaagtttgtggcaggtggcattattgccaaactaccaccttcttggtcggactttgccacttctctaaagcacaagagacaagagttcagtgttcctgatctcattggctctttgggtgttgaggagaaggcgagggcaaaggacgtccgggggaaaaaggttgagggaggttctagtgccaatatggtacagaagaagaaccctcatgcatcccacaacaacaagaaagttaagcctgatgtcaaacccaaggctgcaaccaattttaagaagaaaagcaagggaaaggcaaagggagactgctttgtgtgtggcaagtctgggcattgggccaaggactgtcctgagcgcaaagacaggaagtctgccaacatgatcattagcgagggcggaggaacatcggggtacggtaaaatactacctacagttctctctgtttttcattcacctgattggtgggtggacactggtgctaatattcatgtatgtgctgacatttctctattttcttcttatcaggtcgggagaggttcctccttgttgatgggaaacgggtcgcttgcggctgttcatggtgttggtacggtcgatctgaagtttacttcgggaaagaccgtgcagctgaagaacgtgcagcatgtcccttcaataaagaagaatctagttagcggctctctattgtgtagagaaggttttagacttgtgtttgagtccaataaatgtgtcgtatctaaatatgggacttttgttggaaaaggttatgacagcggaggcttgttccgcttttctttgaatgacatgtgtaataatcataatgctgtgaaccatattagcgagaatgatgagtctaatgtgtggcattcgcgactctgtcatgtgaatttcggttgtatgacgcgcttagctaacatgagtttaattccaaaattcactttggtaaaaggttccaagtgccatacttgtgttcaatcgaaacaacctcgcaagcctcacaaggcatctgaggcgaggaatttggcacctctagaacttgttcattccgatttgtgcgaaatgaacggcgtgttgactaaagggggaaagaaatatttcatgacactgatagatgattgcactagattttgctatgtgtatctattgaaaacaaaggatgaggcattgcatttctttaaaatctataaagctgaggtagaaaaccaacttgaaaggaaaatcaaacggttgaggtctgatagaggtggggagtatttttccaatgagtttgcatccttttgcgaagagtttggaattattcatgagatgacgcctccctattcaccccaatcaaatggggtggccgaaagaaagaaccgtactctaactgagatggtgaatgccatgttagacagtgcggggctttccaaggaatggtggggtgaggcagttttgactgcgtgtcatgtcctgaataaaattccaatgaagcataaggaagtaacaccattcgaggaatgggaaaggaagaaattaaatctctcatacctacgaacatggggctgtttggccaaggtaaatgtacctatagccaaaaagcggaaacttggaccaaaaactgttgattgtgtgtttcttggttatgctatccacagtgtgggttatagattcttaatagtaaactctagagtacccgacatgcatgttggtacaattcttgagtccagagatgctacattctttgagaatgaatttcctatgaaatatacacctagcacttctagtaaagaaactgtcatgccccatgagcactttgcaccgatagaacacaatgatcaaacgcctgaggaaaatcctgaggaggacaacattgtagatactcgcaagagtaagagacaaagggttgcaaaatcctttggagatgactacattgtatacctcgtggatgacaccccaagaaccatagaagaggcatattcatctcctgacgctgactattggaaggaagcagtacgcagtgaaatggactcgattatgtctaatggtacttgggaagtcgttgagcgtccatatgggtgcaagcccgtaggatgcaaatgggttttcaagaaaaagcttaggcctgatggtacaatcgaaaagtacaaggcaaggcttgtggccaagggttatacccaaaaggaaggcgaggacttcttcgacacatactcaccagttgctcgcttgaccacgattcgagtactacttgctctggcagcctctcatggtcttctcgtccatcagatggacgttaagacagctttcctaaacggagagctggaggaggagatctatatggatcaaccagacgggtatgtactagaaggtcaggagggaatggtgtgtaaactattgaaatccttgtatggcctcaagcaagcacctaagcaatggcatgagaagtttgacaccacgctttcatctgtaggctttgttgtgaacgaagctgacaaatgtgtatactatcgctatggtgggggagaaggggtgatcttgtgcttatatgtcgatgacatactgatctttgggaccagccttaatgtgattgaggaggtcaaagactatctgtccaagagttttgaaatgaaagatttgggagaggctgatgttattcttaacatcaaactacaaagaggagatgagggtgggattacacttgtgcaatcccactatgtggacaaggttttgagtcgctttggatatagtgactgcaagccagctcctactccttatgatcccagcgtgctattaaggaaaaaccgaagaatagcaagggatcagctgagatactctcaaatcattggttcattgatgtacttggctagcgcaacgaggcctgacatctcatttgctgtaagcaagctgagccggtttgtctcaaatccgggagatgatcattggcaggctctggaaagagtaatgcgctatctaaagggtactatgagctatggaattcactataccgggtatccaaaagtactagaagggtatagtgactcaaactggatatctgatgctgatgagataaaagccacaagtggatatgtgttcacacttggaggtggcgctgtttcctggaagtcttgcaagcagaccatcttaacgaggtcaacaatggaagcagaacttatagcactagatactgcgacagttgaggccgagtggcttcgtgaactcctgatggatttgccggtggttgaaaaaccagtgccagctatcctaatgaactgcgataatcaaacagtgattattaaagtgaacagttcaaaggacaacatgaagtcatctagacacatcaagagaagactgaaatctgtcagaaagcagaaaaactccggagtgatagcattggactatgtccaaacggctagaaatctagcagatcagtttaccaaggggctaccacgtaatgtgatagacagtgcatcgagggaaatgggcttgatacccacctaa

SEQ ID NO: 15387 - DNA, 4158 bp, Oryza sativa
  Clone ID: TFbOSC400615j.C1.o31.fg
atgtctggagttgctgccgccactgctggcggaggtggtacgccgccgccgacaggagctggatctggatccggagctggtgcgccaggaggaggtgccgtgaacgactacaacaacggaggcaattctgcctcaccatccagcggagagccattctcggggtataatcttctcctcctgctactgctgttagcgctattcatgttcccattgttagcgctatactatgtgcgctatgttcttgttcctgttctacatgatgcctctagcatgttatcgcgttactggtatgttcctgttcctgacattcatgatgcgcatagtatgctactggttatgttaagatcaccctacactgcttatgccatgatcattgtttcattttcttggattaaaatatgtcgattaatgactatatttccaacaatccaaaaacctgataggtcattttcggtagttggctttgctgctgcactgaaaccacatgcttttgatggttcaaactataagagatggaaagcacgtgcactattgtggttgacagcgatgcagtgcttctatgtttcacggggcaaacgaagtgaaccacctctttctcctgaggaagaggctaagttcgaggcttcggattgcctgttccgtggagcattgatcagtgtactcgctgacaaaatagtggacgtgtacatgcacatgccttctgggaaggacatgtgggatgcacttgaggccaagttcggagtttctgacgccggcagtgagctgtatgtcatggagcagttctatgactacaagatggtcgatgaccgttctgtagtagaacaatctcatgagattcagatgctggctaaggaacttgagaacaacaactgtgagttgccggacaagtttgtggcgggtggcattattgccaaactaccaccttcttggtcggactttgccacttctctaaagcacaagagacaagagttcagtgttcctgatctcattggctctttgggtgttgaggagaaggcgagggcaaaggacgtccggggcaaaaaggttgagggaggttctagtgccaatatgaagaaaggcaagggaaaggcaaagggagactgctttgtgtgtggcaagtctgggcattgggccaaggactgtcctgagcgcaaagacaggaagtctgccaacatgatcattagcgagggcggaggaacatcggggtatgtcgggagaggttcctccttgttgatgggaaacgggtcgcttgcggctgttcatagtgttggtatggtcgatctgaagtttacttcgggaaagaccgtgcagctgaagaacgtgcagcatgtcccttcaataaagaagaatctagttaacggctctctattgtgtagagaaggttttagacttgtgtttgagtccaataaatgtgtcgtatctaaatatgggacttttgttggaaaaggttatgacagcggaggcttgttccgcttttctttgaatgacatgtgtaataatcataatgctgtgaaccatattagcgagaatgatgagtctaatgtgtggcattcgcgactctgtcatgtgaatttcggttgtatgacgcgcttagctaacatgagtttaattccaaaattcactttggtcaaaggttccaagtgccatacttgtgttcaatcaaaacaacctcgcaagcctcacaaggcatctgaggcgaggaatttggcacctctagaacttgttcattccgatttgtgcgaaatgaacggcgtgttgactaaagggggaaagaaatatttcatgacactgatagatgattgcactagattttgctatgtgtatctattgaaaacaaaggatgaggcattgcattactttaaaatctataaagctgaggtagaaaaccaacttgaaaggaaaatcaaacggttgaggtctgatagaggtggggagtatttttccaatgagtttgcatccttttgcgaagagtttgaaattattcatgagatgacgcctccctattcaccccaatcaaatggggtggccgaaagaaagaaccgtactctaactgagatggtgaatgccatgttagatactgcggggctttccaaggaatggtggggtgaggcagttttgactgcgtgtcatgtcctgaataaaattccaatgaagcataaggaagtaacaccattcgaggaatgggaaaggaagaaattaaatctctcatacctacgaacatggggctgtttggccaaggtaaatgtacctatagccaaaaagcagaaacttggaccaaaaactgttgattgtgtgtttcttggttatgctatccacagtgtgggttatagattcttaatagtaaactctggagtacccgacatgcatgctggtacaattcttgagtccagagatgctacattctttgagaatgaatttcctatgaaatatacacctagcacttctagtaaagaaactgtcatgccccatgagcactttgcaccgatagaacacgatgatcaaacgcctgaggaaaatcctgaggaggacaacattgtagatactcgcaagagtaagagacaaagggttgcaaaatcttttggagatgactacattgtatacctcgtggatgacaccccaagaaccatagaagaggcatattcatctcctgacgctgactactggaaggaagcagtacgcagtgaaatgaactcgattatgtctaatggtacttgggaagtcgttgagcgtccatatgggtgcaagcccgtaggatgcaaatgggttttcaagaaaaagcttaggcctgatggtacaatcgaaaagtacaaggcaaggcttgtagccaagggttatacccaaaaggaaggcgaggacttcttcgacacatactcaccagttgctcgcttgaccacgattcgagtactacttgctctggcagcctctcatggtcttctcgtccatcagatggacgttaagacagctttcctaaacggagagctggaggaggagatctatatggatcaaccagacgggtatgtactagaaggtcaggagggaatggtgtgtaaactattgaaatccttgtatggcctcaagcaagcacctaagcaatggcataagaagtttgacaccacgcttacctctgcaggctttgttgtgaacgaagctgacaaatgtgtatactatcgctatggtgggggagaaggggtgatcttgtgcttatatgtcgatgacatactgatctttgggaccagccttaatgtgattgaggaggtcaaagactatctgtccaagagttttgaaatgaaggatttgggagaggctgatgttattcttaacatcaaactacaaagaggagatgagggtgggattacacttgtgcaatcccactatgtggacaaggttttgagtcgctttggatatagtgactgcaagccagctcctactccttatgatcccagcgtgctattaaggaaaaaccgaagaatagcaagggatcaactgagatactctcaaatcattggttcattgatgtacttggctagcgcaacgaggcctgacatctcatttgctgtaagcaagctgagccggtttgtctcaaatccgggagatgatcattggcaggctctggaaagagtaatgcgctatctaaagggcactatgagctatggaattcactataccgggtatccaaaagtactagaagggtatagtgactcaaactggatatctgatgctgatgagataaaagccacaagtggatatgcgttcacacttggaggtggcgctgtttcctggaagtcttgcaagcagaccatcttaacgaggtcaacaatggaagcagaacttacagcactagatactgcgacagttgaggccgagtggcttcgtgaactcctgatggatttgccggtggttgaaaaaccagtgccagctatcctaatgaactgcgataatcaaacagtgattattaaagtgaacagttcaaaggacaacatgaagtcatctagacacatcaagagaagactgaaatatgtcagaaagcagaaaaactccggagtgatagcattggactatgtccaaacggctagaaatctggcagatcagtttaccaaggggctaccacgtaatgtgatagacagtgcatcgagggaaatgggcttgatacccacctaa

SEQ ID NO: 15388 - DNA, 3513 bp, Oryza sativa
  Clone ID: TFbOSC400694j.C1.o10.fg
atgtctgccgcacctggagccgccgccgccgctgctgccgcacctggagacgcgccgggagccggagccgctgcgaacgacaacgtcaacggaggcagttctgcctcacaatccagcggagggacatttacagggtcattttcggtagttggctttgcttctgcactgaaaccacatgcatttgatggttctaactataagagatggaaagcacgtgcactattgtggttgacagcgatgcaatgcttctatgtttcacggggtaaacgaagtgaaccacctctctctcctgaggaagaggttaagttcaaggcttcggattggctgttccgtggagcattgatcagtgtactcgctgacaacatagtggacgtgtacatgcacatgcctttcgggaaggacatgtgggatgcacttgaggccaagttcggagtttccgacgccggcagtgagctgtatgtcatggagcagttctatgactacaagatggtcgatgaccgttctgtagtagaacaagctcatgagattcagatgctggctaaggaacttgagaacaacaactgtgagttgccggacaagtttgtggcgggtggcattattgccaaattgccaccttcttggtcggactttgccacttctctaaagcacaagagacaagagttcagtgtttctgatctcattggctctttgggtgttgaggagaaggcgagggcaaaggacaaccggggcaaaaaggttgagggaagttctagtgccaatatggtacagaagaagaaccctcatgcatcccacaacaacaagaaagtcaagcttgatgtcaaacccaaggctacaaccaattttaagaagaaaggcaagggaaaggcaaagggagactgctttgtgtgtggcaagtctgggcactgggccaaggattgtcctgagcgcaaagacaggaagtctgccaacatggtcattagcgagggcggaggaacatcggggtacggtaaattattacctacagttctctctgtttttcattcacctgattggtgggttgatactggtgctaatattcatgtcgggagaggttcctccttgttgatgggaaacgggtcgcttgcagctgttcatggtgttggtacggtcgatctgaagtttacttcaggaaagaccgtgcagctgaagaacatgcagcatgtctcttcaataaagaagaatcttgttatcggctctctattgtgtagagaaggttttagacttgtgtttgaatccaataaatgtgtcgtatctaaatatggaacttttgttggaaaaggttatgacagcggaggcttgttccgcttttctttagatgacatgtgtaataatcataatgttgtgaaccatattagcgagaatgatgagtctaatgtgtggcattcgcgactctgtcatgtgaatttcggttgtatgacgcgcttagctaacatgagtttagttccaaaattcactttggtcaaagattctaagtgccatacttgtgttcaatcgaaacaacctcgcaagcctcacaaggcatctgaggcgaggaatttggcacctctagaacttgttcattccgatttgtgcgaaatgaacggcgtattgactaaagggggaaagaaatatttcatgacactgatagatgattgcactagagtttgttatgtgtatctattgaaaacaaaggatgaagcattgcattactttaagacctataaaactgaggtagaaaaccaacttgaaaggaaaatcaaacggttgaggtctgatagaggtggggagtatttttccaatgagtttacatcattttgcgaagagtttggaattattcatgagaggacgcctccctattcaccccaatcaaatggggtggccgaaagaaagaaccgtactctaactgagatggtgaatgccatgttagacactgcggggctttccaaggaatggtggggtgaggcagttttgactgcgtgtcatgtcctgaataaaattccaatgaagcataaggaaatgacactatttgaggaatgggaaaggaagaaattaaatctctcatacctacgaacatggggctgtttggccaagggaaatcctgaggaggacaacattgtagatactcgtaagagtaagcgacaaagggttgcaaaatcctttggagatgactacattgtatacctcgtggataacaccccaagaaccatagaagaggcatatttatctccttacgctgactactggaaggaagcagtacacagtgagatggactcgattatgtctaatggtacttgggaagtcgttgagcgtccatatgggtgcaagcctgtaggatgcaaatgggttttcaagaaaaagcttaggcttgatggtacaattgaaaagtacaaggcaagacttgtggccaagggttatacccaaaaggaaggcgaggattttttcgacacatactcaccagttgctcgcttgaccacgattcgagtactacttgctctggcagcttctcatggtcttctcgtccatcagatggacgttaagacagctttcctaaacggagagctggaggaggagatctatatggatcaaccagacggcctcaatgtgattgaggaggtcaaggactttctgtccaagagttttgaaatgaaggatttgggagaggctgatgttattcttaacattaagctactaagaggagatgagggtgggattccacttgtgcaatcccactatgtggacaaggttttgagtcgctttggatatagtgactgcaagccagctcctactccttatgatcccagcgtgctattaaggaaaaaccgaagaatagcaagggatcaactgagatattctcaaatcattggttcattgatgtacttggctagtgcaacgaggcctgacatctcatttgctgtaagcaagctgagccggtttgtctcaaatccaggagatgatcattggcaggctctggaaagagtaatgcgctatctaaagggcactatgagctatggaattcactataccgggtacccaaaagtagtagaagggtatagtgactcaaactggatatctgatgctgatgagataaaagccacaagtggatatgtgttcacacttggaggtggcactgtttcctggaagtctagcaagcagaccatcttaacgaggtcaacaatggaagcagaacttacagcactggatactgcgacagttgaggccgagtggctttgtgaactcctgatggatttgccggtggttgaaaaaccagtgccagctatcctaatgaactgtgataatcaaacagtgattattaaagtgaacagttcaaaggacaatatgaagtcatctaggcatatcaagagaagactgaaatctgtcagaaagcagaaaaactccggagtgatagcattggactatgtccaaacggctaaaaatctagcagatcagtttaccaaggggctaccacgtaatgtgatagacagtgcatcgagggaaatgggcttgatacccacctaa

SEQ ID NO: 15389 - DNA, 4005 bp, Oryza sativa
  Clone ID: TFbOSC400718j.C1.o100.np
catgagaacatgctaaattactgagcgcctgaatctaacacgaacgtcaacaccaagggaggcaattctgcctcacaatccagcggagggccattctcggggtcattttcggtagttggctttgctgctgcactgaaaccacatgcttttgatggttctaactataagagatggaaagcacgtgcactattgtggttgacagcgatgcaatgcttctatgtttcatggggcaaacgaagtgaaccacctctttctcctggggaagaggctaagttcgaggcttcggattgcctgttccgtggagcattgatcagtgtactcgctgacaacatagtggacgtgtacatgcacatgccttctgggaaggacatgtgggatgcacttgaggccaagttcggattttctgacgccggcagtgagctgtatgtcatggagcagttctatgactacaagatggtcgatgactgttctgtagtagaacaagctcatgggattcagatgctggctaaggaacttgagaacaacaactgtgagttgccggacaagtttgtggcgggtggcattattgccaaattgccacctgcttggtcggactttgccacttctctaaagcacaagagacaagagttcagtgtttctgatctcattggctctttgggtgttgaggagaaggcaagggcaaaggacgtccggggcaaaaaggttgagggaggttctagtgccaatatggtacagaagaagaaccctcatgcatcccacaacaacaagaaagtcaagcctgatgtcaaacccaaggctgcaaccaactttaagaagaaaggcaagggaaaggcaaaaggagactgctttgtgtgtggcaagtctgggcattgggccaaggactgtcctgagcgcaaaaacaggaagtctgccaacatggtcgttagcgagggcagaggaacatcgaggtacggtaaaatattacctacagttctctctgtttttcactcacctgattggtgggtggatactggtgctaatattcatgtatgtgctgacatttctctgttttcttcttatcaggtcgggagaggttccttgttgatgggaaacaggtcgcttgcggctgttcatggtgttggtacggtcgatctgaagtttacttcgggaaagaccatgcagctgaagaacgtgcagcatgttccttcaataaagaagaatcttgttagcggctctctattgtgtagagaaggttttagacttgtgtttgaatccaataaatgtgtcgtatctaaatatgagacttttgttggaaaaggttatgacagcggaggcttgttccgcttttctttgaatgacatgtgtaataatcataatgttgtgaaccatattagcgagaatgatgagtctaatgtgtggcattcacgactctgtcatgtgaatttcggttgtatgacgcgcttagctaacatgagtttaattccaaaattcactttggtcaaaggttccaagtgccatacttgtgttcaatcgaaacaacctcgcaagcctcacaaggcatctgaggcgaggaatttggcacctctagaacttgtttattccgatttgtgcgaaataaacggcgtgttgactaaagggggaaagaaacatttcatgacactgatagatgattgcactagattttgttatgtgtatctattgaaaacaaaggatgaagcattgcattactttaagacctataaagctgaggtagaaaaccaacttgaaaggaaaatcaaacggttgaggtctgatagaggtggggagtattttttcaatgagtttgcatctttttgcaaagagtttggaattattcatgagaggacgcctccctattcaccccaatcaaatggggtggccgaaagaaagaactgtactctaactgagatggtgaatgccatgttagacattgcggggctttccaaggaatggtgggttgaggcagttttgattgcgtgtcatgtcctgaataaaatgccaatgaagcataaggaagtaacaccattcgaggaatgggaaaggaagaaattaaatctctcatacctacgaacatggggctgtttggccaaggtaaatgtacctatagccaaaaagcggaaacttggaccaaatactgttgattgtgtgttccttagttatgctattcacagtgtgggttatagattcttaataataaactctggagtacccgacatgcatgttggtacaattattatgtccagagatgctacattctttgagaatgaatttcccatgaaacatacacctagcacctctagtcaagaaactgtcacgccccatgagcactttacaccgatagaacacaatgatcaaacgcctgaggaaaatcctgaggaggacaacattgtagatactcgcaagagtaagagacaaagggttgcaaaatcctttggagatgactacattgtatacctcgtggatgacaccccaagaaccatagaagaggcatattcatctcctgacgctgactactggaaggaagcagtacgcagtgaaatggactcgattatgtctaatggtacttgggaagtcgttgagcgtccatatgggtgcaagcccgtaggatgcaaatgggttttcaagaaaaagcttaggcctgatggtacaattgaaaagtacaaggcaaggcttgtggccaagggttatacccaaaaggaaggcgaggacttttttaacacatactcaccagttgctcgcttgaccacgattcgagtactacttgctctggcagcctctcatggtcttctcgtccatcagatggacgttaagacagctttcctgaatggagagctggaggaggagatctatatggatcaaccagacgggtatgtactagaaggtcaggagggaatggtgtgtaaactgttgaaatccttgtatggcctcaagcaagcacctaagcaatggcatgagaagtttgataccacgcttacatctgcaggctttgttgtgaacgaagctgacaaatgtgtgtactatcgctatggtgggggagaaggagtgatcttgtgcttatatgtcgatgacatattgatctttgggaccagcctcaatgtgattgaggaggtcaaggactatctgtccaagagttttgaaataaaggatttgggacaggctgatgttattcttaacatcaaactacaaagaggagatgagggtgggattacacttgtgcaatcccactatgtggacaaggttttgagtcgctttggatatagtgactgcaagccagctcctactccttatgatcccagcgtgctattaaggaaaaaccgaagaatagtaagggatcaactaagatactctcaaatcattggttcattgatgtacctggctagtgcaacgaggcctgacatctcatttgctgtaagcaagctgagtcggtttgtctcaaatccgggagatgatcattggtaggctcgggaaaaagtaatgcgctatctaaagggcactatgagctatggaattcactataccgggtatccaaaagtactagaagggtatagtgactcaaactggatatctgatgctgatgagataaaagccacaagtggatatgtgttcacacttgcaggtggcgctgttttctggaagtcttgcaagcagaccatcttaacgaggtcaacaatggaagcagaacttacagcactagatactgcgacagttgaggccgagtagcttcatgaactcttgatggatttgccggtggttgaaaaaccagtgccagctatcctaatgaactgtgataatcaaacagtgattattaaagtgaacagttcaaaggacaacatgaagtcatctaggcatatcaagagaagactgaaatctgtcagaaagcagaaaaactccggagtgatagctttggactatatccaaacggttagaaatctagcagatcagtttaccaaggggctaccacgtaatgtgatagacagtgcatcgagggaaatgggcttgatacccacc

SEQ ID NO: 15390 - DNA, 4116 bp, Oryza sativa
  Clone ID: TFbOSC400758j.C1.o22.fg
atgtctggagttgccgccgccgctgctggaggagatggcagaggtggtgcgccgccaggagctggagctggaggtggtgcgccaggagctggagccggtgccgcgaacgacaacatcaacggaggcaattctgcctcacaatccagcggagggccatcctcggagtatatccttctcctattccctttgttagcgctatcgctttactgttatgtgctctatgttcctgttcctgacattcatgatgcctctagcatgttattgcgttactgtaatgttcctgttcctgacattcatgatgcgcatggtatgctactggttatgttaagagcaccctacaccgcttatgccatgattattgctttaacattttggattaaaatatgccgattcatgactatatttccaacaatccaaaaatctgataggtcatttttggtagttggctttgctgctgcactgaaaccacatgcttttgatgattctaactataagagatggaaagcacgtgcactactgtggttgacagcgatgcagtgcttctatgtttcacggggcaaacgaagtgaaccacctctttctcctgaggaagaggctaagttcgaggcttcggattgcctgttccgtggagcattgatcagtgtactcactgacaacatagtggacgtgtacatgcacatgccttccgggaaggatatgtgggatgcacttgaggccaagttcagagtttctgacgctggcagtgagctgtatgtcatggagcagttatatgactacaagatggtcgatgaccgttctgtagtagaacaagctcatgagattcaaatgctggctaaggaacttgagaacaacaactgtgagttgccggacaagtttgtggcgggtggcattattgccaaactgccaccttcttggtcggactttgccacttctctaaagcacaagagacaagagttcagtgtttctgatctcattggctctttgggtgttgaggagaaggcgagggcaaaggacgtccggggcaaaaaggttgagggaggttctagtgccaatatggtacagaagaagaaccctcatgcatcccacaacaacaagaaagtcaagcctgatgtcaaacccaaggctgcaaccaacattaagaagaaaggtaagggaaagtcaaagggagactgctttgtgtgtggcaagtctgggcattgggccaaggactgtcctgagcgcaaagacaggaagtctgccaacatggtcattagcgagggcggaggaacatcagggtacggtaaaatattacctacagttctctctgttcttcactcacctgattggtgggtggacactggtgctaatattcatgtcgggagaggttcctccttgttgatgggaaacgggtcgcttgcggctgttcatggtgttggtacggtcgatctgaagtttacttcgggaaagaccgtgcagctgaagaatgtgcagcatgtcccttcaataaagaagaatcttgttagcggctctctattgtgtagagaaggttttagacttgtgtttgagtccaataaatgtgccgtatctaaatatgggacttttgttggaaaaggttccaagtgccatacttgcgttcaatcgaaacaaactcgcaagcctcacaaggcatctgaggcgaggaatttggcacctctagaacttgttcattccgatttgtgcgaaatgaacggcgtgttgactaaaaggggaaagaaatatttcatgacactgatggatgattgcactagattttgctatgtgtatctattgaaaacaaaggatgaggcattgcattactttaaaatctataaagctgagatagaaaaccaacttgaaaggaaaatcaaacggttgaggtctgatagaggtggggagtatttttccaatgagtttgcatctttttgcgaagagtttagaattattcatgaaaggacgcctccctattcaccccaatcaaatgggatggccgaaagaaagaaccatactctaattgagatggtgaatgctatgttagacactgcggggctttccaaggaatggtggggtgaggcagttttgaccgcctgtcatgtcctgaataaaattccaatgaagcataaggaagtaacaccattcgaggaatggcaaaggaagaaattaaatctctcatacctacaaacatggggctgtttggccaaggtaaatgtacctatagccaaaaagcggaaacttggaccaaatactgttgattgtgtgttccttggttatgctattcacagtgtgggttatagattcttaatagtaaactttggtgtacccgacatgcatgttggtacaattcttgagtccagagatgctacattctttgataatgaatttcccatgaaacatacacctagcacttctagtaaagaaactgtcatgccccatgagcactttgcaccgatagaacacaatgatcaaacgcctgaggaaaatcctgaggaggacaacattgtagatactcgcaagagtaagagaaaaagggttgcaaaatcctttggagatgactacattgtatacctcgtggatgacaccccaagaaccatagaagaggcatattcatctcctgacgctgactactggaaggaagcagtacgcagtgaaatggactcgattatgtctaatggtacttgggaagtcgttgagcatccatatgggtgcaagcccctaggatgtaaatgggttttcaagaaaaagcttagacctgatggtacaattgaaaagtacaaggcaaggtttgtggccaagggttatacccaaaaggaaggcgaggacttcttcgacacatactcaccagttgctcgcttgaccacgattcgagtactacttgctctggcagcctctcatggtcttctcgtccatcagatggacgttaagacaactttcctaaacggagagctggaggaggagatctatatggatcaaccagatgggtatatactaaaaggtcaggagggaatggtgtgtaaattgttgaaatccttgtatggcctcaagcaagcacctaagcaatggcatgagaagtttgacaccacgcttacatctgcaggctttgttgtgaacgaagctgacaaatgtgtgtactatcgctatggtgggggagaagaagtgatcttgtgcctatatgtcgatgacatattgatctttgggaccagccttaatgtgattgaggaggtcaaggactatctgtccaagagttttgaaatgaaggatttgggagaggctgatgttattcttaacatcaaactacaaagaggagatgagggtgggattacacttgtgcaatcccactatgtggacaaggttttgagttggtttggatatagtgaccgcaagccagctcctactccttatgatcccagcgtgctattaaggaaaaaccgaaaaatagcaagggatcaactgagatactctcaaatcattggttcattgatgtacttggctagtgcaatgaggcctgacatctcatttgctgtaagcaagctgagccggtttgtcttaaatccgggagatgatcattggcaggctctggaaagagtaatgcgctatataaagggcactatgagctatggaattcactataccgggtatccaaaagtactagaagggtatagtgactcaaactggatatctgatgctgatgagataaaagccacaagtggatatgtgttcacacttggagggggcgctgtttcctgcaagtcttgcaagcagaccatcttaacgaggtcagcaatgaaagcagaacttacagcactagatactgcgacagttgaggccgagtggcttcgtgaactcctgatggatttgccggtggttgaaaaaccagtgccagctatcctaatgaactgtgataatcaaacagtgattattaaagtgaacagttcaaaggacaacatgaagtcatctaggcacatcaagagaagactgaaatctgtcagaaagcagaaaaactccgaagtgatagcattggactatgtccaaacggctagaaatctgacagatcagtttactaaggggctaccacgtaatgtgatagacagtgcatcgagggaaatgggcttgatacccacctaa

SEQ ID NO: 15391 - DNA, 3762 bp, Oryza sativa
  Clone ID: TFbOSC400993j.C1.o11.fg
atgcagtgcttttatgtttcacggggcaaacgaagtgaaccacctctttttcctgaggaagaggccatgttcgaggcttcggattgcctgttccgtggagcattgatcagtgtactcgctgacaacatagtggacgtgtacatgcacatgccttctgggaaggacatgtgggatgcacttgaggccaagttcggagtctctgacgccggcagtgagctgtatgtcatggagcagttctatgactacaagatggtcgatgatcgttctgtagtagaacaagctcatgagattcagatgctggctaaggaacttgagaacaacaactgtgagttgccggacaagtttgtggcgggtggcattattgccaaactaccaccttcttggtcggactttgccacttctctaaagcacaagagacaagagttcagtgttcctgatctcattggctctttgggtgttgaggagaaggcgagggcaaaggacgtccggggcaaaaaggttgagggaggttctagtgccaatatggtacagaagaagaaccctcatgcatcccacaacaacaagaaagtcaagcctgatgtcaaacccaaggctgcaaccaattttaagaagaagggcaagggaaaggcaaagggagactgctttgtgtgtggcaagtctgggcattgggccaaggactgtcctgagcgcaaagacaggaagtctgccaacatgatcattagcgagggcggaggaacatcggggtacggtaaaatattacctacagttctctctgtttttcattcacctgattggtgggtggatactggtgctaatattcatgtatgtgctgatatttctctgttttcttcttatcaggtcgggagaggttcctccttgttgatgggaaacgggtcgcttgcggctgttcacggtgttggtacggtcgatctaaagtttacttcgggaaagaccgtgcagctgaagaacgtgcagcatgtcccttcaataaagaagaatctagttagcggctctctattgtgtagagaaggttttagacttgtgtttgagtccaataaatgtgtcgtatctaaatatgggacttttgttgaaaaaggttatgacagcggaggcttgttccgcttttctttgaatgacatgtgtaataatcataatgctgtgaaccatattagcgagaatgatgagtctaatgtgtggcattcgcgactctgtcatgtgaatttcgggtgtatgacgcgcttagctaacatgagtttaattccaaaattcactttggtcaaaggttccaagtgccatacttgtgttcaatcgaaacaacctcgcaagcctcacaaggcatctgaggcgaggaatttggcacctctagaacttgttcattctgatttgtgcgaaatgaacggcgtgttgactagattttgctatgtgtatctattgaaaacaaaggatgaggcattgcattactttaaaatctataaagctgagatagaaaaccaacttgaaaggaaaatcaaacagttgaggtctgatagaggtggggagtatttttccaatgagtttgcatccttttgcgaagagtttggaattattcatgagatgacgcctccctattcaccccaatcaaatggggtggccgaaagaaagaaccatactctaactgagatggtgaatgccatgttagacactgcggggctttccaaggaatggtggggtgaagcagttttgactgcgtgtcatgtcctgaataaaattccaatgaagcaaaaggaagtaacaccattcgaggaatgggaaaggaagaaattaaatctctcatacctacgaatatggggctgtttggccaaggtaaatgtacctatagccaaaaagcggaaacttggaccaaaaactgttgattgtgtgtttcttggttatgctatccacagtgtgggttatagattcttaatagtaaactctggagtacccgacatgcatgctggtacaattcttgagtccagagatgctacattctttgagaatgaatttcctatgaaatatacacctagcacttctagtaaagaaactgtcatgccccatgagcactatgcaccgatagaacacaatgatcaaacgcctgaggaaaatcctgaggaggacaacattgtagatactcgcaagagtaagagacaaagggttgcaaaatcctttggagatgactacattgtatacctcgtagatgacaccccaagaaccatagaagaggcatattcatctcctgacgctgactactggaaggaagcagtacgcagtgaaatggactcgattatgtctaatggtacttgggaagtcgttgagcgtccatatgggtgcaagcccgtaggatgcaaatgggttttcaagaaaaagcttaggcctgatggtacaatcgaaaagtacaaggcaaggcttgtggccaagggttatacccaaaaagaaggcgaggacttcttcgacacatactcaccagttgctcgcttgaccacgattcgagtactacttgctctggcagcctctcatagtcttctcgtccatcagatggacgttaagacagctttcctaaacggagagctggaggaggagatctatatggatcaaccagacgggtatgtactagaaggtcaggagggaatggtgtgtaaactattgaaatccttgtatggcctcaagcaagcacctaagcaatggcatgagaagtttgacaccacgcttacatctgcaggctttgttgtgaacgaagctgacaaatgtgtatactatcgctatggtgggggagaaggggtgatcttgtgcttatatgtcgatgacatactgatctttgggaccagccttaatgtgattgaggaggtcaaagactatctgtccaataattttgaaatgaaggatttgggagaggctgatgttattcttaacatcaaactacaaagaggagatgagggtgggattacacttgtgcaatcccactatgtggacaaggttttgagtcgctttggatatagtgactgcaagccagctcctactccttacgatcccagcgtgctattaaggaaaaaccgaagaatagtaagagatcaactgagatactctcaaatcattggttcattgatgtacttggctagcgcaacgaggcctgacatctcatttgctgtaagcaagctgagccggtttgtctcaaatccgggagacgatcattggcaggctctggaaagagtaatgcgctatctaaagggcactttgagctatggaattcactataccgggtatccaaaagtactagaagggtatagtgactcaaactggatatctgatgctgatgagataaaagccacaagtggatatgcgttcacacttggaggtggcgctgtttcctggaagtcttgcaagcagaccatcttaacgaggtcaacaatggaagcagaacttacagcactagatactgcgacagttgagaccgagtggcttcgtgaactcctgatggatttgccggtggttgaaaaaccagtgccagctatcctaatgaactgcgataatcaaacagtgattattaaagtgaacagttcaaaggacaacatgaagtcatctagacacatcaagagaaaactgaaatctgtcagaaagcagaaaaactccggagtgatagcattggactatgtccaaacggctagaaatctggcagatcagtttaccaaggggctaccacgtaatgtgatagacagtgcatcgagggaaatgggcttgatacccacctaa

SEQ ID NO: 15392 - DNA, 4314 bp, Oryza sativa
  Clone ID: TFbOSC400993j.C1.o82.np
atgtctggagttgccgccgctactgctggcggaggtggtacgccgccgacaggagctggatctggagctggtgcgccaggaggtgccgtgaacgacaacaacaacggagtcaattctgcctcaccatccagcggagggccattctcggggtatactcttctcctcctgctactgttgttagcgctattcctgttcccattgttagcgctatcgctatactatgtgcgctatgttcttgttcctgttctacatgatgcctctagcatgttatcgcgttactggtatgttcctgttcctgacattcatgatgcgcatagtatgctactggttatgttaagatcaccctacactgcttatgccatgatcattgctttaactttttggattaaaatatgccgattaatgactatatttccaacaatccaaaaacctgataggtcattttcggtagttggctttgctgctgcactgaaaccacatgcttttgatggttcaaactataagagatggaaagcacgtgcactattgtggttgacagcgatgcagtgcttctatgtttcacggggcaaacgaagtgaaccacctctttctcctgaggaagaggctaagttcgaggcttcggattgcctgttccgtggagcattgatcagtgtactcgctgacaacatagtggacgtgtacatgcacatgccttctgggaaggacatgtgggatgcacttgaggccaagttcggagtttctgacgccggcagtgagctgtatgtcatggagcagttctatgactacaagatggtcgatgaccgttctgtagtagaacaagctcatgagattcagatgctggctaaagaacttgagaacaacaactgtgagttgccggacaagtttgtggcgggtggcattattgccaaactaccaccttcttggtcggactttgccacttctctaaagcacaagagacaagagttcagtgttcctgatctcattggctctttgggtgttgaggagaaggcgagggcaaaggacgtgcggggcaaaaaggttgagggaggttctagtgccaatatggtacagaagaagaaccctcatgcatcccacaacaacaagaaagtcaagcctgatgtcaaacccaaggctgcaaccaattttaagaagaaaggcaagggaaaggcaaagggagattgctttgtgtgtggcaagtctgggcattgggccaaggactgtcctgagcgcaaagacaggaagtctaccaacatggtcattagcgagggcagaggaacatcggggtacggtaaaatattacctacagttctctctgtttttcattcacctgattggtgggtggatactggtgctaatattcatgtatgtgctgacatttctctgttttcttcttatcaggtcgggagaggttcctccttgttgatgggaaacgggtcgcttgcggctgttcatggtgttggtacggtcgatctgaagtttacttcgggaaagaccgtgcagctgaagaacgtgcagcatgtcccttcaataaagaagaatctagttagctgctctctattgtgtagagaaggttttagacttgtgtttgagtccaataaatgtgtcgtttctaaatatgggacttttgttggaaaaggttatgacagcggaggcttgttccgcttttctttgaatgacatgtataataatcataatgctgtgaaccatattagcgagaatgatgagtctaatgtgtggcattcgcgactctgtcatgtgaatttcgggtgtatgacgcgcttagctaacatgagtttaattccaaaattcactttggtcaaaggttccaagtgccatacttatgttcaatcgaaacaacctcgcaagcctcacaaggcgtctgaggcgaggaatttggcacctctagaacttgttcattccgatttgtgcgaaatgaacggcgtgttgactaaagggggaaagaaatatttcatgacactgatagatgattgcactagattttgctatgtgtatctattgaaaacaaaggatgagacattgcattactttaaaatctataaagctgaggtagaaaaccaacttcaaaggaaaatcaaactgttgaggtctgatagaggtggggagtatttttccaatgagtttgcatccttttgccaagagtttggaattattcatgagatgacgcctccctattcacccctatcaaatggggtggccgaaagaaagaaccgtactctaactgagatggtgaatgccatgttagacactgcggggctttccaaggaattgtggggtgaggcagttttgactgcgtgtcatatcctgaataaaattccaatgaagcataaggaagtaacaccattcgaggaatgggaaaggaagaagttaaatctctcatacctacgaacatggggctgtttggccaaggtaaatgtacctatagccaaaaggcggaaacttggaccaaaaactgttgattgtgtgtttcttggttatgctatccacagtgtgggttatagattcttaatagtaaactctggagtacccgacatgcatgctggtacaatttttgagtccagagatgctacattctttgagaatgaatttcctatgaaatatacacctagcacttctagtaaagaaactgtcatgccccatgagcactttgcaccgatagaacacaatgatcaaacgcctgaggaaaatcctgaggaggacaacattgtagatgctcgcaagagtaagagacaaagggttgcaaaatcctttggagatgactacattgtatacctcgtagatgacaccccaagaaccatagaagaggcatattcatctcctgacgctgactactggaaggaagcagtacgcagtgaaatggactcgattatgtctaatggtacttgggaagtcgttgagcgtccatatgggtgcaagcccgtaggatgcaaatgggttttcaagaaaaagcttaggcctgatggtacaatcgaaaagtacaaggcaaggcttgtggccaagggttatacccaaaaggaaggcgaggacttcttcgacacatactcaccagttgctcgcttgaccacgattcgagtactacttgctctggcagcctctcatggtcttctcgtccatcagatggacgttaagacagctttcctaaacggagagctggaggagaagatctatatggatcaaccggacgggtatgtactagaaggtcaggagggaatggtgtgtaaactattgaaatccttgtatggcctcaagcaagcacctaagcaatggcatgaaaagtttgacaccacgcttacatctgcaggctttgttgtgatcgaagctgacaaatgtgtatactatcgctatggtgggggagaaggggtgatcttgtgcttatatgtcgatgacatactgatctttgggaccagccttaatgtgattgaggaggtcaaagactatctgtccaagagttttgaaatgaaggatttgggagaggctgatgttattcttaacatcaaactacaacgaggagatgagggtgggattacacttgtgcaatcccactatgtggacaaggttttaactcctactccttatgatcccagcgtgctattaaggaaaaaccgaagaatagtaagggatcaactgagatactctcaaatcattggttcattgatgtacttggctagcgcaacgagacctgacatctcatttgctgtaagcaagctgagccggtttgtctaaaatccgggagatgatcattggcaggctctggaaagagtaatgcgctatctaaagggcactatgagctatggaattcactataccgggtatccaaaagtactagaagggtatagtgactcaaactggatatctaatgctgatgagataaaagccacaagtggataagtgttcacacttggaggtggcgctgtttcctggaagtcttgcaagcagaccatcttaacgaggtcaacaatggaagcagaacttacagcactagatactgcgacagttgaggccgagtggcttcgtgaactcctgatggatttgccggtggttgaaaaaccagtgccagctatcctaatgaactgcgataattaaacagtgattattaaagtgaacaattcaaaggacaacatgaagtcatctagacacatcatgagaagactgaaatctgtcagaaagcagaaaaactccggagtgatagcattggactatgtccaaacggctagaaatctggcagatcagtttaccaaggggctaccacgtaatgtgatagacagtgcatcgagagaaatgggcttgatacccacc

SEQ ID NO: 15393 - DNA, 4314 bp, Oryza sativa
  Clone ID: TFbOSC401126j.C1.o85.np
atgtctggagttgccgccgccactgctggcggaggtggtacgccgccgccgccgacaggagctggatctggatctggagttggtgcgccaggaggtgccgtgaacgacaacaacaacggaggcaattctgcctcaccatccagcggagggccattctcggggtataatcttctcctcctgctactgttgttagcgctattcctgttcccattgttagcgctatcgctatattatgtgcgctatgttcttgttcctgttctacatgatgcctctagcatgttatcgcgttactggtatgttcctgttcctgacattcatgatgcgcatagtatgctactggttatgttaagatcaccctacactgcttatgccatgatcattgtttcaatttcttggattaaaatatgccgattaatgactatatttccaacaatccaaaaacctgataggtcattttcggtagttggctttgctgctgcactgaaaccacatgcttttgatggttcaaactataagagatggaaagcacgtgcactattgtggttgacagcgatgcagtgcttctatgtttcacggggcaaacgaagtgaaccacctctttctcctgaggaagaggccaagttcgaggcttcggattgcctgttccgtggagcattgatcagtgtactcgctgacaacatagtggacgtgtacatgcacatgccttctaggaaggacatgtgggatgcacttgaggccaagttcggagtctctgacgccggcagtgagctgtatgtcatggagcagttctatgactacaagatggtcgatgaccgttctatagtagaacaagctcatgagattcagatgctggctaaggaacttgagaacaacaactgtgagttgccggacaagtttgtggcgggtggcattattgccaaactaccaccttcttggtcggactttgccacttctctaaagcacaagagacaagagttcagtgttcctgatctcattggctctttgggtgttgaggagaaggcgagggcaaaggacgtccggggcaaaaaggttgagggaggttctagtgccaatatggtacagaagaagaaccctcatgcatcccacaacaacaagaaagtcaagcctgatgtcaaacccaaggctgcaaccaattttaagaagaagggcaagggaaaggcaaagggagactgctttgtgtgtggcaagtctgggcattgggccaaggactgtcctgagcgcaaagacaggaagtctgccaacatgatcattagcgagggcggaggaacatcggggtacggtaaaatattacctacagttctctctgtttttcattcacctgattggtgggtggatactggtgctaatattcatgtatgtgctgacatttctttgttttcttcttatcaggtcgggagaggttcctctttgttgatgggaaacgggtcgcttgcggctgttcatggtgttggtacggtcgatctgaagtttacttcgggaaagaccgtgcagctgaagaacgtgcagcatgtcccttcaataaagaagaatctagttagcggctctctattgtgtagagaaggttttagacttgtgtttgagtccaataaatgtgtcgtatctaaatataggacttttgttggaaaaggttatgactgcggaggtttgttccgcttttctttgaatgacatgtgtaataatcataatgctgtgaaccatattagcgagaatgatgagtctaatgtgtggcattcgcgactctgtcatgtgaatttcgggtgtatgacgcgcttagctaacatgagtttaattccaaaattcactttggtcaaaggttccaagtgctatacttgtgttcaatcgaaacaacctcgcaagcctcacaaggcatctgaggcgaggaatttggcacctctagaacttgttcattccgatttgtgcgaaatgaacggcgtgttgactaaagggggaaaaaaatatttcatgacactgatagatgattgcactagattttgctatgtgtatctattgaaaacaaaggatgaggcattgcattactttaaaatctatagagctgaggtagaaaaccaacttgaaaggaaaatcaaacggttgaggtctgatagaggtggggagtatttttccaatgagtttgcatccttttgcgaagagtttggaattattcatgagatgacgcctccctattcaccccaatcaaatggggtggccgaaagaaagaaccgtactctaactgagatggtgaatgccatgttagacactgcggggctttccaaggaatggtggggtgaggcagttctgactgcgtgtcatgtcctgaataaaattccaatgaagcataaggaggtaacacaattcgaggaatgggaaaggaagaaattaaatctctcatacctacgaacatggggctgtttggccaaggtaaatgtacctatagccaaaaagcggaaacttggaccaaaaactgttgattgtgtgtttcttggttatgctatccacagtgtgggttatagattcttaatagtaaactctggagtacccgacatgcatgctggtacaattcttgagtccagagatgctacattctttgagaatgaatttcctatgaaatatacacctagcacttctagtaaagaaactgtcatgccccgtgagcactttgcaccgatagaacacaatgatcaaacgcctgaggaaaatcctgaggaggacaacattgtagatactcgcaagagtaagagacaaagggttgcaaaatcctttggagatgactacattgtatacctcgtagatgacaccccaagaaccatagaagaggcatattcatctcctgacgctgactactggaaggaagcagtacgcagtgaaatggactcgattatgtctaatggtacttgggaagtcgttgagcgtccatatgggtgcaagcccgtaggatgcaaatgggttttcaagaaaaagcttaggcctgatggtacaatcgaaaagtataaggcaaggcttgtggccaagggttatacccaaaaagaaggcgaggacttcttcgacacatactcaccagttgctcgcttgaccacgattcgagtactacttgctctggcagcctctcatggtcttctcgtccatcagatggacgttaagacagctttcctaaacggagagctggaggaggagatctatatggatcaaccagacgggtatgtactagaaggtcaggagggaatggtgtgtaaactattgaaatccttgtatggcctcaagcaagcacctaagaaatggcatgagaagtttgacaccacgcttacatctgcaggctttgttgtgaacgaagctgacaaatgtgtatactatcgctatggtgggggagaaggggtgatcttgtgcttatatgtcgatgacatactgatctttgggaccagccttaatgtgattgaggaggtcaaagactatctgtccaagaattttgaaatgaaggatttgggagaggctgatgttattcttaacatcaaactacaaagaggagatgagggtgggattacacttgtgcaatcccactatgtggacaaggacgtgacacctactccttatgatcccagcgtgctattaaggaaaaaccgaagaatagcaagggatcaactaagatactctcaaattattggttcattgatgtacttgtatagcgcaacgaggcctgacatctcatttgctgtaagcaagctgagccggtttgtctcaaatccgggagatgatcattggcaggctctggaaagagtaatgcgctatctaaagggcactatgagctatggaattcactataccgggtatccaaaagtactagaagggtatagtgactcaaactggatatctgatgctgatgagataaaagccacaagtggatatgcgttcacacttggaggtggcgctgtttcctggaagtcttgcaagcagaccatcttaacgaggtcaacaatggaagcagaacttacagcactagatactgcgacagttgaggccgagtggcttcgtgaactcctgatggatttgccggtggttgaaaaaccagtgccagctatcctaatgaactgcgataatcaaacagtgattattaaagtgaacagttccaaggacaacatgaagtcatctagacacatcaagagaagactgaaatctgtccactccggagtgatagcattggactatgtccaaacggctagaaatctggcagatcagtttaccaaggggctaccacgtaatgtgatagacagtgcatcgagggaaatggacttgatacccacc

SEQ ID NO: 15394 - DNA, 4059 bp, Oryza sativa
  Clone ID: TFbOSC401217j.C1.o36.fg
atgtcgaacactggagacaaggagaaggagactcccgtcaacaccaacggaggcaatactgcctcaaactccagcggaggaccattcttggggtataaccttattacattatttcaattagaagttttactgttaatgttcatcgcaatgtcaacattgtgtcattatgtgattgttgatgcttattcaacgttaagcatgctcatgttgattacattcaccactatcactggatcaaatcctattgtaaatatcatgtttattatcttgttattttggattaaaatatgccgaattatgaccaaatttccaacaatccaaaaacctgataggtcattttcggtagttggctttgctgctgcactgaaaccacatgcttttgatggttcaaactataagagatggaaagcacgtgcactattgtggttgacagcgatgcagtgcttctatgtttcacggggcaaacgaagtgaaccacctctttctcctgaggaagaggctaagttcgaggcttcggattgcctgttccgtggagcattgatcagtgtactcgctgacaacatagtggacgtgtacatgcacatgccttctggaaaggacatgtgggatgcacttgaggccaagttcggagtttctgacgccggcagtgagctgtatgttatggagcagttctatgactacaagatggtcgatgaccgttctgtagttgaacaagctcatgagattcagatgttggcaaaggaacttgagaacaacaactgtgagttgcctgacaagtttgtggcaggtggcattattgccaaactaccaccttcttggtcggactttgccacttctctaaagcacaagagacaagagttcagtgttcctgatctcattggctctttgggtgttgaggagaaggcgagggcaaaggacgtccggggcaaaaaggttgagggaggttctagtgccaatatggtacagaagaagaaccctcatgcatcccacaacaacaagaaagtcaagcctgatgtcaaacccaaggctgcaaccaattttaagaagaaaagtaagggaaaggcaaagggagactgctttgtgtgtggcaagtctgggcattgggccaaggactgtcctgagcgcaaagacaggaagtctgccaacatgatcattagcgagggcggaggaacatcggggtacggtaaaatattacctacagttctctctgtttttcattcacctgattggtgggtggacactggtgctaatattcatgtcgggagaggttcctccttgttgatgggaaacgggtcgcttgcggctgttcatggtgttggtacggtcgatctgaagtttacttcgggaaagaccgtgcagctgaagaacgtgcagcatgtcccttcaataaagaagaatctagttagcggctctctattgtgtagagaaggttttagacttgtgtttgagtccaataaatgtgtcgtatctaaatatgggacttttgttggaaaaggttatgacagcggaggcttgttccgcttttctttgaatgacatgtgtaataatcataatgctgtgaaccatattagcgagaatgatgagtctaatgtgtggcattcgcgactctgtcatgtaaatttcggttgtatgacgcgcttagctaacatgagtttaattccaaaattcactttggtaaaaggttccaagtgccatacttgtgttcaatcgaaacaacctcgcaagcctcacaaggcatctgaggcgaggaatttggcacctctagaacttgttcattccgatttgtgcgaaatgaacggcgtgttgactaaaggggtaaagaaatatttcatgacactgatagatgattgcactagattttgctatgtgtatctattgaaaacaaaggatgaggcattgcattgctttaaaatctataaagctgaggtagaaaaccaacttgaaaggaaaatcaaacggttgaggtctgatagaggtggggagtatttttccaatgagtttgcatccttttgcgaagagtttggaattattcatgagatgacgcctccctattcaccccaatcaaatggggtggccgaaagaaagaaccgtactctaactgagatggtgaatgccatgttagacactgcggggctttccaaggaatggtggggtgaggcagttttgactgcgtgtcatgtcctgaataaaattccaatgaagcataaggaagtaacaccattcgaggaatgggaaaggaagaaattaaatctctcatacctacgaacatggggctgtttggccaagtccagagatgctacattctttgagaatgaatttcctatgaaatatacacctagcacttctagtaaagaaactgtcatgccccatgagcactttgcaccgatagaacacaatgatcaaacgcctgaggaaaatcctgaggaggacaacattgtagatactcgcaagagtaagagacaaagggttgaaaaatcctttggagatgactacattgtatacctcgtggatgacaccccaagaaccatagaagaggcatattcatctcctgacgctgactactggaaggaagcagtatgcagtgaaatggactcgattatgtctaatggtacttgggaagtcgttgagcgtccatatgggtgcaagcccgtaggatgcaaatgggttttcaagaaaaagcttaggcctgatagtacaatcgaaaagtacaaggcaaggcttgtggccaagggttatacccaaaaggaaggcgaggacttcttcgacacatactcaccagttgctcgcttgaccacgattcgagtactacttgctctggcagtctctcatggtcttctcgtccatcagatggacgttaagacagctttcctaaacggagagctggaggaggagatctatatggatcaaccagacgggtatgtactagaaggtcaggagggaatggtgtgtaaactattgaaatccttgtatggcctcaagcaagcacctaagcaatggcatgagaagtttgacaccacgcttacatctgcaggctttgttgtgaacgaagctgacaaatgtgtatactatcgctatggtgggggagaaggggtgatcttgtgcttatatgtcgatgacatactgatctttgggaccagccttaatgtgattgaggaggtcaaagactatctgtccaagaattttgaaatgaaggatttgggagaggctgatgttattcttaacatcaaactacaaagaggagatgagggtgggattacacttgtgcaatcccactatgtggacaaggttttgagtcgctttggatataatgactgcaagccagctcctactccttatgatcccagcgtgctattaaggaaaaaccgaagaatagtaagggatcagctgagatactctcaaatcattggttcattgatgtacttggctagcgcaacgaggcctgacatctcatttgctgtaagcaagctgagccggtttgtctcaaatccgggagatgatcattggcaggctctggaaagagtaatgcgctatctaaagggcactatgagctatggaattcactataccgggtatccaaaagtactagaagggtatagtgactcaaactggatatctgatgctgatgagataaaagccacaagtggatatgtgttcacacttggaggtggcgctgtttcctggaagtcttgcaagcagaccatcttaacgaggtcaacaatggaagcagaacttacagcactagatactgcgacagttgaggccgagtggcttcgtgaactcctgatggatttgccggtggttgaaaaaccagtgccagctatcctaatgaactgcgataatcaaacagtgattattaaagtgaacagttcaaaggacaacatgaagtcatctagacacatcaagagaagactgaaatctgtcagaaagcagaaaaactccggagtgatagcattggactatgtccaaacggctagaaatatggcagatcagtttaccaaggggctaccacgtaatgtgatagacagtgcatcgagggaaatgggcttgatacccacctaa

SEQ ID NO: 15395 - DNA, 3123 bp, Oryza sativa
  Clone ID: TFbOSC401279j.C1.o23.gm
atgcagtgcttctatgtttcacggggtaaacgaagtgaaccacctctttctcctgaggaagaggctaagttcgaggcttcggattgcctgttccgtggagcattgatcagtgtactcgctgacaacatagtggacgtgtacatgcacatgccttctgggaaggacatgtgggatgcacttgaggccaagttcggagtttctgacgccggcagtgagctgtatgtcatggagcagttctatgactacaagatggttgatgaccgttctgtagtagaacaagctcatgagattcagatgctggctaaggaacttgagaacaacaactgtgagttgccggacaagtttgtggcgggtggcattattgccaaactaccaccttcttggtcggactttgccacttctctaaagcacaagagacaagagttcagtgttcctgatctcattggctctttgggtgttgaggagaaggcgagggcaaaggacgtccggggcaaaaaggttgagggaggttctagtgccaatatggtacagaagaagaaccctcatgcatcccacaacaacaagaaagtcaagcctgatgtcaaacccaaggctgcaaccaattttaagaagaaaggcaagggaaaggcaaagggagactgctttgtgtgtggcaagtctgggcattgggccaaggactgtcctgagcgcaaagacaggaagtctgccaacatgatcattagcgagggcggaggaacatcgggagatgctactttctttgagaatgaatttcctatgaaatatacacctagcacttctagtaaagaaactgtcatgccccatgagcactttgcaccgatagaacacaatgatcaaacgcctgaggaaaatcctgaggaggacaacattgtagatactcgcaagagtaagagacaaagggttgcaaaatcctttggagatgactacattgtatacctcgtggatgacaccccaagaaccatagaagaggcatatttatctcctgacgctgactactggaaggaagcagtacgcagtgaaatggactcgattatgtctaatggtacttgggaagtcgttgagcgtccatatggatgtaagcccgtaggatgcaaatgggttttcaagaaaaagcttaggcctgatggtacaatcgaaaagtataaggcaaggcttgtggccaagggttatacccaaaaggaaggcgaggatttcttcgacacatattcaccagttgctcgcttgactacgattcgagtactacttgctctggcagcctctcatggtcttctcgtccatcagatggacgttaagacagctttcctaaatggagagctggaggaggagatctatatggatcaaccagacgggtatgtactagaaggtcaggagggaatggtgtgtaaactattgaaatccttgtatggcctcaagcaagcacctaagcaatggcatgagaagtttgacaccacgcttacatctgcaggctttgttgtgaacgaagctgacaaatgtgtatactatcgctatggtgggggagaaggggtgatcttatgcttgtatgtcgatgacatactgatctttgggaccagccttaatgtgattgaggaggtcaaagactatctgtccaagagtgatttgggagaggctgatgttattcttaacatcaaactacaaagaggagatgagggtgggattacacttgtgcaatcccactatgtggacaaggttttgagtcgctttggatatagtgactgtaagccagctcctactccttatgatcccagcgtgctattaaggaaaaaccgaagaatagcaagggatcaactgagatactctcaaatcattggttcattgatgtacttggctagcgcaacgaggcctgacatctcatttgctgtaagcaagctgagccggtttgtctcaaatccgggagatgatcattggcaggctctggaaagagtaatgcgctatctaaagggcactatgagctatggaattcactataccgggtatccaaaagtactagaagggtatagtgactcaaactggatatctgatgctgatgagataaaagccacaagtggatatgcgttcacacttggaggtggcgctgtttcctggaagtcttgcaagcagaccatcttaacgaggtcaacaatggaagcagaacttacagcactagatactgcgacagttgaggctgagtggcttcgtgaactcctgatggatttgccggtggttgaaaaaccagtgccagctatcctaatgaactgcgataatcaaacagtgattattaaagtgaacagttcaaaggacaacatgaagtcatctagacacatcaagagaagactgaaatctgtcagaaagcagaaaaactccggagtgatagcattggactatgtccaaacggctagaaatctggcagatcagtttaccaaggggctaccacccactaacccacgttcccacgattccctccgcaacagcgcgtccacgttctttctcctgatagataaggaggccgcgagtctgatccgagttcctcgcttctttcccggtttttggggagtgcctcctgcacgactgctcatcgccatgtctggagttgctgccgccgctattggcggaggtggtgcgccgccgccgacgccgacaggagctggatccggagctggtgcgccaggaggaggtgccgtgaacgactacaacaacggaggcaattctgcctcaccatccagtggagggccattctcgggcaccacctttcgctttcggagagcaaactatgttacacgcaattttgcaattgccgctgtgacagttttcttcccccgtccagaagaaggcccttcagcgcttgtcaatagtgctcatcatcagtttgatcgtgtccggaggtgtgaggtcgtcggcgagatgagctccggcggcgaggaggggaagacgtcgtggccggaggtggtggggctgcgggcggaggaggcgaagaaggtgatcctcaaggacatgcccgacgccgacatcgtcgtggttccggtggggacgccggtgaccatggacttccgccccaaccgcgtccgcatcttcgtcgacaccgtcgccggcacccccaccatcggctag

SEQ ID NO: 15396 - DNA, 3807 bp, Oryza sativa
  Clone ID: TFbOSC401325j.C1.o27.fg
atgcagtgcttctatgtttcacggggcaaacgaagtgaaccacctctttctcctgaggaagaggctaagttcgaggcttcggattgcctgttccgtggagcattgatcagtgtactcgctgacaacatagtggacgtgtacatgcacatgccttctgggaaggacatgtgggatgcacttgaggccaagttcggagtttctgacgccggcagtgagctgtatgttatggagcagttctatgactacaagatggtcgatgaccgttctgtagttgaacaagctcatgagattcagatgctggctaaggaacttgagaacaacaactgtgagttgccggacaagtttgtggcaggtggcattattgccaaactaccaccttcttggtcggactttgccacttctctaaagcacaagagacaagagttcagtgttcttgatctcattggctctttgggtgttgaggagaaggcgagggcaaaggacgtccggggcaaaaaggttgagggaggttctagtgccaatatggtacagaagaagaaccctcatgcatcccacaacaacaagaaagtcaagcctgatgtcaaacccaaggctgcaaccaattttaagaagaaaagcaagggaaaggcaaatggagactgctttgtgtgtggcaagtctgggcattgggccaaggactgtcctgagcgcaaagacaggaagtctgccaacatgatcattagcgagggcggaggaacatcggggtacggtaaaatattacctacagttctctctgtttttcattcacctgattggtgggtggacactggtgctaatattcatgtatgtgctgacatttctctattttcttcttatcaggtcgggagaggttcctccttgttgatgggaaacgggtcgcttgcggctgttcatggtgttggtacggtcgatctgaagtttacttcgggaaagaccgtgcagctgaagaacgtgcagcatgtcccttcaataaagaagaatctagttagcggctctctattgtgtagagaagattttagacttgtgtttgagtccaataaatgtgtcgtatctaaatatgagacttttgttggaaaaggttatgacagcggaggcttgttccgcttttctttgaatgacatgtgtaataatcataatgctgtgaaccatattagcgagaatgatgagtctaatgtgtggcattcgcgactctgtcatgtgaatttcggttgtatgacgcgcttagctaacatgagtttaattccaaaattcactttggtaaaaggttccaagtgccatacttgtgttcaatcgaaacaacctcgcaagcctcacaaggcatctgaggcaaggaatttggcacctctagaacttgttcattccgatttgtgcgaaatgaacggcgtgttgactaaagggggaaagaaatatttcatgacactgatagatgattgcactagattttgctatgtgtatctattgaaaacaaaggatgaggcattgcatttctttaaaatctataaagctgaggtagaaaaccaacttgaaaggaaaatcaaacggttgaggtctgatagaggtggggagtatttttccaatgagtttgcatccttttgcgaagagtttggaattattcatgagatgacgcctccctattcaccccaatcaaatggggtggccgaaagaaagaaccgtactctaactgagatggtgaatgccatgttagacactgcggggctttccaaggaatggtggggtgaggcagttttgactgcgtgtcatgtcctgaataaaattccaatgaagcataaggaagtaacaccattcgaggaatgggaaaggaagaaattaaatctctcatacctacgaacatggggctgtttggccaaggtaaatgtacctatagccaaaaagcggaaacttggaccaaaaactgttgattgtgtgtttcttggttatgctatccacagtgtgggttatagattcttaatagtaaactctggagtacccgacatgcatgttggtacaattcttgagtccagagatgctacattctttgagaatgaatttcctatgaaatatacacctagcacttctagtaaagaaactgtcatgccccatgagtactttgcaccgatagaacacaatgatcaaacgcctgaggaaaatcctgaggaggacaacattgtagatactcgcaagagtaagagacaaagggttgcaaaatcctttggagatgactacattgtatacctcgtggatgacaccccaagaaccatagaagaggcatattcatctcctgacgctgactactggaaggaagcagtacgcagtgaaatggactcgattatgtctaatggtacttgggaagtcgttgagcgtccatatgggtgcaagcccgtaggatgcaaatgggttttcaagaaaaagcttaggcctgatggtacaatcgaaaagtacaaggcaaggcttgtggccaagggttatacccaaaaggaaggcgaggacttcttcgacacatactcaccagttgctcgcttgaccacgattcgagtactacttgctctggcagcctctcatggtcttctcgtccatcagatggacgttaagacagctttcctaaacggagagctggaggaggagatctatatggatcaaccagacgggtatgtactagaaggtcaggagggaatggtgtgtaaactattgaaatccttgtatggcctcaagcaagcacctaagcaatggcataagaagtttgacaccacgcttacatctgcaggctttgttgtgaacgaagctgacaaatgtgtatactatcgctatggtgggggagaaggggtgatcttgtgcttatatgtcgatgacatactgatctttgggaccagccttaatgtgattgaggaggtcaaagactatctgtccaagagttttgaaatgaaagatttgggagaggctgatgttattcttaacatcaaactacaaagaggagatgagggtgggattacacttgtgcaatcccactatgtggacaaggttttgagtcgctttggatatagtgactgcaagccagctcctactccttatgatcccagcgtgctattaaggaaaaaccgaagaatagcaagggatcagctgagatactctcaaatcattggttcattgatgtacttggctagcgcaacgaggcctgacatctcatttgctgtaagcaagctgagccggtttgtctcaaatccgggagatgatcattggcaggctctggaaagagtaatgcgctatctaaagggtactatgagctatggaattcactataccgggtatccaaaagtactagaagggtatagtgactcaaactggatatctgatgctgatgagataaaagccacaagtggatatgtgttcacacttggaggtggcgctgtttcctggaagtcttgcaagcagaccatcttaacgaggtcaacaatggaagcagaacttacagcactagatactgcgacagttgaggccgagtggcttcgtgaactcctgatggatttgccggtggttgaaaaaccagtgccagctatcctaatgaactgcgataatcaaacagtgattattaaagtgaacagttcaaaggacaacatgaagtcatctagacacatcaagagaagactgaaatctgtcagaaagcagaaaaactccggagtgatagcattggactatgtccaaacggctagaaatctggcagatcagtttaccaaggggctaccacgtaatgtgatagacagtgcatcgagggaaatgggcttgatacccacctaa

SEQ ID NO: 15397 - DNA, 1278 bp, Oryza sativa
  Clone ID: TFbOSC401432j.C1.o16.gm
atggcggagatggtgcgccacctggagctgctgctggaggtggtgcaccaggagctggagccggtgccgcgaacaacaacaccaacggaggcagttctgcctcacaatccagcggagggccattctcaggcgatgcaatgcttctatgtttcacggggcaaacgaagtgaaccacctctttctcctgaggaagaggctaagttcgaggcttcggattatctgttccgtggagcattgatcagtgtacttactgacaacatagtggacgtgtatatgcacatgccttctgggaaggacatgtgggatgcacttgaggccaagttcggagtttctgacgccggcagtgagctgtatgtcatagagcagttctatgactacaagatggagaaggcgagggcaaaggacgtccggggcaaaaaggttgagggaggttctagtgccaatatggtacagaagaagaaccctcatgcatcccgcaacaacaagaaagtcaagcctgatgtcaaacctaaggctgcaaccaactttaagaagaaaggcaagggaaaggcaaagggagactgctttgtgtgtggcaagtctgggcattgggccaaggactgtcctgagcgcaaagacaggaagtctgccaacatggtcattagcgagggcggaggaacatcggggtacgaacacaatgatcaaacgcctgaggaaaatcctgaggaggacaacattgtagatactcgcaagagtaagagacaaagggttgcaaaatcctttggagatgactacattgtatacctcgtggatgacaccccaagaaccatagaagagacatattcatctcctgacgctgactactggaaggaagcagtacacagtgaaatggactcgatgatgtctaatggtacttgggaagtcgttgagcgtccatatgggtgcaagcccgtaggatgcaaatgggttttcaagaaaaagcttaggcctgatggtacaattgaaaagtacaaggcaagacttgtggccaaggcctctcatgatcttctcgtccatcagatggacgttaagacagctttcctaaacggagagctggaggaggagatctatatggatcaaccagacagcctcaatgtgattgaggaggtcaaggactatctgtccaagagttttgaaatgaaggatttgggagaggctgatgttattcttaacatcaaactacaaagaggatatgaggaccatcttaacgaggtcaacaatggaagcagaacttacagcactagatactgcgacagttga

SEQ ID NO: 15398 - DNA, 3048 bp, Oryza sativa
  Clone ID: TFbOSC401539j.C1.o47.gm
atggaccatgttgtttatctaagtgctgataagctgctcaccgaacagtttgctgacaatgttgctatggcaagaccttcggatatcagggctgttcttgcgtcctatcaaggccgtgatatacctgctgagtttattgagcgttcaaaggagcaccagagagcctcgctcccggctagcactgccagaacgaatacaagtggacgctcgcccgaccaaccagaagcagagcccgtgcagattgtggcggcgatgcggcctcgtgcttttgctcccccttgcctgccgggcagtggcccgctgcctggcctggcggtccccgggcgcggcgacctcttcccggctgccggcagcgtcgtcggcaggagggccgctcccgctcccgccggccggggcgccgtcgctcgcgcagtggacgggccgtccgccgctgcggccgttgccgccgcggcggcgtccgccgcggcggacgtcccgcccccgcagatcacgtggcagatcgtcgtcggcgctgtagctggagtgactcccttcgtcgtcgccggggtcgagttcggcaagagaattattgcacagaagaaatgtgaaatctgtggaggctctgggcttgtgatgaagaaggattactacgttcgctgccaaggtcgttcacggcacctcctcctggcgcaccagctccggatccagctcctgtcggcgtcggcggcggcgcagctcctgtcggcggcggcgcaccaccgccgccattttgaggtgggggtcggaatgccacacgcgcgcgcgcgcgccgggccgtgggcgtggccgaggcgtggcgtggctggcggcgggcgggtgtcacgtcgctatccttttgcagccactaacccacgttcccacgattccctccgcaacaacgcgtccacgttctttctcctgatagataaggaggccgcgagtttttggggagtgcctcctgcacgactgctcatcgccatgtctggagttgctgccgccgctattggcggaggtggtgcgccgccgccgacaggagctgcgccgccgccgacgccgacaggagctggatccggagctgcgatgcagtgcttctatgtttcacggggtaaacgaagtgaaccacctctttctcctgaggaagaggctaagttcgaggcttcggattgcctgttccgtggagcattgatcagtgtactcactgacaacatagtggacgtgtacatgcacatgccttctgggaaggacatgtgggatgcacttgaggccaagttcggagtttctgacgccggtagtgagctgtatgtcatggagcagttctatgactacaagatggtcgatgaccgttctgtagtagaacaagctcatgagattcagatgctggctaaggaacttgagaacaacaactgtgagttgccggacaagtttgtggcgggtggcattattgccaaactaccaccttcttggtcggactttgccacttctctaaagcacaagagacaagagttcagtgttcctgatctcattggctctttgggtgttgaggagaaggtgagggcaaaggacgtccggggcaaaaaggttgagggaggttctagtgccaatatggtacagaagaagaaccctcatgcatcccacaacaacaagaaagtcaagcctgatgtcaaacccaaggctgcaaccaattttaagaagaaaggcaagggaaaggcaaagggagactgctttgtgtgtggcaagtctgggcattgggccaaggactgtcctgagcgcaaagacatgaagtctgccaacatgatcattagcgagggcggaggaacatcggggtacggtcgggagaggttcctccttgttgatgggaaacgggtcgcttgcggctgttcatgtgtgggttatagattcttaatagtaaactctggagtacccgacatgcatgctggtacaatttttgagtccagagatgctactttctttgagaatgaatttcctatgaaatatacacctagcacttctagtaaagaaactgtcatgccccatgagcactttgcaccgatagaacacaatgatcaaacgcctgaggaaaatcctgaggaggacaacattgtagatactcgcaagagtaagagacaaagggttgcaaaatcctttggagatgactacattgtatacctcgtggatgacaccccaagaaccatagaagaggcatattcatctcctgacgctgactactggaaggaagcagtacgcagtgaaatggactcgattatgtctaatggtacttgggaagtcgttgagcgtccatatggatgtaagcccgtaggatgcaaatgggttttcaagaaaaagcttaggcctgatggtacaatcgaaaagtataaggcaaggcttgtggccaagggttatacccaaaaggaaggcgaggatttcttcgacacatattcaccagttgctcgcttgactacgattcgagtactacttgctctggcagcctctcatggtcttctcgtccatcagatggacgttaagacaactttcctaaacggagagctggaggaggagatctatatggatcaaccagacgggtatgtactagaaggtcaggagggaatggtgtgtaaactattgaaatccttgtatggcctcaagcaagcacctaagcaatggcatgagaagtttgacaccacgcttacatctgcaggctttgttgtgaacgaagctgacaaatgtgtatactatcgctatggtgggggagaaggggtgatcttatgcttgtatgtcgatgacatactgatctttgggaccagccttaatgtgattgaggaggtcaaagactatctgtccaagagttttgaaatgaaggatttgggagaggctgatgttattcttaacatcaaactacaaagaggagatgagggtgggattacacttgtgcaatcccactatgtggacaaggatggcttatgtcttaatgtgatccgagtggcttttccaagcagagatgttgacctgcagaacatctcagaaggaacacacctatatgagttcgactgctag

SEQ ID NO: 15399 - DNA, 4167 bp, Oryza sativa
  Clone ID: TFbOSC401643j.C1.o14.fg
atgtctggagttgccgccgccactgctggcggaggtggtgcgccgccgccgacaggagctagatctggatctggagctggtgcgccaggaggtgccgtgaacgacaacaacaacggaggcaattctgcctcaccatccagcggagggccattctcggggtataatcttctcctcctgctactgttgttagcgctatcgctatactatgtgcgctatgttcttgttcctgttctacatgatgcctctagcatgttatcgcgttactggtatgttcctgttcctgacatttatgatgcgcatagtatgctactggttatgttaagatcaccttacactgcttatgtcatgatcattgtttcaatttcttggattaaaatatgccgattaatgactatatttccaacaatccaaaaacctgataggtcattttcggttgttggctttgctgctgcactgaaaccacatgcttttgatggttcaaactataagagatggaaagcacgtgcactattgtggttgacagcgatgcagtgcttctatgtttcacggggcaaacgaagtgaaccacctctttctcctgaggaagaggctaagttcgaggcttcggattgcctgttccgtggagcattgatcagtgtactcgctgacaacatagtggacgtgtacatgcacatgccttctgggaaggacatgtgggatgcacttgaggccaagttcggagtttctgacgccggcagtgagctgtatgtcatggagcagttctatgactacaagatggtcgatgaccgttctgtagtagaacaagctcatgagattcagatgctggctaaggaacttgagaacaacaactatgagttgccggacaagtttgtggcgggtggcattattgccaaactaccacattcttggtcggactttgccacttctctaaagcacaagagacaagagttcagtgttcctgatctcattggctctttgggtgttgaggagaaggcgagggcaaaggacgtccggggcaaaaaggttgagggaggttctagtgccaatatggtacagaagaagaaccctcatgcatcccacaacaacaagaaagtcaagcctgatgtcaaacccaaggctgcaaccaattttaagaagaaaggcaagggaaaggcaaagggagactgctttgtgtgtggcaagtctgggcattgggctaaggactgtcctgagcgcaaagacaggaagtctgccaacatgatcattagcgagggcggaggaacatcggggtacggtaaaatattacctacagttctctctgtttttcattcacctgattggtgggtggatactggtgctaatattcatgtcgggagaggttcctccttgttgatgggaaacaggtcgcttgcggctgttcatggtgttggtacggtcgatctgaagtttacttcgggaaagaccgtgcagctgaagaacgtgcatcatgtcccttcaataaagaagaatctagttagcggctctgtattgtgtagagaaggttttagacttgtgtttgagtccaataaatgtgtcgtatctaaatatgggacttttgttggaaaaggttatgacaacggaggcttgttccgcttttctttgaatgacatgtgtaataatcataatgctgtgaaccatattagcgagaatgatgagtctaatgtgtggcattcgcgactctgtcatgtgaatttcgattgtatgacgcgcttagctaacatgagtttaattccaaaattcactttggtcaaaggttccaagtgccatacttgtgttcaatcgaaacaacctcgcaagcctcacaaggcatctaaggcgaggaatttggcacctctagaacttgttcattccgatttgtgcgaaatgaacggcgtgttgactaaagggggaaagaaatatttcatgacactgatagatgattgcactagattttgctatgtgtatctattgaaaacaaaggatgaggcattgcattactttaaaatctataaagctgaggtagaaaaccaacttgaaaggaaaatcaaacggttgaggtctgatagaggtggggagtatttttccaatgagtttgcatccttttgcgaagagtttggaattattcatgagatgacgcctccctattcaccccaatcaaatggggtggccgaaagaaaaaaccgtactctaactgagatggtgaatgccatgttagatactgcggggctttccaaggaatggtggggtgaggcagttttgactgcgtgtcatgtcctgaataaaattccaatgaagcataaggaagtaacaccattcgaggaatgggaatggaagaaattaaatctctcatacctacgaacatggggctgtttggccaaggtaaatgtacctatagccaaaaagcggaaacttggaccaaaaactgttgattgtgtgtttcttggttatgctatccacagtgtgggttatagattcttaatagcaaactccggagtacccgacatgcatgctggtacaatttttgagtccagagatgctacattctttgagaatgaatttcctatgaaatatacacctagcacttctagtaaagaaactgtcatgccccatgagcactttgcaccgatagaacacaatgatcaaatgcctgaggaaaatcctgaggaggacaacattgtagatactcgcaagagtaagagacaaagggttgcaaaatcctttggagatgactacattgtatacctcgtggatgacaccccaagaaccgtagaagaggcatattcatctcctgacgctgactactggaaggaagcagtacgcagtgaaatggactcgattatgtctaatggtacttgggaagtcgttgagcgtccatatgggtgcaagcccataggatgcaaatgggttttcaagaaaaagcttaggcctgatggtacaatcgaaaagtacaaggcaaggcttgtggccaagagttatacccaaaaggaaggcgaggacttctttgacacatactcaccagttgctcgcttgaccacgattcgagtactacttgctctggcagcctctcatggtcttctcgtccatcagatggacgttaagacagctttcctaaacggagagctggaggaggagatctatatggatcaaccagacgggtatgtactagaaggtcaggagggaatggtgtgtaaactattgaaatccttgtatggcctcaagcaagcacctaagcaatggcatgagaagtttgacaccacgcttacatctgcaggctttgttgtgaacgaagctgacaaatgtgtatactatcgctatggtgggggagaaggggtgatcttgtgcttatatgtcgatgacatactgatctttgggaccagccttaatgtgattgaggaggttttgagtcgctttggatatagtgactgcaagccagctcctactccttatgatcccagcgtgctattaaggaaaaaccgaagaatagcaagggatcaactgagatactctcaaatcattggttcattgatgtacttggctagcgcaacgaggcctgacatctcatttgctgtaagcaagctgagccggtttgtctcaaatccgggagatgatcattggcaggctctggaaagagtaatgcgctatctaaagggcactatgagctatggaattcactataccgggtatccaaaagtactagaagggtatagtgactcaaactggatatctgatgctgatgagataaaagccacaagtggatatgcgttcacacttggaggtggcgctgtttcctggaagtcttgcaagcagaccatcttaacgaggtcaacaatggaagcagaacttacagcactagatactgcgacagttgaggccgagtggcttcgtgaactcctgatggatttgccggtggttgaaaaaccagtgccagctatcctaatgaactgcgataatcaaacagtgattattaaagtgaacagttcaaaggacaacatgaagtcatctagacacatcaagagaagactgaaatctgtcagaaagcagaaaaactccggagtgatagcattggactatgtccaaacagctagaaatctggcagatcagtttatcaaggggctaccacgtaatgtgatagacagtgcatcgagggaaatgggcttgatacccacctaa

SEQ ID NO: 15400 - DNA, 3987 bp, Oryza sativa
  Clone ID: TFbOSC401685j.C1.o115.fg
atgtctggagttgccaccgccgctgctggaggagatggcagaggtggtgcgccaggagctggagccggtgccgcgaacgacaacatcaacggagacaattctgcctcacaatccagcggagggccattcttggggtatatccttctcctgttccctttgttagcgctatcgctttattattatgtgcgctatgttcctgttcctgacattcatgatgcctctagtatgttattgcgttactgtaatgttcctgtttctgacattcatgatgcgcatagtatgctacttcatgatgcctctagcatgttattgcgttactgtaatattcctgttcctgacattcatgatacgcatagtatgctactggttatgttaagatcaccctacaccgcttatgccatgattattgttttaacattttggattaaaatatgccgattcatgactatatttccaacaatccaaaaacctgataggtcattttcggtagttggctttgctgctgcactgaaaccacatgcttttgatggttctaactataagagatggaaagcatgtgcactattgtggttgacagcgatgcagtacttctatgtttcacggggcaaacgaagtgaaccacctctttctcctgaggaagaggctaagttcgaggctttggattgcctgttccgtggagcattgatcagtgtactcgctgacaatatagtggacgtgtacatgcacatgccttccgggaaggacatgtgggatgcacttgaggccaagttcggagtttctgacgccggcagtgagctgtatgtcatggagcagttctatgactacaagatggtcgatgaccgttctgtagtagaccaacctcatgagattcagatgctggctaagaaacttgagaacaacaactgtgagttgccggacaagtttgtggcgggtggcattattgccaaactgccaacttcttggtcggactttgccacttctctaaagcacaagagacaagagttcagtgtttctgatctcattggctctttgggtgttgagaagaaggcgagggcaaaggacgttcggggcaaaaaggttgagggaggttctagtgccaatatggtacagaagaagaaccctcatgcatcccacaacaacaagaaagtcaaacctgatgtcaaacccaaggctgcaaccaactttaagaagaaaggcaagggaaaggcaaagggagactgctttgtgtgtggcaagtcagggcattgggccaaggactgtcctgagcgcaaagacaggaagtctgccaacatggtcattagcgagggcggaggaacatcggggtacggtaaaatattacctacagttctctctgttcttcacttacctgattggtgggtggacactggtgctaatattcatgtcgggagaggttcctccttgttgatgggaaacgggtcgcttgcggctgttcatggtgttggttccaagtgccatacttgcatccaatcgaaacaacctcgcaagcctcacaagtcatctgaggcgaggaatttggcacctctagaacttgttcattccgatttgtgcgaaatgaacgacgtgttgactaaagggggaaagaaatatttcatgacactgatagatgattgcactagattttgctatgtgtatctattgaaaacaaaagataaggcattgcattactttaaaatctataaagctgaggcagaaaaccaacttgaaaggaaaatcaaacggttgaggtctgatagaagtggggagtatttttccaatgagtttgcatcattttgcgaagagtttggaattattcatgagaggacacctccctattcaccccaatcaaatggggtggccgaaagaaagaaccgtactctaactgagatggtgaatgccatgttagacacttcagggctttccaaggaatggtggggtgaggcagttttgaccacctatcatgtcctgaataaaattccaatgaagcataaggaagtaacaccattcgaggaatgggaaaggaagaaattaaatctctcatacctacgaacatggggctgtttggccaaggtaaatgtacctatagccaaaaagcggaaacttggaccaaatactgttgattgtgtgttccttggttatgctattcacagtgtgggttatagattcttaatagtaaactttggtgtacccgacatgcatgttggtacaattcttgagtccagagatgctacattctttgagaatgaatttcccatgaaacatacacctagcacttctagtaaagaaactgtcatgccccatgagcactttgcaccggtagaacacaatgatcaaacgcctgaggaaaatcctgaggaggacaacattgtagatactcgcaagagtaagagacaaagggttgcaaaatcctttggagatgactacattgtatacctcgtggatgacacctcaagaaccatagaagaggcatattcatctcctgacgctgactactggaaggaagcagtacgcagtgaaatggactcgattatgtctaatggtacttgggaagtcgttgagctttcatatgggtgcaagcccgtaggatgcaaatgggttttcaagaaaaagcttatacctgatggtacaattgaaaagtacaaggcaagacttgcggccaagggttatacccaaaaggaaggcgaggacttcttcgacacatactcaccagttgctcgcttgaccacgattcgagtactacttgctctggcagcctctcatggtcttctcgtctatcagatggacgttaagacagctttcctaaacggagagctagaggaggagatctatatggatcaactagacgggtatgtactagaaggtcaggagggaatggtgtgtaaattgttgaaatccttgtatggcctcaagcaagcacctaagcaatggcatgagaagtttgacaccacgcttacatctgcaggctttgttgtgaatgaaactgacaaatgtgtgtactatcgctatggtgggggagaaggagtgatcttgtgcctatatgtcgatgacatattgatctttgggaccagccttaatgtgattgaggaggtcaaggactatctgtccaagagttttgaaataaaggatttgggagaggctgatgttattcttaacatcaaactacaaataggagatgagggtgggattacacttgtgcaatcccactatgtggacaaggttttgagtcgctttggatatagtgactgcaagccagctcctactccttatgatcccagcgtgctattaaggaaaaaccgaagaatagcaagggatcaactgagatactctcaaatcattggttcattgatgtacttggctagtgcaacgaggcctgacatctcatttgctgtaagcaagctgagccggtttgtctcaaatccgggacatgatcattggcaggctctggaaagagtaatgcgctatctaaagggcactatgagctatggaattcactataccgggtatccaaaagtactagaagggtatagtgactcaaactggatatctgatgctgatgagataaaagccacaagtggatatgtgttcacacttggaggtggcgctgtttcctggaagtcttgcaagcagaccatcttaacgaggtcaacaatggaagcagaacttacagcactagatactgcgacagttgaggccgagtggcttcatgaacttctgatggatttgccggtggttgaaaaatcagtgccagctatcctaatgaactgtgataatcaaacagtgattattaaagtgaacagttcaaaggacaacacgaagtcatctaggcacatcaagagaagactgaaatctgttagaaagcagaaaaactccggagtgatagcattggactatgtccaaacggctagaaatctggcagatcagtttaccaagggactaccacgtaatgtgatagacaatgcatcgagggaaatgggcttgatacccacctaa

SEQ ID NO: 15401 - DNA, 4086 bp, Oryza sativa
  Clone ID: TFbOSC401706j.C1.o4.fg
atgtccgcctctgttggcggaggtggtacgccaccgccgacaggagctggagctggatccggagttggtgcgccaggaggaggtgccgtgaacgactacaacaacggagacaattctgcctcaccatccagcggagggccattctcggggtataatcttctcctcctgttcccattgttagcgctatactatgttcctgttcctgttctacatgatgcctctagcatattatcgtgttactggtatgctcctgttcctgacattcatgatgcgcatagtatgctactggttatgttaagatcaccctacactgcttatgccatgatcattgtttctttttcttggattaaaatatgccgattaatgactatatttccaacaatccaaaaacctgataggtcattttcggtagttggctttgctgctgcactgaaaccacatgcttttgatggttcaaactataagagatggaaagcacgtgcactattgtggttgacagcgatgcagtgcttctatgtttcacggggcaaacgaagtgaaccacctctttctcctgaggaagatgccaagttcgaggcttcggattgcctgttccgtggagcattgatcagtgtactcgctgacaacatagtggacgtgtacatgcacatgccttctgggaaggacatgtgggatgcacttgaggccaagttcggagtctctgacgccggcagtgagctgtatgtcatggagcagttctatgactacaagatggtcgatgaccgttctgtagtagaacaagctcatgagattcagatgctggctaaggaacttgagaacaacaactgtgagttgccggacaagtttgtggcgggtggcattattgccaaactaccaccttcttggtcggactttgccacttctctaaagcacaagagacaagagttcagtgttcctgatctcattggctctttgggtgttgaggagaaggcgagggcaaaggacatccggggcaaaaaggttgagggaggttctagtgccaatatggtacagaagaagaaccctcatgcatcccacaacaacaagaaagtcaagcctgatgtcaaacccaaggctgcaaccaattttaagaagaaaggcaagggaaaggcaaagggagactgctttgtgtgtggcaagtctgggcattgggccaaggactgtcctgagcgcaaagacaggaagtctgccaacatgatcattagcgagggcggaggaacatcggggtacggtaaaatattacctacagttctttctgtttttcattcacctgattggtgggtggatactggtactaatattcatgtatgtgctgacatttctctgttttcttcttatcaggtcgggagaggttcctccttgttgatgggaaacgggttgcttgcggctgttcatggtgttggtacggtcgatctgaaatttacttcgggaaagaccgtgcagctgaagaacgtgcagcatgtcccttcaataaagaagaatctagttagcggctctctattgtgtagagaaggttttagacttgtgtttgagtccaataaatgtgtcgtatctaaatatgggacttttgttggaaaaggttatgacagcggaggcttgttccgcttttctttgaatgacatgtgtaataatcataatgctgtgaaccatattagcgagaatgatgagtctaatgtgtggcattcgcgactctgtcatgtgaatttcgggtgtatgacgcgcttagctaacatgagtttaattccaaaattcactttggtcaaaggttccaagtgccatacttgtgttcaatcgaaacaacctcgcaagcctcacaaggcatctgaggcgaggaatttggcacctctagaacttgttcattccgatttgtgcgaaatgaacggcgtgttgactaaagggggaaagaaatatttcatgacactgatagatgattgcactagattttgctatgtgtatctattgaaaacaaaggatgaggcattgcattactttaaaatctataaagctgaggtagaaaaccaacttgaaaggaaaatcaaacggttgaggtctgatagaggtggggagtatttttccaatgagtttgcatccttttgcgaagagtttggaattattcatgagatgacgcctccctattcaccccaatcaaatggggtggccgaaagaaagaaccgtactctaactgagatggtgaatgccatgttagacactgcggggctttcgaaggaatggtggggtgaggcagttttgactgcgtgtcatgtcctgaataaaattccaatgaagcataaggaagtaacaccattcgaggaatgggaaaggaagaaattaaatctctcatacctacgaacatggggctgtttggccaaggtaaatgtacctatagtcaaaaagcggaaacttggaccaaaaactgttgattgtgtgtttcttggttatgctatccacagtgtgggttatagattcttaatagtaaactctggagtacccgacatgcatgctggtacaatttttgagtccagagatgctatattctttgaaaatgaatttcctatgaaatatacacctagcacttctagtaaagaaactgtcatgccccatgagcactttgcaccgatagaacacaatgatgaaacgcctgaggaaaatcctgaggaggacaacattgtagatactcgcaagagtaagagacaaagggttgcaaaatcctttggagatgactacattgtatacctcgtggatgacaccccaagaaccatagaagaggcatattcatctcctgacgctgactactggaaggaagcagtacgcagtgaaatggactcgattatgtctaatggtacttgggaagtcgttgagcgtccatatgggtgcaagcccgtaggatgcaaatgggttttcaagaaaaagcttaggcctgatggtacaatcgaaaagtacaaggcaaggcttgtggccaagggttatacccaaaaggaaggcgaggatttcttcgacacatattcaccagttgctcgcttgactacgattcgagtactacttgctctggcagcctctcatggtcttctcgtccatcagatggacgttaagacagctttcctaaatggagagctggaggaggagatctatatggatcaaccagacgggtatgtactagaaggtcaggagggaatggtgtgtaaactattgaaatccttgtatggcctcaagcaagcacctaagcaatggcatgagaagtttgacatcacgcttacatctgcaggctttgttgtgaacgaagctgacaaatgtgtatactatcgctatggtgggggagaaggggtgatcttgtgcttgtatgtcgatgacatactgatctttgggaccagccttaatgtgattgaggaggtcaaagactatctgtccaagaattttgaaatgaaggatttgggagaggctgatgttattcttaacatcaaactacaaagaggagatgagggtgggattacacttgtgcaatcccactatgtggacaaggctctggaaagagtaatgcgctatctaaagggcactatgagctatggaattcactataccgggtatccaaaagtattagaagggtatagtgactcaaactggatatctgatgctgatgaaataaaagccacaagtggatatgtgttcacacttggaggtggcgctgtttcctggaagtcttgcaagcagaccatcttaacgaggtcaacaatggaagcagaacttacagcactagatactgcgacagttgaggctgagtggcttcgtgaactcctgatggatttgccggtggttgaaaaaccagtgccagctatcctaatgaactgcgataatcaaacagtgattattaaagtgaacagttcaaaggacaacatgaagtcatctagacacatcaagagaagactgaaatctgtcagaaagcagaaaaactccggagtgatagcattggactatgtccaaacggctagaaatctggcagatcagtttaccaaggggctaccacgtaatgtgatagacagtgcatcgagggaaatgggcttgatacccacctaa

SEQ ID NO: 15402 - DNA, 3333 bp, Oryza sativa
  Clone ID: TFbOSC401762j.C1.o8.fg
atgtctgcgcctggagccggtgccgctactgctgctggaggagatggcggaggtggtgcgccaccaggagctggagctggagctggaggtggtgcgccaggagctagagccggtgccgcgaacaacaacaccaacggaggcaattctgcctcacaatccagcggagggccattctcaagatcaccctacactgtttatgccatgattattgtcttaacattttggattaaaatatgccgatttatgaccatattttcaactatccaaaaacctgataggtcattttcggtagttggctttgctgctacattgaaaccacatgcttttgatggttctaactataagagatggaaagcacgtgcactattgtggttgacagcgatgcaatgcttctatgtttcacggggcaaacgaagtgaaccacctctttctcctgaggaagaggctaagttcgaggcttcggattgtctgttccgtggagcattgatcagtgtactcgctgacaacatagtggacgtgtacatgcacatgccttctgggaaggacatgtgggatgcacttgaggccaagttcggagtttctgacgctggcagtgcgctgtatgtcatggagcagttctatgactataagatggtcgatgaccgttctgtagtagaagctcatgagattcagatgctggctaaggaacttgagaacaacaactgcgagttgccggacaagtttgtggtgggtggcattattgccaaattgccaccttcttggtcggacttcgccacttctctaaagcacaagagacaagagttcagtgtttctgatttcattggttctttgggtgttgaggagaaggcgagggcaaaggacgtccggggcaaaaaggttgagggaggttctagtgccaatatggtacagaagaagaaccctcatgtatcccacaacaacaagaaagtcaagcctgatgtcaaatccaaggctgcaaccaactttaagaagaaaggcaagagaaaggcaaagggagactgctttgtgtgtggcaagtctgggcattgggctaaggactgtcctgagcgcaaagacaggaagtctgcgaacatggtcattagcgagggcggaggaacatcggggtacggtaaaatattacctacagttctctctgtttttcactcacctgattggtgggtggatactggtgctaatattcatgtcggaagaggttcctccttgttgatgggaaacgggtcgcttgcggctgttcatggtgttggtacggttgatctgaagtttacttcgggaaagaccatgcagctgaagaacgtgcagcatgtctcttcaataaagaagaatctagttagcggctctctattgtgtagagaaggttttagacttgtgtttgagtgcaataaatgtgtcgtatctaaatatgggacttttgttggaaaatgttatgacaacggagctgaggtagaaaaccaacttgaaaggaaaatcaaacggttgaggtctgatagaggtggggagtatttttccaatgagtttgcatccttttgcgaagagtttggaattattcatgagaggacgcctccctattcaccccaatcaaatggggtggccgaaagaaagaaccgtactctaactgagatggtgaatgccatgttagacactgcggggctttccaaggaatggtggggtgaggcagttttgactgcgtgtcatgtcctgaataaaattcgaatgaagcataaggaagtaacaccattcaaggaatgggaaaggaagaaattaaatctctcatacctacgaacatggggctgtttggccaaggtaaatgtacctataaccaaaaagcggaaacttggaccaaatattgttgattgtgtgttcctttgttatgctattcacagtgtgggttatagattcttaatagtaaactctggagtacccgacatgcatgttggtacaatttttgagtccagagatgctacattctttgagaatgaatttcccatgaaacatacacctagcacttctagtcaagaaactgtcatgccccatgagcactttgcaccgatagaacacaatgatcaaacgcctgaggaaaatcctgaggaggacaacattgtagatactcgcaagagtaagagacaaagggttacaaaatcctttggagatgactacattgtatacctcgtggatgacaccccaagaaccatagaagaggcatattcatctcctgacgctgactactggaaggaagcagtacgcagtgagatggactcgattatgtctaatggtacttgggaagtcgttgagcgtccatatgggtgcaagcccatggacgttaagacaactttcctaaacggagagctagaggaggagatctatatggatcaaccagacgggtatgtactagaagatcagaagggaatggtgtgtaaactgttgaaatccttgtatggcctcaagcaagcacctaagcaatggcatgagaagtttgacaccacgcttacatctgcaggcttcgttgtgaacgaagctgacaaatgtgtgtactatcgctatgatgggggagaaggagtgatcttgtgcttatatgtcgatgacatattgatctttgggaccagcctcaatgtgattgaggaggtcaaggactatctgtccaagagttttgaaatgaaggatttgggagaggctgatgttattcttaacatcaaactacaaagaggagatgagggtgggattgcacttgtgcaatccccactatgtggacaagatgatcattggcaggctctggaaagagtaatgcgctatctaaagggcactatgagctatggaattcactataccgggtatccaaaagtactagaagggtatagtgactcaaactggatatctgatgctgatgagataaaagccacaagtggatatgtgttcacacttggaggtggcgctgtttcctggaagtcttgcaagcagaccatcttaacgaggtcaacaatggaagcagaacttacagcactagatactgcgacagttgaggccgagtggcttcgtgaactcctgatggatttgccggtggttgaaaagccagtgtcagctatcctaatgaactgtgataatcaaacagtgattattaaagtgaacagttcaaaggacaacacgaagtcatctaggcatatcaagagaagactgaaatctgtcagaaagcagaaaaactccggagtgatagcattggactatgtccaaacggctagaaatctggcagatcagtttaccaaggggctaccacgtaatgtgatagacagtgcatcaaggaaaatgggcttgatacccacctaa

SEQ ID NO: 15403 - DNA, 3729 bp, Oryza sativa
  Clone ID: TFbOSC401880j.C1.o5.fg
atgtctggagttgccgccgccgctgctggaggagatggcggaggtggtgcgccgccgccgggagctggagccggaggtggtgcgccaggaggtgccgcgaacgacaacatcaacggaggcaattctgcctcacaatccagcggagggccattctcgggtgtactcgctgacaacatagtagacgtgtacatgcacatgccttctgggaaggacatgtgggatacacttgaggccaagttcggagtttctgacgccggcagtgagctgtatgtcatggagcagttctatgactacaagatggtcgatgaccgttctgtagtagaacaagctcatgagattcagatgctggctaaggaacttgagaacaacaactgtgcgttgccggacaagtttgtggcgggtggcattattgccaaactaccaccttcttggtcgaactttgccacttctctaaagcacaagagacaagagttcagtgtttctgatctcattggctctttgggtgttgaggagaaggcgagggcaaaggacgtccggggcaaaaaggttgagggaggttctagtgccaatatggtacagaataagaaccctcatgcatcccacaacaacaagaaagtcaagcctgatgtcaaacccaaggctgcaaccaactttaagaagaaaggcaagggaaaggcaaagggagactgctttgtgtgtggcaagtctgggcattgggccaaggactgtcctgagcgcaaagacaggaagtctgccaacatagtcattagcgagggcggaggaacatcggggtacggtaaaatattacctacagttctctctgtttttcactcacctgattggtcgcttgcgtcttttcatggtgttggtacggtcgatctgaagtttacttcgggaaagaccgtgcagctgaagaacgtgcagcatgtcccttcaataaagaagaatctagttagcggctctctattgtatagagaaggttttagacttgtgtttgagtccaataaatgtgtcgtatctaaatatgggacttttgttggaaaaggttatgacagcggaggcttgttccgcttttctttgaatgacatgtgtaataatcataatgctgtgaaccatattagcgagaatgatgagtctaatgtgtggcattcgcgactctgtcatgtgaatttcggttgtatgacgcgcttagctaacatgagtttaattccaaaattcactttggtcaaaggttccaagtgctatacttgcgttcaatcgaaacaacctcgcaagcctcacaaggcatctgaggcgaggaatttggcacctctagaacttgttcattccgatttgtgcgaaatgaacggcgtgttgactaaagggggaaagaaatatttcatgacactgatagatgattgcactagattttgctatgtgtatctattgaaaacaaaggatgaggcattgcattactttaaaatctataaagctgaggtagaaaaccaacttgaaaggaaaatcaaacggttgaggtctgatagaggtgggcagtatttttccaatgagtttgcatccttttgcgaagagtttggaattattcatgagaggacgcctccctattcaccccaatcaaatggggtggccgaaagaaagaaccgtactctaactgagatgatgaatgccatgttagacactgcggggctttccaaggaatggtggggtgaggcagttttgactgcgtgtcatgtcctgaataaaattccaatgaagcataaggaagtagcaccattcgaggaatgggaaaggaagaaattaaatctctcatacctacgaacatggggctgtttggccaaggtaaatgtacctataaccaaaaagcggaaacttggaccaaatactgttgattgtgtgttccttggttatgctattcacagtgtgggttatagattcttaatagtaaactctggagtacccgacatgcatgttggtacaattcttgagtccagagatgctacattctttgagaatgaatttcccatgaaacatacacctagcacttctagtaaagaaactgtcatgccccatgagcactttgcaccgacagaacacaatgatcaaacgcctgaggaaaatcctgaggaggacaacattatagatactcgcaagagtaagagacaaagggttgcaaaatcctttggagatgactacattgtatacctcgtggatgacaccccaagaaccatagaagaagcatattcatctcctgacgctgactactggaaggaagcagtatgcagtgaaatggactcgattatgtctaatggtacttgggaagtcgttgagcgtccatatgggtgcaagcccgtaggatgcaaatgggttttcaagaaaaagcttaggcctgatggtacaatcgaaaagtacaaggcaaggcttgtggccaagggttatacccaaaaggaaggcgaggacttcttcgacacatactcaccagttgctcgcttgaccacgattcgagtactacttgctctggcagcctctcatggtcttctcatccatcagatggacgttaagacagctttcctaaacggagagctggaggaggagatctatatggatcaaccagacgggtatgtactagaaggtcaggagggaatggcgtgtaaactgttgaaatccttgtatggcctcaagcaagcacctaagcaatggcatgagaagtttgacaccatgcttacatttgcaggctttgttgtgaacgaagctgacaaatgtgtatactatcgctatggtgggggagaaggggtgatcttgtgcttatatgtcgatgacatattgatctttgggaccagccttaatgtgattgaggaggtcaaggactatctgtccaagagttttgaaatgaaggatttgggagaggctgatgttatttttaacatcaaactacaaagaggagatgagggtgggattacacttgtgcaatcccactatgtggacaaggttttgagtcgctttggatatagtgactgcaagccagctcctactccttatgatcctagcgtgctattaaggaaaaaccgaagaatagcaagggatcaactgagatactctcaaatcattggttcattgatgtacttggctagcgcaacgaggcttgacatctcatttgctgcaagcaagctgagccggtttgtctcaaatccgggagatgatcattggcaggctctggaaagagtaatgcgctatctaaagggcactatgagctatggaattcactataccgggtatccaaaagtactagaagggtatagtgactcaaactggatatctaatgctgatgagataaaagccacaagtggatatgtgttcacacttggaggtggcgctgtttcctggaattcttgcaagcagaccatcttaacgaggtcaacaatggaagcagaacttacagcactagatactgcgacagttgaggccgagtggcttcgtgaactcctgatggatttgccagtggttgaaaaaccagtgccagctatcctaatgaactgtaataatcaaacagtgattattaaaatgaacagttcaaaggacaacatgaagtcatctaggcacatcaagagaagactgaaatccgtcagaaagcagaaaaactccggagtgatagcattggactatgtccaaactgctagaaatctggcagatcagtttaccaaggggctaccacgtaatgtgatagaaagtgcatag

SEQ ID NO: 15404 - DNA, 3807 bp, Oryza sativa
  Clone ID: TFbOSC401918j.C1.o5.fg
atgcagtgcttctatgtttcacggggcaaacgaagtgaaccacctctttctcctgaggaagaggctaagttcgaggcttcggattgcctgttccgtggagcattgatcagtgtactcgctgacaacatagtggacgtgtacatgcacatgccttctgggaaggacatgtgggatgcactcgaggccaagttcggagtctctgacgccggcagtgagctgtatgtcatggagcagttctatgactacaagatggtcgatgaccgttctgtagtagaacaagctcatgagattcagatgctggctaaggaacttgagaacaacaactgtgagttgccggacaagtttgtggcgggtggcattattgccaaactaccaccttcttggtcggactttgccacttctctaaagcacaagagacaagagttcagtgttcctgatctcattggctctttgggtgttgaggagaaggcgagggcaaaggacatccggggcaaaaaggttgagggaggttctagtgccaatatggtacagaagaagaaccctcatgcatcccacaacaacaagaaagtcaagcctgatgtcaaacccaaggctgcaaccaattttaagaagaaaggcaagggaaaggcaaaaggagactgctttgtgtgtggcaagtctgggcattgggccaaggactgtcctgagcgcaaagacaggaagtctgccaacatgatcattagcgagggcggaggaacatcggggtacggtaaaatattacctacagttctctctgtttttcattcacctgattggtgggtggatactggtgctaatattcatgtatgtgctgacatttctctgttttcttcttatcaggtcgggagaggttcctccttgttgatgggaaacgggtcgcttgcggctgttcatggtgttggtacggtcgatctgaagtttacttcgggaaagaccgtgcagctgaagaacgtgcagcatgtcccttcaataaagaagaatctagttagcggctctctattgtgtagagaaggttttagacttgtgtttgagtccaataaatgtgtcgtatctaaatatgggacttttgttggaaaaggttatgacagcggaggcttgttccgcttttctttgaatgacatgtgtaataatcataatgctgtgaaccatattagcgagaatgatgagtctaatgtgtggcattcgcgactctgtcatgtgaatttcggttgtatgacgcgcttagctaacatgagtttaattccaaaattcactttggtcaaaggttccaagtgccatacttatgttcaatcgaaacaacctcgcaagcctcacaaggcatctgaggcgaggaatttggcacctctagaacttgttcattccgatttgtgcgaaatgaacggcgtgttgactaaagggggaaagaaatatttcatgacactgatagatgattgcactagattttgctatgtgtatctattgaaaacaaaggatgaggcattgcattactttaaaatctataaagctgaggtagaaaaccaacttgaaaggaaaatcaaacggttgaggtctgatagaggtggggagtatttttccaatgagtttgcatctttttgcgaagagtttggaattattcatgagatgacgcctccctattcaccccaatcaaatggggtggccgaaagaaagaaccgtactctaactgagatggtgaatgccatgttagacactgcggggctttcgaaggaatggtggggtgaggcagttttgactgcgtgtcatgtcctgaataaaattccaatgaagcataaggaagtaacaccattcgaggaatgggaaaggaagaaattaaatctctcatacctacgaacatggggctgtttggccaaggtaaatgtacctatagtcaaaaagcggaaacttggacaaaaaaccgttgattgcgtgtttcttggttatgctatccacagtgtgggttatagattcttaatagtaaactctggagtacccgacatgcatgctggtacaatttttgagtccagagatgctacattctttgagaatgaatttcctatgaaatatacacctagcacttctagtaaagaaactgtcatgccccatgagcactttgcaccgatagaacacaatgatgaaacgcctgaggaaaatcctgaggaggacaacattgtagatactcgcaagagtaagagacaaagggttgcaaaatcctttggagatgactacattgtatacctcgtggatgacaccccaagaaccatagaagaggcatattcatctcctgacgctgactactggaaggaagcagtacgcagtgaaatggactcgattatgtctaatggtacttgggaagtcgttgagcgtccatatgggtgcaagcccgtaggatgcaaatgggttttcaagaaaaagcttaggcctaatggtacaatcgaaaagtacaaggcaaggcttgtggccaagggttatacccaaaaggaaggcgaggatttcttcgacacatattcaccagttgctcgcttgactacgattcgagtactacttgctctggcagcctctcatggtcttctcgtccatcagatggacgttaagacagctttcctaaacagagagctggaggaggagatctatatggatcaaccagacgggtatgtactagaaggtcaggagggaatggtgtgtaaactattgaaatccttgtatggcctcaagcaagcacctaagcaatggcatgagaagtttgacatcacgcttacatctgcaggctttgttgtgaacgaagctgacaaatgtgtatactatcgctatggtgggggagaaggggtgatcttgtgcttgtatgtcgatgacatactgatctttgggaccagccttaatgtgattgaggaggtcaaagactatctgtctaagaattttgaaatgaaggatttgggagaggctgatgttattcttaacatcaaactacaaagaggagatgagtgtgggattacacttgtgcaatcccactatgtggacaaggttttgagtctctttggatatagtgactgcaagccagctcctactcctgatgatcccagcgtgctattcaggaaaaaccgaagaatagcaagggatcagctgagatactctcaaatcattggttcattgatgtacttggctagcgcaacgaggcctgacatctcatttgctgtaagcaagctgagccggtttgtctcaaatccgggagatgatcattggcaggctctggaaagagtaatgcgctatctaaagggcactatgagctatggaattcactataccgggtatccaaaagtactagaagggtatagtgactcaaactggatatctgatgctgatgagataaaagccacaagtggatatgtgttcacacttggaggtggcgctgtttcctggaagtcttgcaagcagaccatcttaacgaggtcaacaatggaagcagaacttacagcactagatactgcgacagttgaggccgagtggcttcgtgaactcctgatggatttgccggtggttgaaaaaccagtgccagctatcctaatgaactgcgataatcaaacagtgattattaaagtgaacagttcaaaggacaacatgaagtcatctagacacatcaagagaagactgaaatatgtcagaaagcagaaaaactccggagtgatagcattggactatgtccaaacggctagaaatctggcagatcagtttaccaaggggctaccacgtaatgtgatagacagtgcatcgagggaaatgggcttgatacccacctaa

SEQ ID NO: 15405 - DNA, 4242 bp, Oryza sativa
  Clone ID: TFbOSC401921j.C1.o13.fg
atgtcgaacactggagacaaggagaaggagactcccgtcaacaccaacggaggcaatactgcctcaaactccagcggaggaccattcttggggtataaccttattacattatttcaattagaagttttactgttaatgttcatcgcaatgtcaacattgtgtcattatgtgattgttgatgcttattcaacgttaagcatgctcatgttgattacattcaccactatcactggatcaaatcctattgtaaatatcatgtttattatcttgttattttggattaaaatatgccgaattatgaccaaatttccaacaatccaaaaacctgataggtcattttcggtagttggctttgctgctacactgaaaccacatgcctttgatggttcaaactataagagatggaaagcacgtgcactattgtggttgacagcgatgcagtgcttctatgtttcacggggcaaacgaagtgaaccacctctttctcctgaggaagaggctaagttcgaggcttcggattgcctgttccgtggagcattgatcagtgtactcgctgacaacatagtggacgtgtacatgcacatgccttctgggaaggaaatgtgggatgcacttgaggccaagttcggagtttctgacgccggcagtgagctgtatgttatggagcagttctatgactacaagatggtcgatgaccgttctgtagttgaacaagctcatgagattcagatgccggctaaggaacttgagaacaacaactgtgagttgccggacaagtttgtggcaggtggcattattgccaaactaccgccttcttggtcggactttgccacttctctaaagcacaagagacaagagttcagtgttcctgatctcattggctctttgggtgttgaggagaaggcgagggcaaaggacgtccggggcaaaaaggttgagggaggttctagtgccaatatggtacagaagaagaaccctcatgcatcccacaactacaagaaagtcaagcctgatgtcaaacccaaggctgcaaccaattttaagaagaaaagcaagggaaaggcaaagggagactgctttgtgtgtggcaagtctgggcattgggccaaggactgtcctgagcgcaaagacaggaagtctgccaacatgatcattagcgagggcggaggaacatcggggtacagtaaaatattacctacagttctctctgtttttcattcacctgattggtgggtggacactggtgctaatattcatgtatgtgctgacatttctctattttcttcttatcaggtcgggagaggttcctccttgttgatgggaaacgggtcgcttgcggctgttcatggtgttggtacggtcgatctgaagtttacttcgggaaagaccgtgcagctgaagaacgtgcagcatgtcccttcaataaagaagaatctagttagcggctctctattgtgtagagaaggttttagacttgtgtttgagtccaataaatgtgtcgtatctaaatatgggacttttgttggaaaaggttatgacagcggaggcttgttccgcttttctttgaatgacatgtgtaataatcataatgctgtgaaccatattagcgagaatgatgagtctaatgtgtggcattcgcgactctgtcatgtgaatttcagttgtatgacgcgcttagctaacatgagtttaattctaaaattcactttggtaaaaggttccaagtgccatacttgtgttcaatcgaaacaacctcgcaagcctcacaaggcatctgaggcgaggaatttggcacctctagaacttgttcattccgatttgtgtgaaatgaacggcgtgttgactaaagggggaaagaaatatttcatgacactgatagatgattgcactagattttgctatgtgtatttattgaaaacaaaggatgaggcattgcatttctttaaaatctataaagctgaggtagaaaaccaacttgaaaggaaaatcaaacggttgaggtctgatagaggtggggagtatttttccaatgagtttgcatccttttgcgaagagtttggaattattcatgagatgacgcctccctattcaccccaatcaaatggggtggccgaaagaaagaaccgtactctaactgagatggtgaatgccatgttagacactgcggggctttccaaggaatggtggggtgaggcagttttgactgcgtgtcatgtcctgaataaaattccaatgaagcataaggaaataacaccattcgaggaatgggaaaggaagaaattaaatctctcatacctacgaacatggggctgtttggccaaggtaaatgtacctatagccaaaaagcggaaacttggaccaaaaactgttgattgtgtgtttcttggttatgctatccacagtgtgggttatagattcttaatagtaaactctggagtacccgacatgcatgttggtacaattcttgagtccagagatgctacattctttgagaatgaatttcctatgaaatatacacctagcacttctagtaaagaaactgtcatgccccatgagcactttgcaccgatagaacacaatgatcaaacgcctgaggaaaatcctgaggaggacaacattgtagatactcgcaagagtaagagacaaagggttgcaaaatcctttggagatgactacattgtatacctcgtggatgacaccccaagaaccatagaagaggcatattcatctcctgacgctgactactggaaggaagcagtacgcagtgaaatggactcgattatgtctaatggtacttgggaagtcgttgagcgtccatatgggtgcaagcccgtaggatgcaaatgggttttcaagaaaaagcttaggcttgatggtacaatcgaaaagtacaaggcaaggcttgtggccaagggttatacccgaaaggaaggcgaggacttcttcgacacatactcaccagttgcttgcttgactacgattcgagtactacttgctctggcagcctctcatggtcttctcgtccatcagatggacgttaagacagctttcctgaacggagagctggaggaggagatctatatggatcaaccagacgggtatgtactagaaggtcaggagggaatggtgtgtaaactattgaaatccttgtatggcctcaagcaagcacctaagcaatggcatgagaagtttgacaccacgcttacatctgcaggctttgttgtgaacgaagctgacaaatgtgtatactatcgctatggtgggggagaaggggtgatcttgtgcttatatgtcgatgacatactgatctttgggaccagccttaatgtgattgaggaggtcaaagactatctgtccaagagttttgaaatgaaagatttgggagaggctgatgttattcttaacatcaaactacaaagaggagatgagggtgggattacacttgtgcaatcccactatgtggacaaggttttgagtcgctttggatatagtgactgcaagccagctcctactccttatgatcccagcgtgctattaaggaaaaaccgaagaatagcaagggatcagctgagatactctcaaatcattggttcattgatgtacttggctagcgcaacgaggcctgacatctcatttgctgtaagcaagctgagccggtttgtctcaaatccgggagatgatcattggcaggctctggaaagagtaatgcgctatctaaagggtactatgagctatggaattcactataccgggtatccaaaagtacaagaagggtatagtgactcaaactggatatctgatgctgatgagataaaagccacaagtggatatgtgttcacacttggaggtggcactgtttcctggaagtcttgcaagcagaccatcttaacgaggtcaacaatggaagcagaacttacagcactagatactgcgacagttgaggccgagtggcttcgtgaactcctgatggatttgccggtggttgaaaaaccagtgccagctatcctaatgaactgcgataatcaaacagtgattattaaagtgaacagttcaaaggacaacatgaagtcatctagacacatcaagagaagactgaaatctgtcagaaagcagaaaaactccggagtgatagcattggactatgtccaaacggctagaaatctggcagatcagtttaccaaggggctaccacgtaatgtgatagacagtgcatcgagggaaatgggcttgatacccacctaa

SEQ ID NO: 15406 - DNA, 3090 bp, Oryza sativa
  Clone ID: TFbOSC401925j.C1.o1.fg
atgtcgaacactggagacaaggagaaggagactcccgtcaacaccaacggaggcaatactgcctcaaactccagcggaggaccattcttggggtataaccttattacattatttcaattagaagttttactgttaatgttcatcgcaatgtcaacattgtgtcattatgtgattgttgatgcttattcaacgttaagcatgctcatgttgattacattcaccactatcactggatcaaatcctattgtaaatatcatgtttattatcttgttattttggattaaaatatgccgaattatgaccaaatttccaacaatccaaaaacctgataggtcattttcggtagttggctttgctgctacactgaaaccacatgcctttgatggttcaaactataagagatggaaagcacgtgcactattgtggttgacagcgatgcagtgcttctatgtttcacggggcaaacgaagtgaaccacctctttctcctgaggaagaggctaagttcgaggcttcggattgcctgttccgtggagcattgatcagtgtactcgctgacaacatagtggacgtgtacatgcacatgccttctgggaaggaaatgtgggatgcacttgaggccaagttcggagtttctgacgccggcagtgagctgtatgttatggagcagttctatgactacaagatggtcgatgaccgttctgtagttgaacaagctcatgagattcagatgccggctaaggaacttgagaacaacaactgtgagttgccggacaagtttgtggcaggtggcattattgccaaactaccgccttcttggtcggactttgccacttctctaaagcacaagagacaagagttcagtgttcctgatctcattggctctttgggtgttgaggagaaggcgagggcaaaggacgtccggggcaaaaaggttgagggaggttctagtgccaatatggtacagaagaagaaccctcatgcatcccacaactacaagaaagtcaagcctgatgtcaaacccaaggctgcaaccaattttaagaagaaaagcaagggaaaggcaaagggagactgctttgtgtgtggcaagtctgggcattgggccaaggactgtcctgagcgcaaagacaggaagtctgccaacatgatcattagcgagggcggaggaacatcggggtacagtaaaatattacctacagttctctctgtttttcattcacctgattggtgggtggacactggtgctaatattcatgtcgggagaggttcctccttgttgatgggaaacgggtcgcttgcggctgttcatggtgttggtacggtcgatctgaagtttacttcgggaaagaccgtgcagctgaagaacgtgcagcatgtcccttcaataaagaagaatctagttagcggctctctattgtgtagagaaggttttagacttgtgtttgagtccaataaatgtgtcgtatctaaatatgggacttttgttggaaaaggttatgacagcggaggcttgttccgcttttctttgaatgacatgtgtaataatcataatgctgtgaaccatattagcgagaatgatgagtctaatgtgtggcattcgcgactctgtcatgtgaatttcagttgtatgacgcgcttagctaacatgagtttaattctaaaattcactttggtaaaaggttccaagtgccatacttgtgttcaatcgaaacaacctcgcaagcctcacaaggcatctgaggcgaggaatttggcacctctagaacttgttcattccgatttgtgtgaaatgaacggcgtgttgactaaagggggaaagaaatatttcatgacactgatagatgattgcactagattttgctatgtgtatttattgaaaacaaaggatgaggcattgcatttctttaaaatctataaagctgaggtagaaaaccaacttgaaaggaaaatcaaacggttgaggtctgatagaggtggggagtatttttccaatgagtttgcatccttttgcgaagagtttggaattattcatgagatgacgcctccctattcaccccaatcaaatggggtggccgaaagaaagaaccgtactctaactgagatggtgaatgccatgttagacactgcggggctttccaaggaatggtggggtgaggcagttttgactgcgtgtcatgtcctgaataaaattccaatgaagcataaggaaataaccccattcgaggaatgggaaaggaagaaattaaatctctcatacctacgaacatggggctgtttggccaaggtaaatgtacctatagccaaaaagcggaaacttggaccaaaaactgttgattgtgtgtttcttggttatgctatccacagtgtgggttatagattcttaatagtaaactctggagtacccgacatgcatgttggtacaattcttgagtccagagatgctacattctttgagaatgaatttcctatgaaatatacacctagcacttctagtaaagaaactgtcatgccccatgagcactttgcaccgatagaacacaatgatcaaacgcctgaggaaaatcctgaggaggacaacattgtagatactcgcaagagtaagagacaaagggttgcaaaatcctttggagatgactacattgtatacctcgtggatgacaccccaagaaccatagaagaggcatattcatctcctgacgctgactactggaaggaagcagtacgcagtgaaatggactcgattatgtctaatggtacttgggaagtcgttgagcgtccatatgggtgcaagcccgtaggatgcaaatgggttttcaagaaaaagcttaggcttgatggtacaatcgaaaagtacaaggcaaggcttgtggccaagggttatacccgaaaggaaggcgaggacttcttcgacacatactcaccagttgcttgcttgactacgattcgagtactacttgctctggcagcctctcatggtcttctcgtccatcagatggacgttaagacagctttcctgaacggagagctggaggaggagatctatatggatcaaccagacgggtatgtactagaaggtcaggagggaatg

SEQ ID NO: 15407 - DNA, 3586 bp, Oryza sativa
  Clone ID: TFbOSC402516j.C1.o2.np
tggttgttgcggcgcaatatgattataggcaattttcctctatttcgtccataggtgccaaatttgggtgtaaacagctggctaaggaacttgagaacaacaactgtgagttgctggacaagtttgtggcgggtggcattattgccaaattgccaccttcttgctcggactttgccacttgtctaaagcacaagagataagagttcagtgtttctgatctcattggctctttgggtgttgaggagaaggcgagggcaaaggacgtccagggcaaaaagattgagggaggttctagtgccaatatggtacagaagaagaaccctcaagcatcccacaacaacaagaaagtcaagcctgatgtcaaacccaaggctgcaaccaactttaagaagaaaggcaagggaaaggcaaagggagactgctttgtgtgtggcaagtctgggcattgggccaaggattgtcctgagcgcaaagacaggaagtctgctaacatggtcattagcgagggcggaggaacatcggggtacggtaaaatattacctacagttctctctgtttttcactcacctgattggtgggtggatactgtgctaatattcatgtatgtgctgacatttctctgttttcttcttatcaggtcgggagaggttcctccttgttgatgggaaacgggtcgcttgcggctgttcatggtgttggtacgatcgatctgaagtttacttcgggaaataccgtgcagctgaagaacgtgcagcatgtcccttcatatataaagaagaatcttgttagcggctctctattgtgtagagaaggttttagacttgtgtttgagtccaataaatgtgtcgtatctaaatatgagacttttgttggaaaaggttatgacagcggaggcttgtttcgctttgctttgaatgacatgtgtaataatcataatgctgtgaaccatattagcgagaatgatgagtctaatgtgtggcattcgcgactctgtcatgtgaatttcggttgtatgacgcgcttagctaacatgagtttaattccaaaattcactttggtcaaaggttccaagtgccatacttgtgttcaatcgaaacaacctcgtaagcctcacaaggcatctgaggcgaggaatttggcacctctagaacttgttcattccgatttgtgcgaaatgaacagcgtgttgactaaagggggaaagaaatatttcatgacactgacagatgattgcactagattttgctatgtgtatctattgaaaagaaaggatgaagcattgcattactttaaaatctataaagctgaggtagaaaaccaacttgaaaggaaaatcaaacggttgaggtctgatagaggtagggagtatttttccaatgagtttgcatccttttgcgaagagtttggaattattcatgagagaacgcctccctatttaccccaatcaaatggggtggccgaaagaaagaaccgtactctagctgagatagtgaatgctatgttagacactacggggctttgcaaggaatggtggggtgaggcagttttgactgcgtgttatgtcctgaataaaattccaatgaagcataagaaagtaacaccattcgaggaatgggaaaggaagaaattaaatctctcatacctacgaacatggggctgtttggccaaggtaaatgtacctatagccaaaaagcggaaacttggaccaaatactgttgattgtgtgttccttggttatgctattcacagtgtgggttatagattcttaatagtaaactctggagtacccgacatgcatgttggtacaatttttgagtccagagatgctatattctttgagaatgaatttcccatgaaacatacacctagcacttctagtcaagaaactgtcatgccccatgagcactttgcaccgatagaacacaatgatcaaacgcctaagaaaaatcctgaggaggacaacattgtagatactcgcaagagtaagagacaaagggttgcaaaatcctttggagatgactacattgtatacctcgttgatgacaccccaagaaccatagaagaggcatattcatctcctgacgctgactactggaaggaagcagtacgtagtgaaatggacccgattatgtctaatggtagttgggaagtcgttgagcgtccatatggctgcaagcccataggatgcaaatgggttttcaagaaaaagtttaggcctaatggtacaattgaaaagtacaaggcaaggcttgtgcccaagggttatacccaaaaggaaggcgaggacttctttgacatatactcaccagttgctcgcttgaccacgattcgagtactacttgctctggcagcctctcatggtcttctcgtccatcagatggacgttaagacagctttcctaaacggagagctggaggaggagatctatatggatcaactagacgggtatgtactagaaggtcgggagggaatggtgtgtaaactgttgaaatccttgtatggcatcaagcaagcacctaagcaatggcatgaaaagtttgacaccacgcttacatctgtaggctttgttgtgaacgtagttgacaaatgtatgtactatcgctatggtgggggagaaggagtgatcttgtgcttatatgtcgatgacatattgatctttgggatcagccttaatgtgattgaggaggtcaaggactatctgtccaagagttttgaaatgaaggatttgggagaggctgatgttatccttaacatcaaactacaaagaggagatgagggtgggattacacttgtgcaatcccactatgtggacaaggttttgagtcgctttggatatagtgactgcaagccagctcctactccttatgatcccagcgtgctattaagaaaaaaccgaagaatagtaagggatcaactgagatactctcaaatcattggttcattgatatacttggctagtgcaacgaggcctgacatctcatttgctgtaagcaagctgagccggtttgtctcaaatccgggagatgatcattggcaggctctggaaagagtaatgcgctatctaaagggcactatgagctatggaattcactataccgggtatccaaaagtactagaagggtatagtgactcaaactggatatctgatgctgatgagataaaagtcacaagtggatatgtgttcacacttggaggtggcgctgtttcctggaagtcttgcaagcagaccatcttaacgaggtcaacaatggaagtagaacttacagcactagatactgcgacagttgaggccgagtggcttcgtgaactcctgatggatttgtcggtggttgaaaaaccagtgccagctatcctaatgaactgtgataatcaaacagtgattattaaattgaacagttcaaaggacaacatgaagttatctaggcatatcaagagaagactgaaatctgtcagaaagtagaaaaactccggagtgatagcattggactatgtccaaacggctagaaatctggcagatcagtttaccaaggggctaccacgtaatgtgatagatagtgcatcgagggaaatgggcatgatacctacc

SEQ ID NO: 15408 - DNA, 3906 bp, Oryza sativa
  Clone ID: TFbOSC402776j.C1.o10.gm
atgcagtgcttctatgtttcacggggcaaacgaagtgaaccacctctttctcctgaggaagaggctaagttcgaggcttcggattgcctgttccgtggagcattgatcagtgtactcgctgacaacatagtggacgtgtacatgcacatgccttctgggaaggacatgtgggatgcacttgaggccaagttcggagtttctgacgccggcagtgagctgtatgtcatggagcagttctatgactacaagatggtcgatgaccgttctgtagtagaacaagctcatgagattcagatgctggctaaggaacttgagaacaacaactgtgagttgccggacaagtttgtggcgggtggcattattgccaaactaccaccttcttggtcggactttgccacttctctaaagcacaagagacaagagttcagtgttcctgatctcattggctctttgggtgttgaggagaaggcgagggcaaaggacgtccggggcaaaagggttgagggaggttctagtgccaatatggtacagaagaagaaccctcatgcatcccacaacaataagaaagtcaagcctgatgtcaaacccaaggctgcaaccaattttaagaagaaaggcaagggaaaggcaaagggagactgctttgtgtgtggcaagtctgggcattgggccaaggactgtcctgagcgcaaagacaggaagtctgccaacatagtcattagcgagggcggaggaacatcggggacggtcgggagaggttccttcttgttgatgggaaacgggtcgcttgcggctgttcatggtattgccaaaaagcggaaacttggaccaaaaactgttgattgtgtgttccttggttatgctatccacagtgtgggttatagattcttaatagtaaactctggtgtacccgacatgcatgctggtacaattcttgagtccagagatgctacattctttgagaatgagtttcctatgaaatatacacctagcacttctagtaaagaaactgtcatgccccatgagcactttgcaccgatagaacacgatgatcaaacgcctgaggaaaatcctgaggaggacaacattgtagatactcgcaagagtaagagacaaagggttgcaaaatcctttggagatgactacattgtatacctcgtggatgacaccccaagaaccatagaagaggcatattcatctcctgacgctgactactggaaggaagcagtacgcagtgaaatggactcgattatgtctaatggtacttgggaagtcgttgagcgtccatatgggtgcaagcccgtaggatgcaaatgggttttcaagaaaaagcttaggcctgatggtacaatcgaaaagtacaaggcaaggcttgtggccaagggttatacccaaaaggaaggcgaggacttcttcaacacatactcaccagttgctcgcttgaccacgattcgagtactacttgctctggcagcctctcatggtcttctcgtccatcagatggacgttaagacagctttcctaaacggagagctggaggaggagatctatatggatcaaccagacgggtatgtactagaaggtcaggagggaatggtgtgtaaactattgaaatccttgtatggcctcaagcaagcacctaagcaatggcatgagaagtttgacaccacgcttacatctgcaggctttgttgtgaacgaagctgacaaatgtgtatactatcgctatggtgggggagaaggggtgatcttgtgcttgtatgtcgatgacatactgatctttgggaccagccttaatgtgattgaggaggtcaaagactatctgtccaagagttttgaaatgaaggatttgggagaggctgatgttattcttaacatcaaacttcaaagaggagatgagggtgggattacacttgtgcaatcccactatgtggacaaggttttgagtcgctttggatatagtgactgcaagccagctcctactccttatgatcccagcgtgctattaaggaaaaaccgaagaatagcaagggatcaactaagatactctcaaatcattggttcattgatgtacttggctagcgcaacgaggcctgacatctcatttgctgtaagcaagctgagccggtttgtctcaaatccgggagatgatcattggcaggctctggaaagagtaatgcgctatctaaagggcactatgagctatggaattcactataccgggtatccaaaagtactagaagggtatggtgactcaaactggatatctgatgctgatgagataaaagccacaagtggatatgtgttcacacttggaggtggcgctgtttcctggaagtcttgcaagcagaccatcttaacaaggtcaacaatggaagcagaacttacagcactagatactgcgacagttgaggccgagtggcttcgtgaactcctgatggatttgccggtggttgaaaaaccagtgccagctatcctaatgaactgcgataatcaaacagtgattattaaagtgaacagttcaaaggacaacatgaagtcatctagacacatcaagagaagactgaaatctgtcagaaagcagaaaaactccggagtgatagcattggactatgtccaaacggctagaaatctggcagatcagtttaccaaggggctaccacgtttttggggagtgcctcctgcacgactgctcatcgccatgtctggagttgctgccgccgctactggcccgccgacaggagctggtggtacgccgccgccgacaggagctggatccggagctggtgcgccaggaggaggtgccgtgaacgactacaacaacggaggcaattctgcctcaccatccagcggagggccattctcgggggacggctatgcatttgcatccacagagaacagcatggttatctacaacattaatgtggctcctctgataaaaagtaacaaatacacgcttttggctgagcggacgaggaagtgggaggaggagaagaggcaggagcgccgtgagggcaaggccccggcggctcccgccggcaaccggcgaggtgaggccaagcagaaggccaccgccgaggacatcgacgatggcgacgaggacttggggttccaggagcctgaggccaccgtcgccaccgtcgatgggggagcgtgcgctcacgcttctcgctggagcctcaaggccatgaagcgcgagcttctggccgcggcccctacccatgaggcgacgcggcgggcgcggtggtcggaggttgccctcaccttcgaccagaccgaccacccgccgtgcgttgcccggggaggacagatcgcgatggtggtttcccccaccgtttgcaatgtgaagttggggcgtgtcctcatagacgggggtgcagccctcaacatcctttcccccgtagcctttgacgccatcaaggccctggggatggtgctccggccgtcccagccgatcatcggtgtgacgctggggcacacctggccgctgggtcatatcgacctcccggtcaccttcggtggttccgccaacttccgcacggagcgggtggacttcgatgtggcggacctcagtctgccctacaacgcggtcctggggaggcccgcgttggtgaagttcatggcggcggtccactacgcctatctccagatgaagatgccgggccccggtggccccatcaccgtccatggcgacctcaaagttgcgcttgcttgtatggagcagcacgcggaccacctcgccgcggcgtccaagcccgcgggtggcgacgagaggctcagcgcctccgtcccggccgccccgaggcagcggatggtcacgtgcgacgaggtcccggtcaaggaggttgccctgggcgacggcccgtccaagaccacacgaatcggtggtcttctggacgacaaatag

SEQ ID NO: 15409 - DNA, 4317 bp, Oryza sativa
  Clone ID: TFbOSC406028j.C1.o4.fg
atgtctggaggtgcgccgccgccgacaggagctggatccggagctggtgcgccaggaggaggtgccgtgaacgactacaacaacggaggcaattctgcctcaccatccagcggagggccattctcggggtataatcttctccttctactgctgttagcgctactcctgttcccattgttagcgctatactgtgtgcgctatgttcttgttcctgttctacatgatgcctctagcatgttatcgcattactggtatgttcctgtttctgacattcatgatgcgcatagtatgctactggttatgttaagatcaccctacactgcttatgccatgatcatagttttaatttctaggattaaaatatgccgaataatgactatatttccaacaatccaaaaacctgataggtcattttcggtagttggctttgctgctgcactgaaaccacatgcttttgatggttcaaactataagagatggaaagcacgtgcactattgtggttgacagcgatgcagtgcttctatgtttcacggggtaaacgaagtgaaccacctctttctcctgaggaagaggctaagttcgaggcttcggattgcctgttccgtggagcattgataagtgtactcgctgacaacatagtggacgtgtacatgcacatgccttctgggaaggacatgtgggatgcacttgaggccaagttcggagtttctgacgccggcagtgagctgtatgtcatggagcagttctatgactacaagatggtcgatgaccgttctgtagtagaacaagctcatgagattcagatgctggctaaggaacttgagaacaacaactgtgagttgccggacaagtttgtggcgggtggcattattgccaaactaccaccttcttggtcggactttgccacttctctaaagcacaagagacaagagttcagtgttcctgatctcattggctctttgggtgttgaggagaaggcgagggcaaaggacatccggggcaaaaaggttgagggaggttctagtgccaatatggtacagaagaagaaccctcatgcatcccacaacaacaagaaagtcaagcctgatgtcaaacccaaggctgcaaccaattttaagaagaaaggcaagggaaaggcaaagggagactgctttgtgtgtggcaagtctgggcattgggccaaggactgtcctgagcgcaaagacaggaagtctgccaacatgatcattagcgagggcggaggaacatcggggtacggtaaaatattacctacagttctctctgtttttcattcacctgattggtgggtggatactggtgctaatattcatgtatgtgctgacatttctctgttttcttcttatcaggtcgggagaggttcctccttgttgatgggaaacgggtcgcttgcggctgttcatggtgttggtacggtcgatctgaagtttacttcgggaaagaccgtgcagctgaagaacgtgcagcatgtcccttcaataaagaagaatctagttagcggctctctattgtgtagagaaggttttagacttgtgtttgagtccaataaatgtgtcgtatctaaatatgggacttttgttggaaaaggttatgacagcggaggcttgttccgcttttctttgaatgacatgtgtaataatcataacgctgtgaaccatattagcgagaatgatgagtctaatgtgtggcattcgcgactctgtcatgtgaatttcggttgtatgatgcgcttagctaacatgagtttaattccaaaattcactttggtcaaaggttccaagtgccatacttgtgttcaatcgaaacaacctcgcaagcctcacaaggcatctgaggcgaggaatttggcacctctagaacttgttcattccgatttgtgcgaaatgaacggcgtgttgactaaagggggaaagaaatatttcatgacactgatagatgattgcactagattttgctatgcatatctattgaaaacaaaggatgaggcattgcattactttaaaatctataaagctgaggtagaaaaccaacttgaaaggaaaatcaaacggttgaggtctgatagaggtggggagtatttttccaatgagtttgcatccttttgcgaagagtttggaattattcatgagatgatgcctccctattcaccccaatcaaatggggtggccgaaaaaaagaaccgtactctaactgagatggtgaatgccatgttagacactgcggggctttccaaggaatggtggggtgaggcagttttgactgcgtgtcatgtcctgaataaaattccaatgaagcacaaggaagtaacaccattcgaggaatgggaaaggaagaaattaaatctctcatacctacgaacatggggctgtttggccaaggtaaatgtacctatagtcaaaaagcggaaacttggaccaaaaactgttgattgtgtgtttcttggttatgctatccacagtgtgggttatagattcttaatagtaaactctggagtacccgacatgcatgctggtacaatttttgagtccagagatgctactttctttgagaatgaatttcctatgaaatatacatctagcacttctagtaaagaaactgtcatgccccatgagcactttgcaccgatagaacacaatgatcaaacgtctgaggaaaatcctgaggaggacaacattgtagatactcgcaagagtaagagacaaagggttgcaaaatcctttggagatgactacattgtatacctcgtggatgacaccccaagaaccatagaagaggcatattcatctcctgacgctgactactggaaggaagcagtacgcagtgaaatggactcgattatgtctaatggtacttgggaagtcgttgagcgtccatatggatgtaagcccgtaggatgcaaatgggttttcaagaaaaagcttaggcctgatggtacaatcgaaaagtataaggcaaggcttgtggccaagggttatacccaaaaggaaggcgaggatttcttcgacacatattcaccagttgctcgcttgactacgattcgagtactacttgctctggcagcctctcatggtcttctcgtccatcagatggacgttaagacagctttcctaaacggagagctggaggaggagatctatatggatcaaccagacgggtatgtactagaaggtcaggagggaatggtgtgtaagctattgaaatacttgtatggcctcaagcaagcacctaagcaatggcatgagaagtttgacaccacgcttacatctgcaggctttgttgtgaacgaagctgacaaatgtgtatactatcgctatggtgggggagaaggggtgatcttatgcttgtatgtcgatgacatactgatctttgggaccagccttaatgtgattgaggaggtcaaagactatctgtccaagagttttgaaatgaaggatttgggagaggctgatgttattcttaacatcaaactacaaagaggagatgagggtgggattacacttgtgcaatcccactatgtggacaaggttttgagtcgctttggatatagtgactgtaagccagctcctactccttatgatcccagcgtgctattaaggaaaaaccgaagaatagcaagggatcaactgagatactctcaaatcattggttcattgatgtacttggctagcgcaacgaggcctgacatctcatttgctgtaagcaagctgagccggtttgtctcaaatccgggagatgatcattggcaggctctggaaagagtaatgcgctatctaaagggcactatgagctatggaattcactataccgggtatccaaaagtactagaagggtatagtgactcaaactggatatctgatgctgatgagataaaagccacaagtggatatgcgttcacacttggaggtggcgctgtttcctggaagtcttgcaagcagaccatcttaacgaggtcaacaatggaagcagaacttacagcactagatactgcgacagttgaggctgagtggcttcgtgaactcctgatggatttgccggtggttgaaaaaccagtgccagctatcctaatgaactgcgataatcaaacagtgattattaaagtgaacagttcaaaggacaacatgaagtcatctagacacatcaagagaagactgaaatctgtcagaaagcagaaaaactccggagtgatagcattggactatgtccaaacggctagaaatctggcagatcagtttaccaaggggctaccacgtaatgtgatagacagtgcatcgagggaaatgggcttgatacccacctaa

SEQ ID NO: 15410 - DNA, 4149 bp, Oryza sativa
  Clone ID: TFbOSC408407j.C1.o3.fg
atgtcgaacactggagacaaggagaaggagactcccgtcaacaccaacggaggcaatactgcctcaaactccagcggaggaccattcttggggtataaccttattacattatttcaattagaatttttactgttaatgttcatcacaatgtcaacattgtgtcattatgtgattgttgatgcttattcaacgttaagcatgctcatgttgattacattcaccactatcactggatcaaatcctattgtaaatatcatgtttattatcttgttattttggattaaaatatgccgaattatgaccaaatttccaacaatccagaaacctgataggtcattttcggtagttggctttgctgctgcactgaaaccacatgcttttgatggttcaaactataagagatggaaagcacgtgcactattgtggttgacagcgatgcagtgcttctatgtttcacggggcaaacgaagtgaaccacctctttctcctgaggaagaggctaagttcgaggcttcggattgcctgttccgtggagcattgatcagtgtactcgctgacaacatagtggacgtgtacatgcacatgccttctgggaaggacatgtgggatgcacttgaggccaagttcggagtttctgacgccggcagtgagctgtatgttatggagcagttctatgactacaagatggtcgatgaccgttctgtagttgaacaagctcatgagattcagatgctggctaaggaacttgagaacaacaactgtgagttgccggacaagtttgtggcaggtggcattattgccaaactaccaccttcttggtcggactttgccacttctctaaagcacaagagacaagagttcagtgttcctgatctcattggctctttgggtgttgaggagaaggcgagggcaaaggacgtccggggcaaaaaggttgagggaggttctagtgccaatatggtacagaagaagaaccctcatgcatcccacaacaacaagaaagtcaagcctgatgtcaaacccaaggctgcaaccaattttaagaagaaaagcaagggaaaggcaaagggagactgctttgtgtgtggcaagtctgggcattgggccaaggactgtcctgagcgcaaagacaggaagtctgccaacatgatcattagcgagggcggaggaacatcggggtacggtaaaatattacctacagttctctctgtttttcattcacctgattggtgggtggacactggtgctaatattcatgtatgtgctgacatttctctattttcttcttatcaggtcgggagaggttcctctttgatgatgggaaacgggtcgcttgcggctgttcatggtgttggtacggtcgatctgaagtttacttcgggaaagaccgtgcagctgaagaacgtgcagcatgtcccttcaataaagaagaatctagttagcggctctctattgtgtagagaaggttttagacttgtgtttgagtccaataaatgtgtcgtatctaaatatgggacttttgttggaaaaggttatgacagcggaggcttgttccgcttttctttgaatgacatgtgtaataatcataatgttgtgaaccatattagcgagaatgatgagtctaatgtgtggcattcgcgactctgtcatgtgaatttcggttgtatgacgcgcttagctaacatgagtttaattccaaaattcactttggtaaaaggttccaagtgccatacttgtgttcaatcgaaacaacctcgcaagcctcacaaggcatctgaggcgaggaatttggcacctctagaacttgttcattccgatttgtgcgaaatgaacggcgtgttgactaaagggggaaagaaatatttcatgacactgatagatgattgcactagattttgctatgtgtatctattgaaaacaaaggatgaggcattgcatttctttaaaatctataaagctgaggtagaaaaccaacttgaaaggaaaatcaaacggttgaggtctgatagaggtggggagtatttttccaatgagtttgcatccttttgcgaagagtttggaattattcatgagatgacgcctccctattcaccccaatcaaatggggtggccgaaagaaagaaccgtactctaactgagatggtgaatgccatgttagacactgcggggctttccaaggaatggtggggtgaggcagttttgactgcgtgtcatgtcctgaataaaattccaatgaagcataaggaagtaacaccattcgaggaatgggaaaggaagaaattaaatctctcatacctacgaacatggggctgtttggccaaggtaaatgtacctatagccaaaaagcggaaacttggaccaaaaactgttgattgtgtgtttcttggttatgctatccacagtgtgggttatagattcttaatagtaaactctggagtacccgacatgtatgttggtagaattcttgagtccagagatgctacattctttgagaatgaatttcctatgaaatatacacctagcacttctagtaaagaaactgtcatgccccatgagcactttgcaccgatagaacacaatgatcaaacgcctgaggataatcctgaggaggacaacattgtagatactcgcaagagtaagagacaaagggttgcaaaatcctttggagatgactacattgtatacctcgtggatgacaccccaagaaccatagaagaggcatattcatctcctaacgctgactactggaaggaagcagtacgcagtgaaatggactcgattatgtctaatggtacttgggaagtcgttgagcgtccatatgggtgcaagcccgtaggatgcaaatgggttttcaagaaaaagcttaggcctgatggtacaatcgaaaagtacaaggcaaggcttgtggccaagggttatacccaaaaggaaggcgaggacttcttcgacacatactcaccagttgctcgcttgaccacgattcgagtactacttgctctggcagcctctcatggtcttctcgtccatcagatggacgttaagacagctttcctaaacggagagctggaggaggagatctatatggatcaaccagacgggtatgtactagaaggtcaggagggaatggtgtgtaaactattgaaatccttgtatgtcctcaagcaagcacctaagcaatggcatgagaagtttgacaccacgcttacatctgcaggctttgttgtgaacgaagctgacaaatgtgtatactatcgctatggtgggggagaaggggtgatcttgtgcttatatgtcgatgacatactgatctttgggaccagccttaatgtgattgaggaggtcaaagactatttgtccaagagttttgaaatgaaggatttgggagaggctgatgttattcttaacatcaaactacaaagaggagatgagggtgggattacacttgtgcaatcccactatgtggacaaggttttgagtcgctttggatatagtgactgcaagctagctcctactccttatgatcccagcgtgctattaaggaaaaaccgaagaatagcaagggatcagctgagatactctcaaatcattggttcattgatatacttggctagcgcaacgaggcctgacatctcatttgctgtaagcaagctgagccggtttgtctcaaatccggcagatgatcattggcaggctctggaaagagtaatgcgctatctaaagggtactatgagctatggaattcactataccgggtatccaaaagtactagaagggtatagtgactcaaactggatatctgatgctgatgaggtaaaagccacaagtggatatgtgttcacacttggaggtggcgctgtttcctggaagtcttgcaagcagaccatcttaacgaggtcaacaatggaagcagaacttacagcactagatactgcgacagttgaggccgagtggcttcgtgaactcctgatagatttgccggtggttgaaaaaccagtgccagctatcctaatgaactacgataatcaaacagtgattattaaagtgaatagttcaaaggacaacatgaagtcatctagacacatcaagagaagactgaaatctgtcagaaagcagaaaaactccggagtgatagcattggactatgtctaa

SEQ ID NO: 15411 - DNA, 4374 bp, Oryza sativa
  Clone ID: TFbOSC408508j.C1.o21.fg
atgtctggagttgctgccgccactgctggcggaggtggtacgccgccgccgacaggagctggatctggatccggagctggtgcgccaggaggaggtgccgtgaacgactacaacaacggaggcaattctgcctcaccatccagcggagggccattctcggggtataatcttctcctcctgctactgctgttagcgctattcctgttcccattgttagcgctatactatgtgcgctatgttcgctatgttcttgttcctgttctacatgatgcctctagcatgttatcgagcatgttatcgcgttactggtatgttcctgttcctgacattcatgatgcgcatagtatgctactggttatgttaagatcaccctacactgcttatgccatgatcattgtttcattttcttggattaaaatatgccgattaatgactatatttccaacaatccaaaaacctgataggtcattttcggtagttggctttgctgctgcactgaaaccacatgcttttgatggttcaaactataagagatggaaagcacgtgcactattgtggttgacagcgatgcagtgcttctatgtttcacggggcaaacgaagtgaaccacctctttctcctgacgaagaggctaagttcgaggcttcggattgcctgttccgtggagcattgatcagtgtactcgctgacaacatagtggacgtgtacatgcacatgccttctgggaaggacatgtgggatgcacttgaggccaagttcggagtttctgacgccggcagtgagctgtatgtcatggagcagttctatgactacaagatggtcgatgaccgttctgtagtagaacaagcttatgagattcagatgctggctaaggaacttgagaacaacaactgtgagttgccggacaagtttgtggcgggtggcattattgccaaactaccaccttcttggtcggaccttgccacttctctaaagcacaagagacaagagttcagtgttcctgatctcattggctctttgggtgttgaggagaaggcgagggcaaagtacgtccggggcaaaaaggttgagggaggttctagtgccaatatggtacagaagaagaaccctcatgcatcccacaacaacaagaaagtcaagcctgatgtcaaacccaaggctgcaaccaattttaagaagaaaggcaagggaaaggcaaagggagactgctttgtgtgtggcaagtctgggcattgggccaaggactgtcctgagcgcaaagacaggaagtctgccaacatgatcattagcgagggcggaggaacatcggggtatggtaaaatattacctacagttctctctgtttttcattcacctgattggtgggtggatactggtgctaatattcatgtatgtgctgacatttctctgttttcttcttatcaggtcgggagaggttcctccttgttgatgggaaacgggtcgcttgcggctgttcatggtgttggtacggtcgatctgaagtttacttcgggaaagaccgtgcagctgaagaacgtgcaacatgtcccttcaataaagaagaatctagttagcggctctctattgtgtagagaaggttttagacttgtgtttgagtccaataaatgtgtcgtatctaaatatgggacttttgttggaaaaggttatgacagcggaggcttgttccgcttttctttgaatgacatgtgtaataatcataatgctgtgaaccatattagcgagaatgatgagtctaatgtgtggcattcgcgactctgtcatgtgaatttcggttgtatgacgcgcttagctaacatgagtttaatttcaaaattcactttggtcaaaggttccaagtgccatacttgtgttcaatcgaaacaacctcgcaagcctcacaaggcatctgaggcgaggaatttggcacctctagaacttgttcattccgatttgtgcgaaatgaacggcgtgttgactaaagggggaaagaaatatttcatgacactgatagatgattgcactagattttgctatgtgtatctattgaaaacaaaggatgaggcattgcattactttaaaatctataaagctgaggtagaaaaccaacttgaaaggaaaatcaaacggttgagatctgatagaggtggggagtatttttccaatgagtttgcatccttttgcgaagagtttggaattattcatgagatgtcgcctccctattcaccccaatcaaatggggtggccgaaagaaagaaccgtactctaactgagatggtgaatgccatgttagatactgcggggctttccaaggaatggtggggtgaggcagttttgactgcgtgtcatgtcctgaataaaattccaatgaagcataaggaagtaacaccattcgaggaatgggaaaggaagaaattaaatctctcatacctacgaacatggggctgtttggccaaggtaaatgtacctatagccaaaaagcggaaacttggaccaaaaactgttgattgtgtgtttcttggttatgctatccacagtgtgggttatagattcttaatagtaaactctggagtacccgacatgcatgctggtacaattcttgagtccagagatgctacattctttgagaatgaatttcctatgaaatatacacctagcacttctagtaaagaaactgtcatgccccatgagcactttgcaccgatagaacacgatgatcaaacgcctgaggaaaatcctgaggaggacaacattgtagatactcgcaagagtaagagacaaagggttgcaaaatcctttggagatgactacattgtatacctcgtggatgacaccccaagaaccatagaagaggcatattcatctcctgacgctgactactggaaggaagcagtacgcagtgaaatggactcgattatgtctaatggtacttgggaagtcgttgagcatccatatgggtgtaagcccgtaggatgcaaatgggttttcaagaaaaagcttaggcctgatggtacaatcgaaaagtacaaggcaaggcttgtagccaagggttatacccaaaaggaaggcgaggacttcttcgacacatactcaccagttgctcgcttgaccacgattcgagtactacttgctctggcagcctctcatggtcttctcgtccatcagatggacgttaagacagctttcctaaacggagagctggaggaggagatctatatggatcaaccagacgggtatgtactagaaggtcaggagggaatggtgtgtaaactattgaaatccttatatggcctcaagcaagcacctaagcaatggcatgagaagtttgacaccacgcttacatctgcaggctttgttgtgaacgaagctgacaaatgtgtatactatcgctatggtgggggagaaggggtgatcttgtgcttatatgtcgatgacatactgatctttgggactagccttaatgtgattgaggaggtcaaagactatctgtccaagagttttgaaatgaaggatttgggagaggctgatgttattcttaacatcaaactacaaagaggagatgagggtgggattacacttgtgcaatcccactatgtggacaaggttttgagtcgctttggatatagtgactgcaagccagctcctactccttatgatcctaacgtgctattaaggaaaaaccgaagaatagcaagggatcaactgagatactctcaaatcattggttcattgatgtacttggctagcgcaacgaggcctgacatctcatttgctgtaagcaagctgagccggtttgtctcaaatccgggagatgatcattggcaggctctggaaagagtaatgcgctatctaaagggcactatgagctatggaattcactataccgggtatccaaaagtactagaagggtatagtgactcaaactggatatctgatgctaatgagataaaagccataagtggatatgcgttcacacttggaggtggcgctgtttcctggaagtcttgcaagcagaccatcttaacgaggtcaacaatggaagcagaacttacagcactagatactgcgacagttgaggccgagtggcttcgtgaactcctgatggatttgccggtggttgaaaaaccagtgccagctatcctaatgaactgcgataatcaaacagtgattattaaagtgaacagttcaaaggacaacatgaagtcatctagacacatcaagagaagactgaaatctgtcagaaagcagaaaaactccggagtgatagcattggactatgtccaaacggctagaaatctggcagatcagtttaccaaggggctaccacgtaatgtgatagacagtgcatcgagggaaatgggcttgatacccacctaa

SEQ ID NO: 15412 - DNA, 3102 bp, Oryza sativa
  Clone ID: TFbOSC410626j.C1.o4.gm
atggggagccactggtcatcgccgccggtcaccgccgccagagccgccgccgccgtcgccggtggggaggccaggagggaggaagagacctgcaccggcagcttattcctcgtcgccgatgcactacatgagcatcatcatgggcggccaaatattgccggcgcgacctgcgtgccgcacgagagggacgcgctgctggccttcaaggaaggtgtcgtcggcgaccccgtgggccgcctcgcttcgtggcgtaccggagaagactgcttccgccattggagaggtgtcaggtgcagcaacctcaccggccatgtccttaagctccacctccgcaacacggatggtggagaggcagctatgtccggcaaggcgggtgatcaagtttttggggactgcttcccgcacgactgctctgttcgtccaccatgtctgcgcctggagccggagctgccgccggcgccgctgctgcctctggagatggcgcgccgggagccggagccgttcgagccggagctgccgctggcgccgttgctgcctctggagatggcacgccgggagccggaggcgttgcgaacgtcaactccaacggaggcaattctgcctcacaatccagcggagggccattctcgggcgatgcaatgcttctatgtttcacggggcaaacgaagtgaaccacctctttctcctgaggaagaggctaaattcaaggcttcggattgcctgttccgtggagcattgatcagtgtactcgctgacaatatagtggacgtgtacatgcacatgcctttcgggaaggacatgtgggatgcacttgaggccaagttcggagtttccgacgccggcagtgagctgtatgtcatggagcagttttatgactacaagatggtcgatgaccgttctgtagtagaacaagctcatgagattcagatgctgactaaggaacttgagaacaacaactgtgagttgccggacaagtttgtggcgggtggcattattgccaaattgccaccttcttggtcggactttgccacttctctaaagcacaagaggcaagagttcagtgtttctgatctcattggctctttgggtgttgaggagaaggcgagggcaaaggacaactggggcaaaaaggttgagggaggttctagtgccaatatggtacagaagaagaaccgtcatgcatcccacaacaacaacaagaaagtcaagcctgatgtcaaacccaaggttgcaaccaactttaagaagaaaggcaagggaaaggcaaagggcgactgctttgtgtgtggcaagtctgggcattgggccaaggactgtcctgagcgcaaagacaggaagtgtgccaacatggtcattagcgagggcggaggaacatcgggagatgctacattctttgagaatgaattttccatgaaacatacacctagcacttctagtcaagaaactgtcatgccccataagcactttgcaccgatagaacacaatgatcaaacgcctgaggaaaatcctgaggaggacaacattgtagatactcgtaagagtaagagacaaagggttgcaaaatcctttggagatgactacattgtatacctcgtggatgacaccccaagaaccatagaagaggcatattcatctcctgacgctgactactggaaggaagcagtacgcagtgagatggactcgattatgtctaatgatacttgggaagtcgttgagcgtccatatgggtgcaagcctataggatgcaaatgggttttcaagaaaaagcttagccctgatggtacaatcgaaaagtacaaggcaagacttgtggccaagggttatacccaaaaggaaggcaaggattttttcgacacatactcaccagttgctcacttgacaatgattcgagtactacttgctctggcagcctctcatggtgttctcgtccatcagatgaacgttaagacagctttcctaaacggagagctggaggaggagatctatatggatcaaccagacgggtatgtactagaaggctttgttgtgaacggagctgacaaatgtgtgtactatcgctatggtgggggagaaggagtgatcttgtgcttatatgtcgatgacatattgatctttgggaccaacctcaatgtgattgagggggtcaaggactatctgtccaagagttttgaaatgaaggatttgggagaggctgatgttattcttaacattaaactacaaagaggagatgagggtgagattacacttgtgcaatcccactatgtggacaagattttgagtcactttggatatagtggctgcaagccagcttctactccttatgatcccagcgtgctattaaggaaaaaccgaagaatagcaagggatcaactgagatactcccaaataattggttcattgatgtacttggctagtgcaacgaggcctgacatctcatttgctgtaagcaagctgagccggtttgtcttaaatccgggagatgatcattggcaggctctggaaagagtaatgcgctatctaaagggcattatgagttatggaattcactataccaggtatccaaaagtactagaagggtatagtgactcaaactggatatctgatgctgataagataaaagccacaagtggatatgtgttcgcacttggaggtggcactgtttcctggaagccttgcaagcagaccatcttaacgaggtcaacaatggaagtagaacttacagcactagatactgcgacagttgaggccgagtggcttcgtgaactcctgatggatttgccggtggttggaaaaccagtgccagctatcctaatgaactgtgacaatcaaacaatgattattaaagtgaacagttcaaaggacaacatgaagtcatctaggcatatcaagagaagactgaaatctgtcagaaagcagaaaaactccggagtgatagcattggactatgtccaaacggctagaaatctggcagatcagtttaccaaggggctaccacgtaatgatggctcaaaccttaatgtgatccgagtggcttttccaagcagagatgttgacctgcagaacatctcagaaggaacacacctatatgagttcgactgctag

SEQ ID NO: 15413 - DNA, 3705 bp, Oryza sativa
  Clone ID: TFbOSC411338j.C1.o6.fg
atgtcgaacactggagacaaggagaaggagactcccgtcaacaccaacggaggcaatactgcctcaaactccagcggaggaccattcttggggtataaccttattacattatttcaattagaagttttactgttaatgtacatcgcaatgtcaacattgtgtcattatgtgattgttgatgcttattcaacgttaagcatgctcatgttgattacattcaccactatcactggatcaaatcctattgtaaatatcatgtttattatcttgttattttggattaaaatatgccgaattatgaccaaatttccaacaatccaaaaacctgataggtcattttcggtagttggctttgctgctgcactgaaaccacatgcctttgatggttcaaactataagagatggaaagcacgtgcactattgtggttgacagcgatgcagtgcttctatgtttcacggggcaaacgaagtgaaccacctctttctcctgaggaagaggctaagttcgaggcttcggattgcctgttccgtggagcattgatcagtgtactcgctgacaacatagtggacgtgtacatgcacatgccttctgggaaggacatgtgggatgcacttgaggccaagttcggagtttctgacgccggcagtgagctgtatgttatggagcagttctatgactacaagatggtcgatgaccgttctgtagttgaacaagctcatgagattcagatgctggctaaggaacttgagaacaacaactgtgagttgccggacaagtttgtggcaggtggcattattgccaaactaccaccttcttggtcggactttgccacttctctaaagcacaagagacaagagttcagtgttcctgatctcattggctctttgggtgttgaggagaaggcgagggcaaaggacgtccggggcaaaaaggttgagggaggttctagtgccaatatggtacagaagaagaaccctcatgcatcccacaacaacaagaaagtcaagcctgatgtcaaacccaaggctgcaaccaattttaagaagaaaagcaagggaaaggcaaagggagactgctttgtgtgtggcaagtctgggcattgggccaaggactgtcctgagcgcaaagacaggaagtctgccaacatgatcattagcgaggacggaggaacatcggggtacggcaaaatattacctacagttctctctgtttttcattcacctgattggtgggtggacactggtgctaatattcatgtcgggagaggttcctccttgttgatgggaaacgggtcgcttgcggctgttcatggtgttggtacggtcgatctgaagtttacttcgggaaagaccgtgcagctgaagaacgtgcagcatgtcctttcaataaagaagaatctagttagcggctctctattgtgtagagaagattttagacttgtgtttgagtccaataaatgtgtcgtatctaaatatgggacttttgttggaaaaggttatgacagcggaggcttgttccgcttttctttgaatgacatgtctaataatcataatgctgtgaaccatattagcgagaatgatgagtctaatgaaaatcaaacggttgggtctgatagaggtggggagtatttttccaatgagtttgcatccttttgcgaagagtttggaattattcatgagatgacgcctccctattcaccccaatcaaatggggtggccgaaagaaagaaccgtactctaactgagatggtgaatgccatgttagacactgcggggctttccaaggaatggtggggtgaggcagttttgactgcgtgtcatgtcctgaataaaattccaatgaagcataaggaagtaacaccattcgaggaatgggaaaggaagaaattaaatctctcatacctacgaacatggggctgtttggccaaggtaaatgtacctatagccaaaaagcggaaacttggaccaaaaactgttgattgtgtgtttcttggttatgctatccacagtgtgggttatagattcttaatagtaaactctggagtacccgacatgcatgttggtacaattcttgagtccagagatgctacattctttgagaatgaatttcctatgaaatatacacctagcacttctagtaaagaaactgtcatgccccatgagcactttgcaccgatagaacacaatgatcaaacgcctgaggaaaatcctgaggagggcaacattgtagatactcgcaagagtaagagacaaagggttgcaaaatcctttggagatgactacattgtatacctcgtggatgacaccccaagaaccatagaagaggcatattcatctcctgacgctgactactggaaggaagcagtacgcagtgaaatggactcgattatgtctaatggtacttgggaagtcgttgagcgtccatatgggtgcaagcccgtaggatgcaaatgggttttcaagaaaaagcttaggcctgatggtacaatcgaaaagtacaaggcaaggcttgtggccaagggttatacccaaaaggaaggcgaggacttcttcgacacatactcaccagttgctcgcttgaccacgattcgagtactacttgctctggcagcctctcatggtcttctcgtccatcagatggacgttaagacagctttcctaaacggagagctggaggaggagatctatatggatcaaccagacgggtatgtactagaaggtcaggagggaatggtgtgtaaactattgaaatccttgtatggcctcaagcaagcacctaagcaatggcatgagaagtttgacaccacgcttacatctgcaggctttgttgtgaacgaagctgacaaatgtgtatactatcgctatggtgggggagaaggggtgatcttgtgcttatatgtcgatgacatactgatctttgggaccagccttaatgtgattgaggaggtcaaagactatctgtccaagagttttgaaatgaaagatttgggagaggctgatgttattattaacatcaaactacaaagaggagatgagggtgggattcacttgtgcaatcccactatgtggacaagcgcaacgaggcctgacatctcatttgctgtaagcaagctgagccggtttgtctcaaatccgggagatgatcattggcaggctctggaaagagtaatgcgctatctaaagggtactatgagctatggaattcactataccgggtatccaaaagtactagaagggtatagtgactcaaactggatatctgatgctgatgagataaaagccacaagtggatatgtgttcacacttggaggtggcgttgtttcctggaagtcttgcaagcagaccatcttaacgaggtcaacaatggaagcagaacttacagcactagatactgcgacagttgaggccgagtggcttcgtgaactcctgatagatttgccggtggttgaaaaaccagtgccagctatcctaatgaactgcgataatcaaacagtgattattaaagtgaacagttcaaaggacaacatgaagtcatctagacacatcaagagaagactgaaatctgtcagaaagcagaaaaactccggagtgatagcattggactatgtccaaacggctagaaatctggcagatcagtttaccaaggggctaccacgtaatgtgatagacagtgcatcgagggaaataggcttgatacccacctaa

SEQ ID NO: 15414 - DNA, 3514 bp, Oryza sativa
  Clone ID: TFbOSC415168j.C1.o9.fg
atgtctggagttgctaccgccgctattggcggaggtggtgcgccgccaccgacaggagctgcgccgccgccgacgccgacaggagctggatccggagctggtgcgccaggaggaggtgctgtgaacgactacaacaacggaggcaattctgcctcaccatccagcggagggccattctcggggtataatcttctccttctactgctgttagcgctactcctgttcccattgttagcgctatactgtgtgcgctatgttcttgttcctgttctacatgatgcctctagcatgttatcgcattactggtatgttcctgtttctgacattcatgatgtgcatagtatgctactggttatgttaagatcaccctacactgcttatgccatgatcatagtttcaatttcttggattaaaatatgccgaataatgactatattttcaacaatccaaaaacctgataggtcattttcggtagttggctttgctgctgcactgaaaccacatgcttttgatggttcaaactataagaaatggaaagcacgtgcactattgtggttgacagcgatgcagtgcttctatgtttcacggggtaaacgaagtgaaccacctctttctcctgaggaagaggctaagttcgaggcttcggattgcctgttccgtggagcattgatcagtgtactcgctgacaacatagtggacgtgtacatgcacatgccttctgggaaggacatgtgggatgcacttgaggccaagttcggagtttctgacgccggcagtgagctgtatgtcatggagcagttctatgactacaagatggtcgatgaccgttctgtagtagaacaagctcatgagattcagatgctggctaaggaacttgagaacaacaactgtgagttgccggacaagtttgtggcgggtggcattattgccaaactaccaccttcttggtcggactttgccacttctctaaagcacaagagacaagagttcagtgttcctgatctcattggctctttgggtgttgaggagaaggcgagggcaaaggacgtccggggcaaaaaggttgagggaggttctagtgccaatatggtacagaagaagaaccctcatgcatcccacaacaacaagaaagtcaagcctgatgtcaaacccaaggctgcaaccaattttaagaagaaaggcaagggaaaggcaaagggagactgctttgtgtgtggcaagtctgggcattgggccaaggactgtcctgagcgcaaagacaggaagtctgccaacatgatcattagcgagggcggaggaacatcggggtacggtaaaatattacctacagttctctctgtttttcattcacctgattggtgggtggatactggtgctaatattcatgtcgggagaggttcctccttgttgatgggaaacgggtcgcttgcggctgttcatggtgttggtacggtcgatctgaagtttacttcgggaaagaccgtgcagctgaagaacgtgcagcatgtcccttcaataaagaagaatctagttagcggctctctattgtgtagagaaggttttagacttgtgtttgagtccaataaatgtgtcatatctaaatatgggacttttgttggaaaaggttatgacagcggaggcttgttccgcttttctttgaatgacatgtgtaataatcataacgctgtgaaccatattagcgagaatgatgagtctaatgtgtggcattcgcgactctgtcatgtgaatttcggttgtatgatgcgcttagctaacatgagtttaattccaaaattcactttggtcaaaggttccaagtgccatacttgtgttcaatcgaaacaacctcgcaagcctcacaaggcatctgaggcgaggaatttggcacctctagaacttgttcattccgatttgtgcgaaatgaacggcgtgttgactaaagggggaaagaaatatttcatgacactgatagatgattgcactagattttgctatgtgtatctattgaaaacaaaggatgaggcattgcattactttaaaatctataaagctgaggtagaaaaccaacttgaaaggaaaatcaaacggttgaggtctgatagaggtggggagtatttttccaatgagtttgcatccttttgcaaagagtttggaattattcatgagatgacgcctccctattcaccccaatcaaatggggtggccgaaagaaagaaccgtactctaactgagatggtgaatgccatgttagacactgcgaggctttccaaggaatggtggggtgaggcagttttgactgcgtgtcatgtcctgaataaaattccaatgaagcacaaggaagtaaatgtacctatagtcaaaaagcggaaacttggaccaaaaactgttgattgtgtgtttcttggttatgctatccacagtgtgggttatagattcttaatagtaaactctggagtacccgacatgcatgctggtacaatttttgagtccagagatgctactttctttgagaatgaatttcctatgaaatatacatctagcacttctagtaaagaaactgtcatgccccatgagcactttgcaccgatagaacacaatgatcaaacgcctgaggaaaatcctgaggaggacaacattgtagatactcgcaagagtaagagacaaagggttgcaaaatcctttggagatgactacattgtatacctcgtggatgacaccccaagaaccatagaagaggcatattcatctcctgacgctgactactggaaggaagcagtacgcagtgaaatggactcgattatgtctaatggtacttgggaagtcgttgagcgtccatatggatgtaagcccgtaggatgcaaatgggttttcaagaaaaagcttaggcctgatggtacaatcgaaaagtataaggcaaggcttgtggccaagggttatacccaaaaggaaggcgaggatttcttcgacacatattcaccagttgctcgcttgactacgattcgagtactacttgctctggcagcctctcatggtcttcttgtccatcagatggacgttaagacagctttcctaaacggagagctggaggaggagatctatatggatcaaccagacgggtatgtactagaaggtcaggagggaatggtgtgtaaactattgaaatccttgtatggcctcaagcaagcacctaagcaatggcatgagaagtttgacaccacgcttacatctgcaggctttgttgtgaacgaagctgacaaatgtgtatactatcgctatggtgggggagaaggggtgatcttatgcttgtatgtcgatgacatactgatctttgggaccagccttaatgtgattgaggaggtcaaagactatctgtccaagagttttgaaatgaaggatttgggagaggctgatgttattcttaacatcaaactacaaagaggagatgagggtgggatcacacttgtgcaatcccactatgtggacaaggttttgagtcgctttggatatagtgact
